United States Patent Application Publication US 2018/0126003 A1 - sequence listing, part 83

SEQ ID NO: 150458 - DNA, 1353 bp, Artificial Sequence
  derived and/or modified sequence
atgggcaagtccttcgccaattttatgtgcaagaaagacttccaccccgcttccaaaagtaacattaagaaggtctggatggcagaacagaaaattagctacgataagaagaaacaagaggaattgatgcaacaatatctgaaggagcaggagtcctacgataacagattgttgatgggagacgaacgtgttaagaatggtttgaattttatgtatgaggctcccccaggggctaaaaaagagaataaagagaaggaggagacagaaggggagacggagtataaatttgagtggcaaaaaggtgcaccaagggagaagtatgccaaagatgacatgaacatacgcgatcaaccctttggaatccaggtacgcaacgtcaggtgtattaagtgtcataaatgggggcatgtgaacacggaccgagaatgccccctctttggactttcgggcatcaacgcttcttcagtaccaacagacggatctggacccagcatgcatccctccgaactgatagccgaaatgcgcaattccggatttgctcttaaaaggaatgtgctgggcagaaacttgactgccaacgatcccagccaggagtacgtggcctctgaaggagaggaggatcccgaagtcgagtttcttaagagcctgacgaccaagcaaaaacaaaaattgctgcgaaagctggatagactggagaaaaaaaagaaaaaaaaagacaggaagaaaaagaaattccaaaagtcacggtctaagcacaagaaacataagagcagttcatccagctcttcatcttcctcgtcatccagtagtaccgagacaagtgagagctcgagcgagtcagagagcaacaacaaagagaaaaaaatacagcgcaaaaagagaaagaagaacaagtgtagtggacacaataatagtgatagcgaagagaaagacaagtccaaaaaaaggaaactgcatgaagaattatcgtccagtcaccacaatcgagagaaagcaaaagagaagccaaggttcctaaaacacgagtctagccgagaagacagcaaatggagtcattcggacagcgacaagaagagtcgcacacacaaacattctccggagaagcgaggtagtgagagaaaagaaggctcctcccggtctcatgggagagaggagcgatcccgcagaagcagaagtcgatctccaggctcttataagcagcgagaaacaaggaaacgggctcagcggaatccaggcgaagagcagtcacgcagaaacgattctcgttcccatggcactgacctttacagaggtgagaagatgtaccgtgagcatcctggcggtacacacaccaaagtaacacagagagaatag

SEQ ID NO: 150459 - protein, 850 aa, Artificial Sequence
  derived and/or modified sequence
MRQVCCSALPPPPLEKGRCSSYSDSSSSSSERSSSSSSSSSESGSSSRSSSNNSSISRPAAPPEPRPQQQPQPRSPAARRAAARSRAAAAGGMRRDPAPGFSMLLFGVSLACYSPSLKSVQDQAYKAPVVVEGKVQGLVPAGGSSSNSTREPPASGRVALVKVLDKWPLRSGGLQREQVISVGSCVPLERNQRYIFFLEPTEQPLVFKTAFAPLDTNGKNLKKEVGKILCTDCATRPKLKKMKSQTGQVGEKQSLKCEAAAGNPQPSYRWFKDGKELNRSRDIRIKYGNGRKNSRLQFNKVKVEDAGEYVCEAENILGKDTVRGRLYVNSVSTTLSSWSGHARKCNETAKSYCVNGGVCYYIEGINQLSCKCPNGFFGQRCLEKLPLRLYMPDPKQKAEELYQKRVLTITGICVALLVVGIVCVVAYCKTKKQRKQMHNHLRQNMCPAHQNRSLANGPSHPRLDPEEIQMADYISKNVPATDHVIRRETETTFSGSHSCSPSHHCSTATPTSSHRHESHTWSLERSESLTSDSQSGIMLSSVGTSKCNSPACVEARARRAAAYNLEERRRATAPPYHDSVDSLRDSPHSERYVSALTTPARLSPVDFHYSLATQVPTFEITSPNSAHAVSLPPAAPISYRLAEQQPLLRHPAPPGPGPGPGPGPGPGADMQRSYDSYYYPAAGPGPRRGTCALGGSLGSLPASPFRIPEDDEYETTQECAPPPPPRPRARGASRRTSAGPRRWRRSRLNGLAAQRARAARDSLSLSSGSGGGSASASDDDADDADGALAAESTPFLGLRGAHDALRSDSPPLCPAADSRTYYSLDSHSTRASSRHSRGPPPRAKQDSAPL

SEQ ID NO: 150460 - DNA, 2553 bp, Artificial Sequence
  derived and/or modified sequence
atgcgtcaggtgtgttgtagtgccttgcccccgccccctttggagaaggggcgctgctctagctactcagatagctcctcttcttctagtgagaggagttcttccagctcttcatctagcagtgaatcaggcagctctagcaggtcttcctccaataacagctccattagccgaccagccgcccctcccgagcccaggcctcaacagcagcctcaaccaagatcccctgcagcacggcgggctgcggcaaggtcgcgcgccgccgcagctggcggtatgcggcgggatcccgcccccggcttctcaatgctcctgttcggtgtgtccctcgcatgctattccccgagtttgaagagcgtccaagaccaggcatataaggctcccgttgtcgtggagggcaaggtccaaggtttagtccctgccggaggttcttctagcaattccacaagggaaccccctgctagtggccgcgttgcgctggtaaaggtgctggacaagtggccactccgtagtggtgggcttcaacgtgaacaagtgatttcagtaggtagttgcgtgccccttgagcgtaaccagcgttacatctttttcctggaacccaccgaacagcccctggtattcaagacggcctttgcacctcttgacactaacggtaaaaatttaaagaaggaggtggggaagatattatgtactgattgcgccaccaggccaaaactgaagaagatgaagagtcagaccggtcaggtaggcgagaagcagtcactgaagtgtgaagctgccgcaggaaatccccaaccttcctatcgctggttcaaggacgggaaggaattgaatcgatctagggacatacgtatcaaatatgggaacggacggaagaatagtcgtctacagttcaataaagtgaaggtggaagatgctggggaatacgtatgcgaggctgaaaacatcctggggaaagacacggtacgcggaagactctacgtaaatagtgtatcgacgaccttgagctcctggtcaggccacgcaagaaaatgcaatgaaaccgcaaagagttactgtgtaaatggaggcgtgtgctattatattgagggaattaatcaattgagttgtaaatgccctaatgggttctttggccagaggtgcttggagaaacttccattgagactctatatgccagatcccaagcagaaggccgaggagttataccagaagcgcgtgctgacgatcacgggtatttgcgtagctctgttggtggtgggcattgtgtgcgtcgtggcgtactgtaagaccaagaagcagagaaaacagatgcataatcacttgagacagaatatgtgcccagctcaccagaatcggtccctggctaacggaccatctcatccaagactagaccctgaagaaattcagatggctgactacatctcaaaaaacgtgccggcaaccgaccatgtgatccgccgggaaacggagacaaccttctctggctcccactcttgtagtccttcacatcattgctctactgccacaccgacatcctctcataggcatgagtcacacacatggagtcttgagagaagtgagtccctgacctccgacagtcaatctgggatcatgctttccagcgtcgggacaagcaaatgcaacagtcctgcttgcgttgaagctcgagctagacgcgctgctgcatacaacttagaagagcgtcggagagccacagctcctccttaccatgactctgtggacagcctgagagactctccccactctgagaggtatgtgtcggcactgacaacacccgccagactctcaccagtcgatttccactatagcctggccacccaggtcccgaccttcgagatcacctctcctaactctgcccatgccgtaagcctgccaccagctgcacccattagttataggctcgctgagcagcagcccctactgcggcatccagcccctcctgggcccggtccaggccctggacctgggccagggcctggagccgacatgcaacgctcttatgattcttactactatcccgctgccggacctggccccagacgcggcacatgtgctctaggtggctccctgggcagcctgccagcaagcccttttaggatcccagaggacgatgaatacgaaaccactcaggagtgcgccccacctcccccgccgcggccccgcgcacgcggagcctccaggcgcacctccgctggccccaggcggtggagaagaagcaggctgaacggattagctgcccagcgcgctagagctgcaagagattctctttctctgtcatctggttccggcgggggcagtgcaagcgccagcgatgacgacgccgatgatgccgacggcgccctggccgccgagtctactccattcctaggactcaggggagcccacgacgcactccggagcgatagtccaccgctgtgcccagcggctgatagtcgcacttattattctctcgattcacactccacacgtgcttcatctcgccactccaggggcccacccccccgcgctaagcaggattccgccccgctctag

SEQ ID NO: 150461 - DNA, 2553 bp, Artificial Sequence
  derived and/or modified sequence
atgaggcaggtgtgctgcagcgccctgcccccaccacccctggagaagggccgctgcagcagctacagcgacagcagcagcagcagcagcgagaggagcagcagcagcagcagcagcagcagcgagagcggcagcagcagccgcagcagcagcaacaacagcagcatcagcaggcctgctgcccctcctgagccccggccccagcagcagccccagcccaggagccctgctgccaggagagctgctgcccggagcagagctgctgctgctgggggcatgaggcgggaccctgcccctggcttctccatgctgctgtttggagtgtccctggcctgctacagccccagcctgaagtctgtgcaggaccaggcctacaaggcccctgtggtggtggagggcaaggtgcagggcctggtgcctgctgggggcagcagcagcaacagcacccgggagcccccagccagcggccgggtggccctggtgaaggtgctggacaagtggcccctgcggagcggcggcctgcagcgggagcaggtgatctctgtgggcagctgtgtgcccctggagaggaaccagcgctacatcttcttcctggagcccacagagcagcccctggtgttcaagacagcctttgcccccctggacaccaacgggaagaacctgaagaaggaggtgggcaagatcctgtgcacagactgtgccacccggcccaagctgaagaagatgaagagccagacaggccaggtgggggagaagcagagcctgaagtgtgaggccgctgctggcaacccccagcccagctaccgctggttcaaggatggcaaggagctgaacagaagccgggacatccgcatcaagtatggaaatggaaggaagaacagccggctgcagttcaacaaggtgaaggtggaggatgctggggagtatgtgtgtgaggccgagaacatcctgggcaaggacacagtgcggggccgcctgtatgtgaacagcgtgtccaccaccctgagctcctggagcggccacgccaggaagtgcaatgaaacagccaagagctactgtgtgaatggaggagtgtgctactacatcgagggcatcaaccagctgagctgcaagtgccccaacggcttcttcggccagcgctgcctggagaagctgcccctgcggctgtacatgccagaccccaagcagaaggccgaggagctgtaccagaagagggtgctgaccatcaccggcatctgtgtggccctgctggtggtgggcatcgtgtgtgtggtggcctactgcaagaccaagaagcagaggaagcagatgcacaaccacctgcggcagaacatgtgcccagcccaccagaacagaagcctggccaacggccccagccacccccggctggaccctgaggagatccagatggctgactacatcagcaagaatgtgcctgccacagaccacgtgatccggcgggagacagagaccaccttcagcggcagccacagctgcagccccagccaccactgcagcacagccacccccaccagcagccacagacatgagagccacacctggagcctggagaggtctgagagcctgaccagtgacagccagagcggcatcatgctgagctctgtgggcaccagcaagtgcaacagccctgcctgtgtggaggcccgggcccggcgggctgctgcctacaacctggaggagaggagaagagccacagccccaccctaccatgattctgtggacagcctgcgggacagcccccacagcgagcgctacgtgtctgccctgaccaccccagcccggctgagccctgtggacttccactacagcctggccacccaggtgcccacctttgagatcaccagccccaacagcgcccatgctgtgtccctgcccccagctgcccccatctcctaccgcctggccgagcagcagcccctgctgcggcacccagcccctcctggccctggccctggccctggccctggccctggccctggagctgacatgcagaggagctatgacagctactactacccagctgctggccctggcccccggcggggcacctgtgccctgggcggcagcctgggcagcctgcctgccagccccttccgcatcccagaagatgatgaatatgagaccacccaggagtgtgcccctcctcctccaccccggccccgggcccggggggccagcaggaggaccagcgctggcccccggcgctggaggaggagccggctgaatggcctggccgcccagagggcccgggccgcccgggacagcctgagcctgagcagcggcagcggcggcggcagcgccagcgccagtgatgatgatgctgatgatgctgatggagccctggccgctgagagcacccccttcctgggcctgcggggggcccatgatgccctgcggagtgacagcccccccctgtgcccagctgctgacagcaggacctactacagcctggacagccacagcacccgggccagcagccgccacagccggggccccccaccccgggccaagcaggacagcgcccccctgtag

SEQ ID NO: 150462 - DNA, 2553 bp, Artificial Sequence
  derived and/or modified sequence
atgcggcaggtgtgctgcagcgccctgccccccccccccctggagaagggtcgttgtagcagctactctgattcctcctcttcaagctccgagcgctcatcctccagttcctcatcatcaagcgagtctggatcctcctctcgatccagctctaacaactcttcaatctcgaggcccgctgcaccacctgagccaaggcctcagcagcagccacagccgcggagcccagcagcgcgcagagctgctgcccgctcccgggccgccgccgccgggggtatgaggagggaccctgccccaggcttctcaatgctgctttttggagtgtcgctagcatgctacagcccttcccttaagagtgtacaggatcaggcctacaaagctcccgtagtcgtcgaaggaaaggtgcagggcctggtcccggccgggggttcgtcttcaaacagcacccgtgagcctcctgcctccggcagagtggctctcgtcaaggtgctggataaatggccgctccggagtggtggtttacagcgggaacaggttataagcgtcggatcttgcgtccctcttgaaagaaaccaaaggtacatttttttcctcgagccaaccgagcagcctttggtgtttaaaacagccttcgctcctttggatacaaacggaaagaatctgaaaaaagaggtcggcaagattctctgcactgattgcgcaacccgcccaaaactcaaaaaaatgaagtctcagaccgggcaggtcggcgagaaacagtcactgaagtgcgaggctgccgcaggtaatcctcaaccctcgtatagatggttcaaagatggcaaagagctgaacagaagtcgggacattagaattaagtatggcaacggccgtaagaactcgagacttcaatttaacaaggttaaagtggaggacgccggagagtatgtgtgtgaggctgagaacatcctgggaaaggacacggtgcgcggcagactgtacgttaacagtgtcagcactacccttagcagctggagcggccatgccagaaaatgtaacgagacggcaaagagttattgcgtgaatggaggggtatgctactatattgaagggattaaccaattgtcttgcaagtgtccaaacggcttcttcggccagcggtgtttggaaaagttaccacttcgtctgtatatgcccgatccaaagcagaaggcagaggaattgtaccagaagcgtgtactcacaatcactggcatctgcgtagccctgcttgtagtcggcattgtttgcgtggtggcatactgcaagacaaagaagcagcgtaagcagatgcacaaccatcttcggcagaacatgtgtccggcacaccaaaacaggtcattggccaacggtcctagtcatccccggctggatcctgaagagattcagatggctgactatatctctaaaaatgtgcccgcgaccgaccacgtcatccggcgtgagacagaaaccacattttccggctcccattcttgctctcctagccaccactgcagtactgctactcccacctcaagccatcgccatgagagccatacatggtccctcgagaggtcagagtcgctgacatccgattctcaaagcggaatcatgctgtcgtcagtaggcactagcaagtgcaattccccagcttgcgtggaggcgcgcgcccgccgagctgcggcctacaaccttgaggaacggcggcgggcaactgcccccccttatcacgacagtgtggactctttgagggactctcctcatagcgagcgatatgtaagcgcgctcactactcccgccaggctgagcccagtggatttccattacagcctggctacccaggttccaacatttgagataacaagtccaaatagcgcccacgctgtgtcattacctcctgccgcaccgatctcgtaccgtctggcggagcaacaacccctccttagacacccggcaccccctggcccaggcccaggccccggcccgggccccgggcccggggctgatatgcagagatcctatgactcctattactaccctgccgctggaccagggccccgacggggaacatgcgccctaggaggctcgttgggaagcttacctgcatcccctttcaggatacctgaggacgacgaatacgagacaacacaggagtgtgccccacctcctcctccacgccctcgagctcgcggggcctcccggagaacgtccgctggccccaggcgatggcgacggtccagattgaatggcctagcagctcagagagcccgtgccgccagagatagcttgagcctgagttcaggctccggcggcggaagcgcttctgcctcagacgatgacgccgacgatgcagacggcgccctggccgctgagtccaccccatttctgggcctccgtggcgcacacgacgcacttcgctcagattcacctcccttatgtcccgctgcggacagccggacctactacagcctagatagtcatagtactcgcgcctcaagtagacacagccggggacctccgcctagggctaaacaggattctgcccccctgtag

SEQ ID NO: 150463 - DNA, 3020 bp, Artificial Sequence
  derived and/or modified sequence
cctccaggtcctggcgcacagggtgggagcgctgcgctgcgccgcgctgcgcatcgcggcccgcttgccgcctgccccctgccctagctgggccacctccccgggctgccggtggagggctaagaggcgctaacgttacgctgtttccggttttccagcgggctctgtttcccctcccaaggcggcggcggctgagcggcggagccccccaaatggcctggccagatgcggcaggtttgctgctcagcgctgccgccgccgccactggagaagggtcggtgcagcagctacagcgacagcagcagcagcagcagcgagaggagcagcagcagcagcagcagcagcagcgagagcggcagcagcagcaggagcagcagcaacaacagcagcatctctcgtcccgctgcgcccccagagccgcggccgcagcaacagccgcagccccgcagccccgcagcccggagagccgccgcccgttcgcgagccgcagccgccggcggcatgaggcgcgacccggcccccggcttctccatgctgctcttcggtgtgtcgctcgcctgctactcgcccagcctcaagtcagtgcaggaccaggcgtacaaggcacccgtggtggtggagggcaaggtacaggggctggtcccagccggcggctccagctccaacagcacccgagagccgcccgcctcgggtcgggtggcgttggtaaaggtgctggacaagtggccgctccggagcggggggctgcagcgcgagcaggtgatcagcgtgggctcctgtgtgccgctcgaaaggaaccagcgctacatctttttcctggagcccacggaacagcccttagtctttaagacggcctttgcccccctcgataccaacggcaaaaatctcaagaaagaggtgggcaagatcctgtgcactgactgcgccacccggcccaagttgaagaagatgaagagccagacgggacaggtgggtgagaagcaatcgctgaagtgtgaggcagcagccggtaatccccagccttcctaccgttggttcaaggatggcaaggagctcaaccgcagccgagacattcgcatcaaatatggcaacggcagaaagaactcacgactacagttcaacaaggtgaaggtggaggacgctggggagtatgtctgcgaggccgagaacatcctggggaaggacaccgtccggggccggctttacgtcaacagcgtgagcaccaccctgtcatcctggtcggggcacgcccggaagtgcaacgagacagccaagtcctattgcgtcaatggaggcgtctgctactacatcgagggcatcaaccagctctcctgcaaatgtccaaatggattcttcggacagagatgtttggagaaactgcctttgcgattgtacatgccagatcctaagcaaaaagccgaggagctgtaccagaagagggtcctgaccatcacgggcatctgcgtggctctgctggtcgtgggcatcgtctgtgtggtggcctactgcaagaccaaaaaacagcggaagcagatgcacaaccacctccggcagaacatgtgcccggcccatcagaaccggagcttggccaatgggcccagccacccccggctggacccagaggagatccagatggcagattatatttccaagaacgtgccagccacagaccatgtcatcaggagagaaactgagaccaccttctctgggagccactcctgttctccttctcaccactgctccacagccacacccacctccagccacagacacgagagccacacgtggagcctggaacgttctgagagcctgacttctgactcccagtcggggatcatgctatcatcagtgggtaccagcaaatgcaacagcccagcatgtgtggaggcccgggcaaggcgggcagcagcctacaacctggaggagcggcgcagggccaccgcgccaccctatcacgattccgtggactcccttcgcgactccccacacagcgagaggtacgtgtcggccctgaccacgcccgcgcgcctctcgcccgtggacttccactactcgctggccacgcaggtgccaactttcgagatcacgtcccccaactcggcgcacgccgtgtcgctgccgccggcggcgcccatcagttaccgcctggccgagcagcagccgttactgcggcacccggcgccccccggcccgggacccggacccgggcccgggcccgggcccggcgcagacatgcagcgcagctatgacagctactattaccccgcggcggggcccggaccgcggcgcgggacctgcgcgctcggcggcagcctgggcagcctgcctgccagccccttccgcatccccgaggacgacgagtacgagaccacgcaggagtgcgcgcccccgccgccgccgcggccgcgcgcgcgcggtgcgtcccgcaggacgtcggcggggccccggcgctggcgccgctcgcgcctcaacgggctggcggcgcagcgcgcacgggcggcgagggactcgctgtcgctgagcagcggctcgggcggcggctcagcctcggcgtcggacgacgacgcggacgacgcggacggggcgctggcggccgagagcacacctttcctgggcctgcgtggggcgcacgacgcgctgcgctcggactcgccgccactgtgcccggcggccgacagcaggacttactactcactggacagccacagcacgcgggccagcagcagacacagccgcgggccgcccccgcgggccaagcaggactcggcgccactctagggccccgccgcgcgcccctccgccccgcccgccccactatctttaaggagaccagagaccgcctactggagagaaaggaggaaaaaagaaataaaaatatttttattttctataaaaggaaaaaagtataacaaaatgttttattttcattttagcaaaaattgtcttataatactagctaacggcaaaggcgtttttatagggaaactatttatatgtaacatcctgatttacagcttcgg

SEQ ID NO: 150464 - DNA, 2553 bp, Artificial Sequence
  derived and/or modified sequence
atgcggcaggtgtgctgttctgccctccctccccctccattggagaagggcaggtgttcctcctactctgatagttcaagctccagcagtgaaaggagctcgtcttcgtcctccagctcaagtgagtcagggagtagctctaggagctcgagtaacaatagcagcatctctcgcccagcagcaccccctgagccccgtccacagcagcagcctcagccgagatctcctgcggctagaagagcggctgctcgaagtcgtgccgctgctgcaggcggaatgcggcgtgatcctgcaccaggattctcaatgctgctgttcggagtctccctggcctgttattcccccagccttaagagcgtgcaggaccaggcatataaggcccctgtcgtggtggagggcaaggtgcaaggcctcgtgccggcaggagggagcagctccaactccactagggagccccctgctagcggccgtgttgctctggtaaaggtgttagacaagtggcctttgaggtcaggcggattgcagcgagaacaggtcattagcgtgggtagctgcgtacccctggagaggaatcagaggtatatcttcttcctggagcccacagaacagcccctagtgtttaagaccgctttcgcgcctctggacactaacggcaagaacctgaaaaaagaggtgggcaagatcctctgcacagactgtgccacccggcctaaactgaaaaagatgaagtctcaaacgggacaggtcggagaaaagcaaagcttaaagtgtgaggccgctgcaggtaatcctcaaccttcctatcgttggtttaaggatggcaaggagctgaataggtcacgagatatcagaatcaaatacggcaatgggaggaagaatagtcgccttcaatttaataaggtgaaggtagaggatgccggagagtatgtctgcgaggccgaaaacatactgggcaaggacaccgtgagaggaagactatatgtaaacagcgtcagcactactttgagttcttggagcgggcacgcgagaaagtgcaatgagactgccaagagctattgtgtgaacgggggagtctgctactatatagaaggaattaatcagctgtcctgcaagtgccctaacgggtttttcggacagcggtgtttggagaaactgcctctccgtctgtatatgccagaccccaaacagaaggctgaggaactgtatcagaagcgggtcctgacgatcaccgggatttgtgtggccttgttggtcgtcggaatcgtgtgcgtagtggcttactgtaagaccaagaaacaaagaaaacagatgcacaatcatctcagacagaacatgtgtcccgcacaccagaatcgaagtctcgccaatggtccatcccatccacggttagatcctgaggaaattcagatggccgattatatatctaagaacgtgccagccacggatcacgtcataagacgcgaaaccgagacaacgttctccgggtcccattcgtgttccccaagccaccattgctcaaccgccactccaacatcgagtcaccgccatgaatcccatacgtggtcattggaacgtagtgagtctcttacttcggattctcaaagcggcatcatgctgtcatctgtcggaacctcgaagtgcaattcacccgcttgcgtggaagctagagctagaagagccgctgcttacaatcttgaggagaggagacgggcaacagcaccgccataccacgatagtgtagactccctgagggactccccacatagtgagcggtacgtcagcgcattaactaccccagcacggctgagtcccgttgacttccattactcattggccacccaagtacctacatttgagattacgtctccaaacagtgctcacgctgtttccctgccgcctgctgctcccataagctaccgcctcgccgagcagcaaccactgctgaggcatccagctcctcccggtcctggtcctggccctgggccaggccctgggccaggagccgacatgcaacgatcttacgacagttattactacccggcagccggtcccggtcctcgcagaggcacttgtgcactcggcggatctcttggctcgctgcccgcatccccatttagaatccccgaagacgacgaatatgaaactacccaagagtgtgcacccccaccccctccgaggccacgtgccagaggcgcttctcggcgaacttctgcagggcctcgcagatggaggcgatctagacttaacgggctagccgcacagcgagcacgagccgctagggactctctgtctttgtcgagcggatcgggaggcggatcagcatcagcctcagatgacgacgccgacgatgccgacggtgccctggccgcagaaagtacacccttcctgggccttcgcggagcacacgatgcgttacgatcggacagcccccctctctgtccagccgcagatagtcgcacctactattcattagacagccacagtaccagggcgtcttctcgccactctcgtggacctcctcccagggcgaaacaggacagtgcgccactgtag

SEQ ID NO: 150465 - DNA, 2553 bp, Artificial Sequence
  derived and/or modified sequence
atgagacaggtgtgctgcagcgccctgccccccccccccctggagaagggcagatgcagcagctacagcgacagcagcagcagcagcagcgagagaagcagcagcagcagcagcagcagcagcgagagcggcagcagcagcagaagcagcagcaacaacagcagcatcagcagacccgccgccccccccgagcccagaccccagcagcagccccagcccagaagccccgccgccagaagagccgccgccagaagcagagccgccgccgccggcggcatgagaagagaccccgcccccggcttcagcatgctgctgttcggcgtgagcctggcctgctacagccccagcctgaagagcgtgcaggaccaggcctacaaggcccccgtggtggtggagggcaaggtgcagggcctggtgcccgccggcggcagcagcagcaacagcaccagagagccccccgccagcggcagagtggccctggtgaaggtgctggacaagtggcccctgagaagcggcggcctgcagagagagcaggtgatcagcgtgggcagctgcgtgcccctggagagaaaccagagatacatcttcttcctggagcccaccgagcagcccctggtgttcaagaccgccttcgcccccctggacaccaacggcaagaacctgaagaaggaggtgggcaagatcctgtgcaccgactgcgccaccagacccaagctgaagaagatgaagagccagaccggccaggtgggcgagaagcagagcctgaagtgcgaggccgccgccggcaacccccagcccagctacagatggttcaaggacggcaaggagctgaacagaagcagagacatcagaatcaagtacggcaacggcagaaagaacagcagactgcagttcaacaaggtgaaggtggaggacgccggcgagtacgtgtgcgaggccgagaacatcctgggcaaggacaccgtgagaggcagactgtacgtgaacagcgtgagcaccaccctgagcagctggagcggccacgccagaaagtgcaacgagaccgccaagagctactgcgtgaacggcggcgtgtgctactacatcgagggcatcaaccagctgagctgcaagtgccccaacggcttcttcggccagagatgcctggagaagctgcccctgagactgtacatgcccgaccccaagcagaaggccgaggagctgtaccagaagagagtgctgaccatcaccggcatctgcgtggccctgctggtggtgggcatcgtgtgcgtggtggcctactgcaagaccaagaagcagagaaagcagatgcacaaccacctgagacagaacatgtgccccgcccaccagaacagaagcctggccaacggccccagccaccccagactggaccccgaggagatccagatggccgactacatcagcaagaacgtgcccgccaccgaccacgtgatcagaagagagaccgagaccaccttcagcggcagccacagctgcagccccagccaccactgcagcaccgccacccccaccagcagccacagacacgagagccacacctggagcctggagagaagcgagagcctgaccagcgacagccagagcggcatcatgctgagcagcgtgggcaccagcaagtgcaacagccccgcctgcgtggaggccagagccagaagagccgccgcctacaacctggaggagagaagaagagccaccgcccccccctaccacgacagcgtggacagcctgagagacagcccccacagcgagagatacgtgagcgccctgaccacccccgccagactgagccccgtggacttccactacagcctggccacccaggtgcccaccttcgagatcaccagccccaacagcgcccacgccgtgagcctgccccccgccgcccccatcagctacagactggccgagcagcagcccctgctgagacaccccgccccccccggccccggccccggccccggccccggccccggccccggcgccgacatgcagagaagctacgacagctactactaccccgccgccggccccggccccagaagaggcacctgcgccctgggcggcagcctgggcagcctgcccgccagccccttcagaatccccgaggacgacgagtacgagaccacccaggagtgcgcccccccccccccccccagacccagagccagaggcgccagcagaagaaccagcgccggccccagaagatggagaagaagcagactgaacggcctggccgcccagagagccagagccgccagagacagcctgagcctgagcagcggcagcggcggcggcagcgccagcgccagcgacgacgacgccgacgacgccgacggcgccctggccgccgagagcacccccttcctgggcctgagaggcgcccacgacgccctgagaagcgacagcccccccctgtgccccgccgccgacagcagaacctactacagcctggacagccacagcaccagagccagcagcagacacagcagaggccccccccccagagccaagcaggacagcgcccccctgtag

SEQ ID NO: 150466 - protein, 814 aa, Artificial Sequence
  derived and/or modified sequence
MAVQRAASPRRPPAPLWPRLLLPLLLLLLPAPSEGLGHSAELAFAVEPSDDVAVPGQPIVLDCRVEGTPPVRITWRKNGVELPESTHSTLLANGSLMIRHFRLEPGGSPSDEGDYECVAQNRFGLVVSRKARIQAATMSDFHVHPQATVGEEGGVARFQCQIHGLPKPLITWEKNRVPIDTDNERYTLLPKGVLQITGLRAEDGGIFHCVASNIASIRISHGARLTVSGSGSGAYKEPAILVGPENLTLTVHQTAVLECVATGNPRPIVSWSRLDGRPIGVEGIQVLGTGNLIISDVTVQHSGVYVCAANRPGTRVRRTAQGRLVVQAPAEFVQHPQSISRPAGTTAMFTCQAQGEPPPHVTWLKNGQVLGPGGHVRLKNNNSTLTISGIGPEDEAIYQCVAENSAGSSQASARLTVLWAEGLPGPPRNVRAVSVSSTEVRVSWSEPLANTKEIIGYVLHIRKAADPPELEYQEAVSKSTFQHLVSDLEPSTAYSFYIKAYTPRGASSASVPTLASTLGEAPAPPPLSVRVLGSSSLQLLWEPWPRLAQHEGGFKLFYRPASKTSFTGPILLPGTVSSYNLSQLDPTAVYEVKLLAYNQHGDGNATVRFVSLRGASERTALSPPCDCRKEEAANQTSTTGIVIGIHIGVTCIIFCVLFLLFGQRGRVLLCKDVENQLSPPQGPRSQRDPGILALNGARRGQRGQLGRDEKRVDMKELEQLFPPASAAGQPDPRPTQDPAAPAPCEETQLSVLPLQGCGLMEGKTTEAKTTEATAPCAGLAAAPPPPDGGPGLLSEGQASRPAAARVTQPAHSEQ

SEQ ID NO: 150467 - DNA, 2445 bp, Artificial Sequence
  derived and/or modified sequence
atggccgtgcagagagccgccagccccagaagaccccccgcccccctgtggcccagactgctgctgcccctgctgctgctgctgctgcccgcccccagcgagggcctgggccacagcgccgagctggccttcgccgtggagcccagcgacgacgtggccgtgcccggccagcccatcgtgctggactgcagagtggagggcaccccccccgtgagaatcacctggagaaagaacggcgtggagctgcccgagagcacccacagcaccctgctggccaacggcagcctgatgatcagacacttcagactggagcccggcggcagccccagcgacgagggcgactacgagtgcgtggcccagaacagattcggcctggtggtgagcagaaaggccagaatccaggccgccaccatgagcgacttccacgtgcacccccaggccaccgtgggcgaggagggcggcgtggccagattccagtgccagatccacggcctgcccaagcccctgatcacctgggagaagaacagagtgcccatcgacaccgacaacgagagatacaccctgctgcccaagggcgtgctgcagatcaccggcctgagagccgaggacggcggcatcttccactgcgtggccagcaacatcgccagcatcagaatcagccacggcgccagactgaccgtgagcggcagcggcagcggcgcctacaaggagcccgccatcctggtgggccccgagaacctgaccctgaccgtgcaccagaccgccgtgctggagtgcgtggccaccggcaaccccagacccatcgtgagctggagcagactggacggcagacccatcggcgtggagggcatccaggtgctgggcaccggcaacctgatcatcagcgacgtgaccgtgcagcacagcggcgtgtacgtgtgcgccgccaacagacccggcaccagagtgagaagaaccgcccagggcagactggtggtgcaggcccccgccgagttcgtgcagcacccccagagcatcagcagacccgccggcaccaccgccatgttcacctgccaggcccagggcgagccccccccccacgtgacctggctgaagaacggccaggtgctgggccccggcggccacgtgagactgaagaacaacaacagcaccctgaccatcagcggcatcggccccgaggacgaggccatctaccagtgcgtggccgagaacagcgccggcagcagccaggccagcgccagactgaccgtgctgtgggccgagggcctgcccggcccccccagaaacgtgagagccgtgagcgtgagcagcaccgaggtgagagtgagctggagcgagcccctggccaacaccaaggagatcatcggctacgtgctgcacatcagaaaggccgccgacccccccgagctggagtaccaggaggccgtgagcaagagcaccttccagcacctggtgagcgacctggagcccagcaccgcctacagcttctacatcaaggcctacacccccagaggcgccagcagcgccagcgtgcccaccctggccagcaccctgggcgaggcccccgcccccccccccctgagcgtgagagtgctgggcagcagcagcctgcagctgctgtgggagccctggcccagactggcccagcacgagggcggcttcaagctgttctacagacccgccagcaagaccagcttcaccggccccatcctgctgcccggcaccgtgagcagctacaacctgagccagctggaccccaccgccgtgtacgaggtgaagctgctggcctacaaccagcacggcgacggcaacgccaccgtgagattcgtgagcctgagaggcgccagcgagagaaccgccctgagccccccctgcgactgcagaaaggaggaggccgccaaccagaccagcaccaccggcatcgtgatcggcatccacatcggcgtgacctgcatcatcttctgcgtgctgttcctgctgttcggccagagaggcagagtgctgctgtgcaaggacgtggagaaccagctgagccccccccagggccccagaagccagagagaccccggcatcctggccctgaacggcgccagaagaggccagagaggccagctgggcagagacgagaagagagtggacatgaaggagctggagcagctgttcccccccgccagcgccgccggccagcccgaccccagacccacccaggaccccgccgcccccgccccctgcgaggagacccagctgagcgtgctgcccctgcagggctgcggcctgatggagggcaagaccaccgaggccaagaccaccgaggccaccgccccctgcgccggcctggccgccgccccccccccccccgacggcggccccggcctgctgagcgagggccaggccagcagacccgccgccgccagagtgacccagcccgcccacagcgagcagtag

SEQ ID NO: 150468 - DNA, 2445 bp, Artificial Sequence
  derived and/or modified sequence
atggcagtacagagagcagcctcaccaaggaggccacccgctccactgtggcctcggctgctgctccctctacttctgctgctgttaccggctccctccgagggactgggacactcagccgagcttgccttcgcagtagaaccttccgacgatgtggccgtgccaggccaacctattgtgctggattgccgcgtggaagggacacctcccgtccgcataacttggaggaaaaatggggtggaactgcccgagtccacccacagtacactgctggcaaatggcagtctgatgatacgtcacttcaggctagagccaggcggtagcccgtccgatgagggcgattacgaatgcgttgcccagaatcgttttggcctagtcgtttccagaaaggctcgtatccaggcagccacgatgtcggactttcatgttcaccctcaggccactgtaggggaagagggaggcgtggccaggtttcagtgccagattcatgggctgccgaagccccttattacctgggaaaagaatcgagtgcctatagataccgacaatgaacgctacacgttgcttccgaagggtgtgctgcagatcacaggactcagagcagaagatggcggcattttccactgcgtcgcctcgaacatagcatccatacggatctcccatggcgcacgcctgactgtttctggatccggctctggggcgtataaagagcctgcaatcctggtgggccctgaaaacctcacactgactgtgcaccagacggccgtgctcgagtgtgtggcaactggaaacccacgaccgattgttagctggtcgcgcttagatggccgacctatcggagtggaggggatccaagtgttaggtacaggcaatctgattatctccgatgtgacagtgcagcactcaggtgtatacgtgtgtgctgctaaccggcctggtactcgcgtgcggcgaacggcacaggggcggctcgtggtccaggcccctgccgagttcgtgcagcaccctcaatcaatcagccggcctgctggaaccaccgctatgtttacctgccaggcacagggcgaacctcctcctcacgtgacatggttgaagaacgggcaggtgctgggacccggtggccacgtgcgtctgaaaaacaataatagcacactgactatctcaggaatcgggccagaggacgaggccatctaccagtgcgtcgctgaaaatagcgccggctcatctcaagcctcagctcgtctcacagttctttgggcagaaggtcttccggggccccctagaaacgtccgggcagtaagtgttagttccactgaagtgcgagtttcctggagcgagcccttggccaacaccaaggaaataataggctatgtgcttcatatcagaaaagcagccgatccccccgaactcgaatatcaagaagcagtttctaagtcaacttttcaacatctggtctccgacctggagccctccaccgcttattcgttctacattaaggcatatactccgcgcggtgcatccagtgcatctgtacccaccttggcttccactctgggggaggctccagcccccccgccacttagcgttcgggtgctaggtagctcatctttgcagctcctttgggaaccgtggccccgactagcgcaacatgagggcggttttaaactgttttataggcccgcttctaaaacatcctttaccgggcccatcctgttgcccgggaccgtttcctcttacaacttaagccaactggaccctactgcagtctacgaagtcaaattacttgcatacaatcagcatggggatggtaacgcaaccgtacgattcgtgagcctgcgcggagctagcgagcgcacagcactcagccctccatgtgattgcaggaaggaggaggcagcgaatcaaacctccactactgggattgtgatcggcatccatattggcgttacatgcattatattctgtgtcttgttcctgctgtttggccagcgggggcgcgtcttgctgtgtaaagacgttgagaatcaactgagcccaccacagggcccgcgatctcagcgtgatcctggaattctggccctgaacggagcgcggagaggccagagagggcagttaggacgcgacgagaagcgcgtcgatatgaaagagctggaacagctcttccctcctgctagcgcagcaggacagcccgaccctaggcccacacaggatcccgccgccccggccccttgcgaggaaacccagctgtccgtcttgcccctacaggggtgcggcctgatggaaggcaaaacaactgaggctaaaaccacagaggccacagctccctgtgccggcttggccgccgccccccctccaccagacggcggcccgggtctcctaagcgaggggcaggcctcccgaccagctgccgctcgcgtgactcaaccggcccacagcgagcagtag

SEQ ID NO: 150469 - DNA, 4479 bp, Artificial Sequence
  derived and/or modified sequence
agcggtgcgagtgtggagcgcgcaccccgggcgaggctgacagatcgcccgggtgggtgcaagatggcgcaagcggcgctccccctgcgccccccgcgctgctgagcaggcatgcggccccagtcccccaccgcctgggctcggccccggccggagccccagccccggccccggcgccggccccgcgggacgctgtgagccgcgagaggcccgggagccgcgcgtcgccgagccgagctgaccgagagccccatggctgtgcagcgcgccgcgtctccgcgccgcccgcccgccccgctctggccccggctcctgctgccgctgctgttgctgctgctgcccgcgccgagcgagggtcttggccactctgctgaactggcatttgctgtggagccaagtgatgatgttgccgtccccgggcagcctatagtgctggactgcagggtggaggggacccctccagtgcgaatcacctggaggaagaatggggtagagctgccagagagtacccactccaccttgctggccaatgggtccttgatgatccgtcacttcaggctggagccgggaggcagcccttcggatgaaggtgactatgagtgtgtggcccagaaccgctttgggctggtggtcagccggaaggctcgcatccaagctgcaaccatgtcggacttccacgtgcatccccaggccaccgtgggtgaggagggtggtgtggcccgcttccagtgccaaatccatgggcttcccaaacccctgatcacttgggagaagaacagagtcccaattgacacggacaatgagaggtacacattgctgcccaagggggtcctgcagatcacaggacttcgagctgaggacggtggcatcttccactgtgtggcctcaaacatcgccagtatccggatcagccacggggccaggctcactgtgtcaggctcgggctctggggcctacaaggagccagccatcctcgtggggcctgagaacctcaccctgacagtgcaccagaccgcggtgcttgagtgtgtcgccacgggcaacccgcgccccattgtgtcctggagccgcctggatggtcgccctatcggggtggagggcatccaggtgctgggcacaggaaacctcatcatctcagacgtgacggtccagcactctggcgtctacgtctgtgcagccaacagacctggcacccgggtgaggagaacggcacagggccggctggtggtgcaagccccagctgagtttgtgcagcatccccagtccatctccaggccagctgggaccacagccatgttcacctgccaagcccagggtgagccaccgcctcatgtcacgtggctgaaaaatggacaggtgctggggccaggaggccacgtcaggctcaagaataacaacagcacactgaccatttctggaatcggtcctgaggatgaagccatttatcagtgtgtggccgagaacagtgcgggctcatcacaggccagtgccaggctgaccgtactgtgggctgaggggctccccgggcctccccgcaatgtgcgggcagtctctgtgtcttccactgaggtgcgtgtgtcctggagtgagccgctggccaacaccaaggagatcatcggctacgtcctgcacatcaggaaggctgctgacccaccggagctggagtatcaggaggcagtcagcaagagcacctttcagcacctggtcagcgacctggagccctccacagcctacagtttctacatcaaggcctacacaccaaggggggccagctcagcctctgtgcccaccctagctagcaccctgggtgaagcccctgccccacccccactgtcagtgcgagtcctgggcagctcctccttgcagctgctgtgggagccttggccccggctggcccagcacgagggcggcttcaagctgttttaccgcccagcaagcaagacctccttcaccggccccatcctgctgcctggaaccgtctcctcctacaacctcagccagctcgaccccactgcagtgtatgaggtgaagctgctcgcctacaaccagcatggagatggcaatgccacagtccgctttgtgtctttgaggggagcatctgagaggacagccttgagcccaccatgtgactgccggaaggaggaggccgccaaccagacgtccaccacaggcatcgtcatcggcatccacatcggggtcacttgcatcatcttctgtgtcctcttcctcctgttcggccaaaggggcagggtcctcctgtgtaaagatgtggaaaaccagctgtcccctccacagggtccccggagccagagggaccctggcattctagccctaaatggggcgagacggggacagcggggccagctgggccgagacgagaaacgtgtggatatgaaggagctggagcagctgttccccccggccagcgcagcagggcagccggaccccagacccacacaggatcctgcagcccccgctccgtgtgaggagacccagctctccgtgctgccacttcaggggtgcggcctgatggaggggaagacgacggaggcgaagaccacagaggccacggctccctgcgccggcctggcggctgccccaccacccccagatggaggccctggcctcctcagtgaaggccaggcttccaggcctgcagcggcccgggttacccagccagctcactcggaacagtagccagtgtctggcaggctccagagggtggacggagcggggcccattctcaggtcaaaagcaagatttctactgtcatgtgggatttggatggtcctgggggctccccagcatttctatcctgactgcctcttgggttgtcaaaacccaaggcagccttgacagggaccccccggccctaacacccatcaggagttggagcagttcctgcaggagcctgttccttccctgggctgacgcccccttgcctctgcctggtacccacatgacttggaactgaactaacatttttctttaaaaagcaaaacttaaaaaaaaaaaaaaagaggagagagatagaggaaggtgaattagactccaaaagatgaccctgctgtagctgggccctgacactgtcaccctccaccgactttgttttctcaggatggatttttgctgttttggctctcagcacctacctcagccggaatgaatgtcctggggggcagtggggcggtggcctcagcccccttaccccacagagcccgaatgcactcctacctcaagtccccttgctggggaccccctctcccttcccacactgttgtccagagtaaaaaaaaaaaaaaaaaaaaaagcacttccccgtttccaggtgtgaaagaaaaaaaaaagcacttccccatttccagatgtgaaagaaaatgtctacctcaaggctcgctggctctgtgggctgtgttgtcactggacctgcctccccgcccctcctgcccacagcccacctacctctcctgcagaggagaggccagaggttgggccaccaaggggaactcttgtggcctacagaaatagaaatggattgggcagagaaaaaatgtgaaagcagccaaaaatgagaggaaatttgttccttgaagtataaattgtccaaacgagccacctcccagcacaccgcctgtccccgtcttgtctgtccactcccattttgagccagcccatccttgatggggatgcccatgaggaacctgggcttgggagggtggcatcagctggccgcctgcctcctgtcctgcaggcccggcccctggaatgtaccatgtgtgggatgggtgtgtgggagggtgagggggtgtgggtgtcccctgcagaggcgccccagcctcaggcacccagccagcctgatccacccctcgacaggggagcatccactgtcagcagccatggccggaagctatttttatacaaggtgtgttaagggttatgttcttgtgactttttgttactcttttctgttgtgttgttctttgaactacttagttaaagaagaagaaaagaaaaccaaggaaacaaatacctatttttggttatactcagaaacatttttttaaatagcagaagaaaaactttttttaaagaaaaaagataagtgtattccttaagaatgagaccataaatatccctgacccccaatcctctagggacacctccaccctgaactttagttaattagctgaagaagatagaatttgtggtgttttcctagaaaactagagctgtgtccgcgtggacttggggaagggtagtcccttcccttctcccaaatgatgtgtggatgcccagggctccacaaagctccaaggcagtgccccctctgttcccaaagcagcttctctcgggagcctccctctcccttgggaagggtgcggctggggcaggagggggctggggggccacctggccttacttgggttttgtcacactctgctcattttgactgaataaaagtcctgttgccaaagtgaa

SEQ ID NO: 150470 - DNA, 2445 bp, Artificial Sequence
  derived and/or modified sequence
atggctgtgcagagagctgccagcccccggcggcccccagcccccctgtggccccggctgctgctgcccctgctgctgctgctgctgcctgcccccagcgagggcctgggccacagcgctgagctggcctttgctgtggagcccagtgatgatgtggccgtgcccggccagcccatcgtgctggactgccgggtggagggcaccccacctgtgcgcatcacctggaggaagaatggagtggagctgcctgagagcacccacagcaccctgctggccaacggcagcctgatgatccgccacttccggctggagcccggcggcagccccagtgatgaaggagactatgaatgtgtggcccagaacagatttggcctggtggtgtccaggaaggcccgcatccaggccgccaccatgtctgacttccacgtgcacccccaggccaccgtgggggaggagggcggcgtggcccgcttccagtgccagatccacggcctgcccaagcccctcatcacctgggagaagaacagagtgcccatcgacacagacaatgaaagatacaccctgctgcccaagggcgtgctgcagatcaccggcctgcgggcagaagatggcggcatcttccactgtgtggccagcaacatcgccagcatccgcatcagccatggagcccggctgactgtgtctggcagcggcagcggggcctacaaggagcccgccatcctggtgggccctgagaacctgaccctgactgtgcaccagacagctgtgctggagtgtgtggccaccggcaacccccggcccatcgtgtcctggagccggctggatggccggcccatcggcgtggagggcatccaggtgctgggcactggaaacctgatcatcagtgatgtgacagtgcagcacagcggcgtgtatgtgtgtgccgccaaccggcccggcaccagggtgagaagaacagcccagggccgcctggtggtgcaggccccagctgagtttgtgcagcacccccagagcatcagcaggcctgctggcaccacagccatgttcacctgccaggcccagggcgagcccccaccccacgtgacctggctgaagaatggccaggtgctgggccctgggggccacgtgcggctgaagaacaacaacagcaccctgaccatcagcggcatcggcccagaagatgaggccatctaccagtgtgtggctgaaaattctgctggcagcagccaggccagcgcccggctgactgtgctgtgggccgagggcctgcccggccccccaagaaatgtgcgggctgtgtctgtgagcagcacagaggtgcgggtgtcctggagcgagcccctggccaacaccaaggagatcatcggctacgtgctgcacatcaggaaggctgctgaccccccagagctggagtaccaggaggccgtgtccaagagcaccttccagcacctggtgtctgacctggagcccagcacagcctacagcttctacatcaaggcctacacccccaggggggccagcagcgcctctgtgcccaccctggccagcaccctgggggaggccccagcccccccacccctgtctgtgcgggtgctgggcagcagcagcctgcagctgctgtgggagccctggccccggctggcccagcacgagggcggcttcaagctgttctacagacctgccagcaagaccagcttcaccggccccatcctgctgcccggcaccgtgagcagctacaacctgagccagctggaccccacagctgtgtatgaggtgaagctgctggcctacaaccagcacggagatggaaatgccaccgtgcgctttgtgtccctgcggggggccagcgagaggacagccctgagccccccctgtgactgcaggaaggaggaggccgccaaccagaccagcaccactggaattgtgattggcatccacatcggcgtgacctgcatcatcttctgtgtgctcttcctgctgtttggccagaggggccgggtgctgctgtgcaaggatgtggagaaccagctgagccccccccagggccccaggagccagagggaccccggcatcctggccctgaatggagcccggcggggccagaggggccagctgggcagagatgagaagagggtggacatgaaggagctggagcagctgttccccccagccagcgctgctggccagcctgacccccggcccacccaggaccctgctgccccagccccctgtgaggagacccagctgtctgtgctgcccctgcagggctgcggcctgatggagggcaagaccacagaggccaagaccacagaggccacagccccctgtgccggcctggccgccgcccctcctcctccagatggcggccctggcctgctgtctgagggccaggccagcaggcctgctgctgcccgggtgacccagcctgcccacagcgagcagtag

SEQ ID NO: 150471 - DNA, 2445 bp, Artificial Sequence
  derived and/or modified sequence
atggccgtgcagcgggccgccagcccccggcggccccccgcccccctgtggccccgcctgctgttgcccttgttacttctactgctccctgcccctagcgaagggctgggtcatagcgccgaacttgcgtttgccgtggaacctagcgacgatgtggccgtgcctggccagccaatcgtgcttgattgtagagtagagggcacaccaccagtcagaataacttggcgcaaaaacggcgtggaactgccggaatctactcattcaacattgttagccaacggatcactgatgattagacactttcgcttagagcctggcggaagtcctagcgatgaaggcgactatgagtgtgttgctcagaaccgatttggcctggtggttagtaggaaagctaggatccaggcagctacaatgagtgacttccatgttcatcctcaggcaaccgtaggtgaagagggaggggtggcacgcttccagtgtcaaattcatggcctgccaaagccactaattacatgggagaaaaaccgcgtgccgatcgacacggataacgagcgctataccctgctgcccaagggggtgctgcagattacaggattaagggccgaggatgggggaatattccactgcgtagcctccaacattgcttctattcgcatctcccatggggccaggctaacggtgtccggatctggttcaggcgcgtacaaggagcctgccattttggtcggccctgagaacctaacacttaccgtgcatcaaacagccgtactcgaatgtgtggccacaggcaatcccaggcctattgtgagctggtcaagactggacggcaggcctatcggggtggagggtattcaagtgctcggtaccggcaacctcattatctctgacgtaacagtgcagcacagcggggtgtatgtgtgtgcagcaaatcggccaggaacccgtgtgcgaaggacggcacaggggagactcgttgtacaggccccggcggagttcgtgcaacacccacaaagcatttcccgtcctgccggcaccacagcgatgttcacatgtcaggcacagggagagcctccaccacatgtgacatggctgaagaacggccaggtcttaggtccaggaggtcatgtcaggctgaaaaacaacaactccaccttgaccatctccgggattggcccagaggatgaagccatttaccagtgtgtggcagaaaatagtgcagggagcagccaagcaagcgctaggctaacagtactgtgggctgagggattacccggccctccccgaaatgttagagcagtgagtgtgtccagcactgaagttcgcgtgtcctggtccgagcccttagctaacactaaggagatcattgggtatgtcttgcacattaggaaagcagccgacccccccgaactggagtatcaggaagctgtcagcaaaagcactttccaacacctggtgtccgacctggagccatctacggcgtactcattctacattaaggcctatacccctagaggcgcgtcctctgcctcggtaccaactcttgcctcgacccttggcgaggctcccgctccacccccactgtctgtgcgtgtgttaggctcgtcatctttgcagctgctgtgggaaccatggccacgcctggcacagcatgaaggtggctttaagctgttctacagacctgctagtaagacatcgtttacagggcccatactgttaccggggaccgtttctagctataacttaagtcagctggacccgactgctgtgtacgaggtgaagctgctcgcctataatcagcacggtgatggcaacgcgaccgtgcgttttgtatcacttaggggggcctcagaaaggaccgctctctctcctccctgcgactgtcgcaaagaagaggccgctaaccagacgtcgaccaccgggattgttatcgggatacacataggagtcacatgtatcatcttttgtgtgctgtttctgcttttcggccagaggggccgcgtgctgctctgtaaagatgtcgagaatcaactgtcaccaccacaggggcctaggtcgcagcgtgacccgggaatccttgctctgaacggcgcacggcgtggacagagggggcagctgggcagagatgagaagcgagtagatatgaaggaactggaacagctgttcccacctgccagcgcagccggacagccggatccccgacctacccaggaccccgccgccccagccccatgtgaagagacccagctgagtgttctacccctccaggggtgcggtctcatggagggaaaaactaccgaggcgaagactacagaggcgacagcgccatgtgctggtcttgctgctgcgcctcccccaccggatggcggtccaggtctacttagcgagggacaggccagtagacccgctgctgcccgcgtgacccagccagcacatagtgagcaatag

SEQ ID NO: 150472 - DNA, 2445 bp, Artificial Sequence
  derived and/or modified sequence
atggctgtgcaacgcgcagccagtccaaggcgcccacctgcacccctgtggcctcgccttttgcttcccctgcttttactcctgttgccggctccttcagagggactggggcacagtgccgaacttgcttttgcagtggaacctagtgatgacgtggctgttccagggcaacctatagtcttagattgtagagtggaggggacacctcccgtaagaataacctggaggaagaacggagtggaactcccagagtcaacacattctaccctactggccaatggttcccttatgattagacatttcaggcttgagccaggtgggagcccctctgatgagggggattatgaatgcgtggctcagaacagattcggccttgttgtctcacgcaaagcgaggattcaggctgccacaatgagcgactttcacgtgcatccacaggctaccgttggcgaggaaggaggggtagctaggttccaatgccaaatacacggattgcctaaacccttgatcacctgggaaaaaaaccgcgtccctattgacactgataacgaaaggtatactctgttgcccaagggggtcctccaaataaccggtctccgagcggaggatggcggtattttccactgcgtcgcatcaaatattgccagtatcagaatctctcacggcgcacggctgacagtatcagggtccggcagcggcgcatataaagaacccgctatacttgttggcccagaaaatctcacactgaccgtccaccagactgcagtactggagtgtgtggccaccggaaatccccgacccatcgtaagctggtccaggctggacggacgccctattggagttgaagggattcaggtcttggggaccggcaatctgataattagcgacgtcacagtccaacactctggcgtgtatgtatgcgccgcaaatagacccggaaccagagtacggaggacagcacagggaaggcttgttgtccaggcccctgcagagttcgtccaacacccccagtcgatcagtcgccctgcagggaccacggcaatgtttacatgtcaggcccagggggagccccctccacatgtcacttggctgaaaaatggccaggttcttggtcccggtggccacgtcagacttaaaaacaataatagtacactgactatctccggcataggacccgaggacgaggctatctaccagtgcgttgccgagaacagcgctggtagctcccaggcctccgcacggctgaccgtgctctgggcagaggggctccctggtcctcccaggaatgttcgggcagtctctgtctcctcaactgaagtccgtgtgagttggtcagagccattggccaataccaaagaaatcatcggctatgtgctgcatattcgtaaagccgctgaccccccagaactcgagtaccaggaggccgtgtcaaaaagtacttttcagcatttagtgagcgacttggaaccctctactgcatattccttttacatcaaggcatatactccccgaggggctagctccgctagcgtccccactttagcctctaccctgggcgaagccccagcccctcctcccctctccgtacgcgtcctgggaagctccagtctgcagctactctgggaaccgtggcctcggctggcacagcacgagggtggttttaagttgttctatcgccctgcctctaaaacctcgttcacagggccaattctgctccctggaacagtaagttcgtacaaccttagccagttggaccctaccgccgtgtatgaagtgaaactgttggcatataaccaacacggcgatggcaatgcaactgtgaggtttgtctcactgaggggagcatctgaacgtaccgcactttcaccgccatgtgactgcaggaaagaagaggccgcaaaccagaccagcaccacaggaattgtgatcggcattcacattggcgtcacttgcattatcttctgtgtgctgttcctactattcgggcagcgcggaagggtgttgctgtgcaaagatgtcgaaaaccagctgtcccctccacagggccctaggtcgcagcgggatcccggaattctggcactaaatggcgcaaggaggggccagcgcggacagttagggagagatgagaagcgtgtcgacatgaaggaactcgagcagcttttcccgcctgccagcgctgctggccaacccgatccgaggcctacccaagatcccgcagccccagctccttgcgaggagactcagctgtctgtgttgcccctgcaagggtgcgggctgatggagggcaagactaccgaagccaaaacaactgaggcaacagccccttgtgctggcctagccgcagctccacctcccccagacgggggacctggcctactatcagaaggacaggcaagcagaccggcagccgctcgggtcacgcaacctgcacactcagagcaatag

SEQ ID NO: 150473 - DNA, 84 bp, Artificial Sequence
  derived and/or modified sequence
atgtcacccgcactgacctttccccgccgctggattgccgaaggcctcgtggagaatctcaatccgccaggcgcggatgcatag

SEQ ID NO: 150474 - protein, 522 aa, Artificial Sequence
  derived and/or modified sequence
MNSFFGTPAASWCLLESDVSSAPDKEAGRERRALSVQQRGGPAWSGSLEWSRQSAGDRRRLGLSRQTAKSSWSRSRDRTCCCRRAWWILVPAADRARRERFIMNEKWDTNSSENWHPIWNVNDTKHHLYSDINITYVNYYLHQPQVAAIFIISYFLIFFLCMMGNTVVCFIVMRNKHMHTVTNLFILNLAISDLLVGIFCMPITLLDNIIAGWPFGNTMCKISGLVQGISVAASVFTLVAIAVDRFQCVVYPFKPKLTIKTAFVIIMIIWVLAITIMSPSAVMLHVQEEKYYRVRLNSQNKTSPVYWCREDWPNQEMRKIYTTVLFANIYLAPLSLIVIMYGRIGISLFRAAVPHTGRKNQEQWHVVSRKKQKIIKMLLIVALLFILSWLPLWTLMMLSDYADLSPNELQIINIYIYPFAHWLAFGNSSVNPIIYGFFNENFRRGFQEAFQLQLCQKRAKPMEAYALKAKSHVLINTSNQLVQESTFQNPHGETLLYRKSAEKPQQELVMEELKETTNSSEI

SEQ ID NO: 150475 - protein, 132 aa, Artificial Sequence
  derived and/or modified sequence
MNSFFGTPAASWCLLESDVSSAPDKEAGRERRALSVQQRGGPAWSGSLEWSRQSAGDRRRLGLSRQTAKSSWSRSRDRTCCCRRAWWILVPAADRARRERMAIWKHDVQDQWIGPGNICRSFSLYVSCNCCR

SEQ ID NO: 150476 - protein, 159 aa, Artificial Sequence
  derived and/or modified sequence
MGPGLRLVTGVRGGPSGREEGAWPRASAGPDRLSLALSRAGRLPAWTAGRRGWGSAGGHPHSRPGRSAPSSCWTRWSSGSGSSWTPSQPARRCYGSWAAGARSRLVAGTSQPNLERPPSRLSPPEAAFQRMLAMELRSPDHPRAEYPDFSPSPGPVAGL

SEQ ID NO: 150477 - DNA, 1569 bp, Artificial Sequence
  derived and/or modified sequence
atgaacagcttcttcggcacccccgccgccagctggtgcctgctggagagcgacgtgagcagcgcccccgacaaggaggccggcagagagagaagagccctgagcgtgcagcagagaggcggccccgcctggagcggcagcctggagtggagcagacagagcgccggcgacagaagaagactgggcctgagcagacagaccgccaagagcagctggagcagaagcagagacagaacctgctgctgcagaagagcctggtggatcctggtgcccgccgccgacagagccagaagagagagattcatcatgaacgagaagtgggacaccaacagcagcgagaactggcaccccatctggaacgtgaacgacaccaagcaccacctgtacagcgacatcaacatcacctacgtgaactactacctgcaccagccccaggtggccgccatcttcatcatcagctacttcctgatcttcttcctgtgcatgatgggcaacaccgtggtgtgcttcatcgtgatgagaaacaagcacatgcacaccgtgaccaacctgttcatcctgaacctggccatcagcgacctgctggtgggcatcttctgcatgcccatcaccctgctggacaacatcatcgccggctggcccttcggcaacaccatgtgcaagatcagcggcctggtgcagggcatcagcgtggccgccagcgtgttcaccctggtggccatcgccgtggacagattccagtgcgtggtgtaccccttcaagcccaagctgaccatcaagaccgccttcgtgatcatcatgatcatctgggtgctggccatcaccatcatgagccccagcgccgtgatgctgcacgtgcaggaggagaagtactacagagtgagactgaacagccagaacaagaccagccccgtgtactggtgcagagaggactggcccaaccaggagatgagaaagatctacaccaccgtgctgttcgccaacatctacctggcccccctgagcctgatcgtgatcatgtacggcagaatcggcatcagcctgttcagagccgccgtgccccacaccggcagaaagaaccaggagcagtggcacgtggtgagcagaaagaagcagaagatcatcaagatgctgctgatcgtggccctgctgttcatcctgagctggctgcccctgtggaccctgatgatgctgagcgactacgccgacctgagccccaacgagctgcagatcatcaacatctacatctaccccttcgcccactggctggccttcggcaacagcagcgtgaaccccatcatctacggcttcttcaacgagaacttcagaagaggcttccaggaggccttccagctgcagctgtgccagaagagagccaagcccatggaggcctacgccctgaaggccaagagccacgtgctgatcaacaccagcaaccagctggtgcaggagagcaccttccagaacccccacggcgagaccctgctgtacagaaagagcgccgagaagccccagcaggagctggtgatggaggagctgaaggagaccaccaacagcagcgagatctag

SEQ ID NO: 150478 - DNA, 399 bp, Artificial Sequence
  derived and/or modified sequence
atgaacagcttcttcggcacccccgccgccagctggtgcctgctggagagcgacgtgagcagcgcccccgacaaggaggccggcagagagagaagagccctgagcgtgcagcagagaggcggccccgcctggagcggcagcctggagtggagcagacagagcgccggcgacagaagaagactgggcctgagcagacagaccgccaagagcagctggagcagaagcagagacagaacctgctgctgcagaagagcctggtggatcctggtgcccgccgccgacagagccagaagagagagaatggccatctggaagcacgacgtgcaggaccagtggatcggccccggcaacatctgcagaagcttcagcctgtacgtgagctgcaactgctgcagatag

SEQ ID NO: 150479 - DNA, 1569 bp, Artificial Sequence
  derived and/or modified sequence
atgaacagcttcttcggaacacccgcagccagttggtgcctattggaatccgatgtgtcttccgccccggacaaagaagccgggcgagagcgtagagctctgtctgtgcagcaaagagggggacctgcttggtccggctcccttgaatggtccagacagtccgccggagaccggcggaggctgggcttgtctcgtcaaacagccaaaagcagttggtcgcggtctagggataggacgtgctgttgtagaagagcttggtggattctggtgccagctgcagacagggctcgccgtgagaggttcattatgaatgagaaatgggacactaatagctcagaaaactggcaccccatttggaacgtgaacgacaccaagcaccatctctattctgacatcaacattacatacgttaattattatttgcatcagccgcaggttgccgcaatctttattatttcatattttctcattttcttcctgtgtatgatgggaaataccgtggtgtgtttcattgttatgaggaacaagcacatgcacaccgtcacaaacttgttcatcctgaacctcgcaattagcgacttgcttgtggggatcttctgtatgcctattactcttttagataacatcatcgctggatggccctttggtaatacaatgtgtaagatttctggcctcgttcagggcattagcgtggcagcctccgtctttaccctcgtcgccatcgcggtggatcgtttccagtgcgtcgtctaccccttcaagccaaagcttacaatcaaaacagctttcgtgattattatgataatttgggtgctagcaatcacaatcatgtctccgagtgctgtgatgttgcacgtacaggaagaaaagtactacagggttagactgaatagccagaataagaccagccccgtttactggtgcagagaggattggccgaaccaggaaatgagaaaaatttacaccactgtgttgttcgcaaatatttatctggcgcccttgtccctcatcgttatcatgtacggtcgtataggaatttccctgttcagggcagctgtgccgcatacaggcaggaagaaccaggagcagtggcatgtggtctcccgcaagaagcagaagattatcaagatgttattaatcgtcgctctcctattcattctctcttggctgccactatggactcttatgatgctttcagactacgcagatctgagccccaatgagctgcagatcatcaatatctacatttacccatttgcacactggctggccttcggcaacagttctgtcaacccaatcatatacggcttctttaacgaaaacttccgccgagggtttcaggaggccttccaactgcagctctgtcagaaaagggccaaaccaatggaggcctacgctttgaaggcaaagagccacgtgctcatcaatacctctaatcagctggtgcaagaaagcacgttccaaaatcctcatggcgaaacacttctctaccggaagagcgcagaaaagccacagcaggaactcgtcatggaagagcttaaggagacaactaattcatccgagatctag

SEQ ID NO: 150480 - DNA, 399 bp, Artificial Sequence
  derived and/or modified sequence
atgaacagctttttcggcaccccagctgcatcgtggtgcctgctcgaaagtgatgtgtccagtgctcccgacaaggaagccggccgggaacgtagagccttgtccgtccagcagcgtggaggacctgcttggtccggttcgctggaatggagtagacagtctgccggggacaggcggcgactgggcctttcaagacagacagccaagtcctcatggtccagaagccgagaccgcacatgttgttgtcgaagagcttggtggatcctcgttcctgcagccgaccgggcccgccgggagagaatggccatctggaaacacgacgtgcaggaccagtggattggccctggcaatatttgccgcagcttttccctctatgtttcctgcaattgctgcaggtag

SEQ ID NO: 150481 - DNA, 1569 bp, Artificial Sequence
  derived and/or modified sequence
atgaacagcttcttcggcaccccagctgcctcctggtgcctgctggagagtgatgtgtcctctgccccagacaaggaggccggccgggagcggcgggccctgtctgtgcagcagaggggcggccctgcctggagcggcagcctggagtggagccggcagagcgctggggacagaagaaggctgggcctgagccggcagacagccaagagctcctggagccgcagccgggacaggacctgctgctgcagaagagcctggtggatcctggtgcctgctgctgaccgggcccggcgggagcgcttcatcatgaatgagaagtgggacaccaacagcagcgagaactggcaccccatctggaatgtgaatgacaccaagcaccacctgtacagcgacatcaacatcacctacgtgaactactacctgcaccagccccaggtggccgccatcttcatcatctcctacttcctgatcttcttcctgtgcatgatgggcaacacagtggtgtgcttcatcgtgatgaggaacaagcacatgcacacagtgaccaacctcttcatcctgaacctggccatcagtgacctgctggtgggcatcttctgcatgcccatcaccctgctggacaacatcatcgccggctggccctttggaaacaccatgtgcaagatcagcggcctggtgcagggcatctctgtggccgccagcgtcttcaccctggtggccatcgctgtggaccgcttccagtgtgtggtgtaccccttcaagcccaagctgaccatcaagacagcctttgtgatcatcatgatcatctgggtgctggccatcaccatcatgagccccagcgctgtgatgctgcacgtgcaggaggagaagtactacagagtgcggctgaacagccagaacaagaccagccctgtgtactggtgccgggaggactggcccaaccaggagatgaggaagatctacaccaccgtgctgtttgccaacatctacctggcccccctgagcctgattgtcatcatgtatggccgcatcggcatcagcctcttccgggctgctgtgccccacacaggcaggaagaaccaggagcagtggcacgtggtgtccaggaagaagcagaagatcatcaagatgctgctgattgtggccctgctcttcatcctgtcctggctgcccctgtggaccctgatgatgctgagtgactatgctgacctgagccccaatgagctgcagatcatcaacatctacatctacccctttgcccactggctggcctttggaaacagctctgtgaaccccatcatctacggcttcttcaatgaaaacttcagaagaggcttccaggaggccttccagctgcagctgtgccagaagagggccaagcccatggaggcctatgccctgaaggccaagagccacgtgctgatcaacaccagcaaccagctggtgcaggagagcaccttccagaacccccatggagagaccctgctgtacaggaagtctgctgagaagccccagcaggagctggtgatggaggagctgaaggagaccaccaacagcagcgagatctag

SEQ ID NO: 150482 - DNA, 399 bp, Artificial Sequence
  derived and/or modified sequence
atgaacagcttcttcggcaccccagctgcctcctggtgcctgctggagagtgatgtgtcctctgccccagacaaggaggccggccgggagcggcgggccctgtctgtgcagcagaggggcggccctgcctggagcggcagcctggagtggagccggcagagcgctggggacagaagaaggctgggcctgagccggcagacagccaagagctcctggagccgcagccgggacaggacctgctgctgcagaagagcctggtggatcctggtgcctgctgctgaccgggcccggcgggagaggatggccatctggaagcatgatgtgcaggaccagtggattggccctggcaacatctgccgctccttcagcctgtatgtgtcctgcaactgctgcaggtag

SEQ ID NO: 150483 - DNA, 1922 bp, Artificial Sequence
  derived and/or modified sequence
tctggagccaagtaatggtgatactgatgcttccttttctttgccgcgctcggattctgagtttcacaagaatgtacctgggtgccccttagcgggatatgaatagcttcttcggaaccccagcggccagctggtgcctcctggaaagtgacgtctcatctgcaccggacaaggaggcggggagggagcgcagagcactcagcgtccagcagcgcggcgggccagcctggagcggaagcctggagtggagcaggcagtccgcgggggacagacgtcggctgggattgagccggcagactgcgaaaagtagctggagccggagcagggacagaacctgttgctgcagacgggcttggtggattctggttcctgccgccgacagggctcgccgggagaggttcatcatgaatgagaaatgggacacaaactcttcagaaaactggcatcccatctggaatgtcaatgacacaaagcatcatctgtactcagatattaatattacctatgtgaactactatcttcaccagcctcaagtggcagcaatcttcattatttcctactttctgatcttctttttgtgcatgatgggaaatactgtggtttgctttattgtaatgaggaacaaacatatgcacacagtcactaatctcttcatcttaaacctggccataagtgatttactagttggcatattctgcatgcctataacactgctggacaatattatagcaggatggccatttggaaacacgatgtgcaagatcagtggattggtccagggaatatctgtcgcagcttcagtctttacgttagttgcaattgctgtagataggttccagtgtgtggtctacccttttaaaccaaagctcactatcaagacagcgtttgtcattattatgatcatctgggtcctagccatcaccattatgtctccatctgcagtaatgttacatgtgcaagaagaaaaatattaccgagtgagactcaactcccagaataaaaccagtccagtctactggtgccgggaagactggccaaatcaggaaatgaggaagatctacaccactgtgctgtttgccaacatctacctggctcccctctccctcattgtcatcatgtatggaaggattggaatttcactcttcagggctgcagttcctcacacaggcaggaagaaccaggagcagtggcacgtggtgtccaggaagaagcagaagatcattaagatgctcctgattgtggccctgctttttattctctcatggctgcccctgtggactctaatgatgctctcagactacgctgacctttctccaaatgaactgcagatcatcaacatctacatctacccttttgcacactggctggcattcggcaacagcagtgtcaatcccatcatttatggtttcttcaacgagaatttccgccgtggtttccaagaagctttccagctccagctctgccaaaaaagagcaaagcctatggaagcttatgccctaaaagctaaaagccatgtgctcataaacacatctaatcagcttgtccaggaatctacatttcaaaaccctcatggggaaaccttgctttataggaaaagtgctgaaaaaccccaacaggaattagtgatggaagaattaaaagaaactactaacagcagtgagatttaaaaagagctagtgtgataatcctaactctactacgcattatatatttaaatccattgctttttgtggctttgcacttcaaatttttcaaagaatgttctaaataaaacatttactgaaagccctctctggcaaaaaaattaaaaataaacaaaaatggtcataagatcataaacaatcttatgttgtataaaaatacgtagagtgacttagacatgtttgcatgaataaatatatttctagagaacagtttacaaa

SEQ ID NO: 150484 - DNA, 1569 bp, Artificial Sequence
  derived and/or modified sequence
atgaacagcttcttcggcacccccgccgccagctggtgcctgctggaaagcgacgtctcatcagcccctgacaaggaggctggccgtgagagaagagctctgtcagtgcagcagcgtgggggacccgcgtggtctggcagtttggagtggagtagacagagtgctggagacaggagacgcctgggcctgagccgccaaactgctaagtcctcttggagcagaagtcgcgaccggacttgttgctgcaggagagcttggtggatccttgtccccgctgctgaccgcgcgcggcgcgaaagatttatcatgaatgaaaaatgggatactaactcctccgagaattggcacccaatttggaatgtgaacgatacaaagcaccacctctacagtgatattaatatcacgtatgtaaactactacctacaccaaccccaggtcgctgctatcttcattatatcatattttctaatcttttttctttgcatgatgggcaataccgttgtgtgctttattgtcatgcggaataaacatatgcatacggtgacaaacctgtttattctcaacttggccatctccgaccttcttgtgggaatattttgcatgccaattactctgctcgataatattatcgcaggctggccttttggaaacactatgtgcaaaataagcgggctggtgcaaggcatcagtgttgccgcgagcgtcttcacattggtggcgatcgccgtggaccggtttcaatgtgtagtgtacccttttaagcctaaactcacaatcaagacggccttcgtcataattatgatcatctgggtgctagctataacaataatgtcaccaagtgcagttatgctgcacgtgcaagaagagaaatattaccgagtgagactgaacagccagaataagacctcaccagtgtattggtgccgcgaggactggcctaaccaggaaatgagaaagatctacaccaccgtgttattcgctaacatatacctcgctccattgtctctaatagtgattatgtatgggcgcatcggaattagtctcttcagggcagccgtgccacataccggaagaaaaaaccaggaacaatggcatgtcgtgtcccggaagaagcaaaagatcataaagatgctcctgattgtcgccctgctattcattctgtcttggctgcctctgtggactttaatgatgctgtccgattacgcagaccttagccccaacgaactacagattatcaacatctatatctatccattcgcccactggttggcctttgggaattcctcggttaatcccatcatttacggttttttcaatgagaattttagaaggggcttccaggaggcgttccagttgcagctctgccaaaaacgagccaaaccgatggaagcttacgccttgaaggccaaaagccatgtccttattaacacgagcaatcagctggtacaggagagcacgttccagaaccctcacggagaaacactgttgtatcgcaaatccgccgagaagccgcagcaggagctggtgatggaggagcttaaggaaactaccaactcctctgagatctag

SEQ ID NO: 150485 - DNA, 399 bp, Artificial Sequence
  derived and/or modified sequence
atgaacagcttcttcggcacccccgccgccagctggtgcctgctggaatctgatgtctcgagcgcccctgacaaagaagctggaagggaaaggagggcgctgtccgtccaacagaggggaggtccagcctggtctggaagcctggaatggtcgcgccagtcagctggcgacagaaggcgacttggacttagtaggcaaactgccaagagctcatggtctagaagcagagatcgtacttgctgttgccgccgcgcctggtggattttggtccccgctgccgatagggcccggcgggagcgcatggccatctggaaacacgatgtacaggatcagtggattggtccaggtaatatttgtcgatctttctctctgtatgtaagctgcaactgctgcagatag

SEQ ID NO: 150486 - DNA, 1569 bp, Artificial Sequence
  derived and/or modified sequence
atgaattccttctttggaacccctgccgcttcatggtgcctgctggaatctgacgtaagcagtgcacccgacaaggaagctggacgagaacgcagggccttatcagtgcagcaaaggggtggacctgcctggagtggatctctcgagtggtctagacagagtgctggagacagacggagactcgggctcagcaggcagaccgctaagagctcctggtcacgatctcgcgaccggacctgctgctgtagaagagcctggtggatcctggtccctgccgcagacagagccagaagagagcggttcataatgaacgaaaagtgggacaccaattcctctgaaaattggcatcccatatggaatgtaaacgacaccaagcatcatctatatagcgatatcaacatcacatatgtcaattactatctacatcaacctcaggtcgctgccatatttatcatttcttattttctgatcttctttttgtgcatgatgggtaataccgttgtatgttttatcgtgatgcgcaacaagcacatgcataccgtgactaacctatttattctcaatcttgccatttctgaccttcttgtcggcatattctgtatgccaataactctcttagacaacattatagcaggttggcctttcggcaacaccatgtgcaagattagtggtctggtccagggaataagcgtggccgcttccgtctttacgctggtcgccatcgccgtcgacaggtttcagtgcgttgtgtacccctttaaacctaaactgaccatcaaaaccgcctttgtgatcataatgattatttgggtgttggcaattactattatgagtccttccgcagtgatgttacatgtgcaggaggaaaaatactacagagtacgcctcaacagccagaataagacatctccagtgtactggtgcagagaggactggccgaaccaagagatgcgaaagatctacacaactgtgttatttgctaacatttatcttgccccactatctctcattgttattatgtatgggaggatcgggatttcactgttcagagcggcagttcctcacactggaagaaagaatcaggaacagtggcatgtcgtgtccaggaagaagcagaagattattaaaatgctgctcatcgtcgcgttgctgttcatcttatcttggttacccctctggacactgatgatgctttccgattacgccgatctctcccctaatgagctgcagatcataaacatctatatctatcctttcgctcattggctggcttttggcaatagctccgtgaatccaataatatacggcttttttaacgaaaactttagacgaggcttccaagaagccttccagctgcaactgtgccaaaaacgggctaaacccatggaagcctatgcgctaaaggccaagagccacgtgctgatcaacacatccaatcagctcgtccaggaaagtaccttccaaaacccgcatggggagaccctgctgtatcgtaagtcggcagagaaacctcagcaggagctcgtaatggaggagctgaaggagaccaccaattcctctgaaatttag

SEQ ID NO: 150487 - DNA, 399 bp, Artificial Sequence
  derived and/or modified sequence
atgaactcttttttcggcacccctgccgcttcatggtgtctactcgagtcagacgtcagttcggcacctgataaggaggcaggaagagaaagaagagctctgtccgtccagcaaaggggaggtcctgcttggagcggcagcctcgaatggagccgccagtccgccggtgatcggaggagattggggctttcacgacagacagctaagtcaagttggtctcgatcccgcgatcgcacatgctgttgtaggagagcatggtggattttagtcccagcagctgatcgtgccaggcgagagaggatggcaatctggaaacacgacgtccaagaccagtggattggccctggcaacatctgtcgcagcttctccttgtacgtgagctgcaattgttgtagatag

SEQ ID NO: 150488 - protein, 575 aa, Artificial Sequence
  derived and/or modified sequence
MDFPTISRSPSGPPAMDLEGPRDILVPSEDLTPDSQWDPMPGGPGSLSRMELDESSLQELVQQFEALPGDLVGPSPGGAPCPLHIATGHGLASQEIADAHGLLSAEAGRDDLLGLLHCEECPPSQTGPEEPLEPAPRLLQPPEDPDEDSDSPEWVEGASAEQEGSRSSSSSPEPWLETVPLVTPEEPPAGAQSPETLASYPAPQEVPGPCDHEDLLDGVIFGARYLGSTQLVSERNPPTSTRMAQAREAMDRVKAPDGETQPMTEVDLFVSTKRIKVLTADSQEAMMDHALHTISYTADIGCVLVLMARRRLARRPAPQDHGRRLYKMLCHVFYAEDAQLIAQAIGQAFAAAYSQFLRESGIDPSQVGVHPSPGACHLHNGDLDHFSNSDNCREVHLEKRRGEGLGVALVESGWGSLLPTAVIANLLHGGPAERSGALSIGDRLTAINGTSLVGLPLAACQAAVRETKSQTSVTLSIVHCPPVTTAIIHRPHAREQLGFCVEDGIICSLLRGGIAERGGIRVGHRIIEINGQSVVATPHARIIELLTEAYGEVHIKTMPAATYRLLTGQEQPVYL

SEQ ID NO: 150489 - DNA, 1728 bp, Artificial Sequence
  derived and/or modified sequence
atggacttccccaccatcagcagaagccccagcggcccccccgccatggacctggagggccccagagacatcctggtgcccagcgaggacctgacccccgacagccagtgggaccccatgcccggcggccccggcagcctgagcagaatggagctggacgagagcagcctgcaggagctggtgcagcagttcgaggccctgcccggcgacctggtgggccccagccccggcggcgccccctgccccctgcacatcgccaccggccacggcctggccagccaggagatcgccgacgcccacggcctgctgagcgccgaggccggcagagacgacctgctgggcctgctgcactgcgaggagtgcccccccagccagaccggccccgaggagcccctggagcccgcccccagactgctgcagccccccgaggaccccgacgaggacagcgacagccccgagtgggtggagggcgccagcgccgagcaggagggcagcagaagcagcagcagcagccccgagccctggctggagaccgtgcccctggtgacccccgaggagccccccgccggcgcccagagccccgagaccctggccagctaccccgccccccaggaggtgcccggcccctgcgaccacgaggacctgctggacggcgtgatcttcggcgccagatacctgggcagcacccagctggtgagcgagagaaacccccccaccagcaccagaatggcccaggccagagaggccatggacagagtgaaggcccccgacggcgagacccagcccatgaccgaggtggacctgttcgtgagcaccaagagaatcaaggtgctgaccgccgacagccaggaggccatgatggaccacgccctgcacaccatcagctacaccgccgacatcggctgcgtgctggtgctgatggccagaagaagactggccagaagacccgccccccaggaccacggcagaagactgtacaagatgctgtgccacgtgttctacgccgaggacgcccagctgatcgcccaggccatcggccaggccttcgccgccgcctacagccagttcctgagagagagcggcatcgaccccagccaggtgggcgtgcaccccagccccggcgcctgccacctgcacaacggcgacctggaccacttcagcaacagcgacaactgcagagaggtgcacctggagaagagaagaggcgagggcctgggcgtggccctggtggagagcggctggggcagcctgctgcccaccgccgtgatcgccaacctgctgcacggcggccccgccgagagaagcggcgccctgagcatcggcgacagactgaccgccatcaacggcaccagcctggtgggcctgcccctggccgcctgccaggccgccgtgagagagaccaagagccagaccagcgtgaccctgagcatcgtgcactgcccccccgtgaccaccgccatcatccacagaccccacgccagagagcagctgggcttctgcgtggaggacggcatcatctgcagcctgctgagaggcggcatcgccgagagaggcggcatcagagtgggccacagaatcatcgagatcaacggccagagcgtggtggccaccccccacgccagaatcatcgagctgctgaccgaggcctacggcgaggtgcacatcaagaccatgcccgccgccacctacagactgctgaccggccaggagcagcccgtgtacctgtag

SEQ ID NO: 150490 - DNA, 1728 bp, Artificial Sequence
  derived and/or modified sequence
atggatttcccaacaatcagcaggagtccctcaggcccccccgcgatggacctggaagggccgcgcgatatattggtcccctccgaggatctaacgcccgatagtcagtgggaccccatgccggggggccctggatctctgtctcgtatggagctggacgagagttccctccaggaattggtgcagcagtttgaagccctgccaggcgacctggtagggcctagtcccggcggtgcaccttgcccattgcatatagctactggccatggcctggcaagtcaggagattgctgatgcccacggactgctcagtgccgaagccgggcgggacgacctattaggcctgctgcactgtgaggagtgcccaccttctcagacaggcccggaggaacctttggagcctgcccctcgccttttacaaccacctgaggatcctgatgaggacagcgactctcccgagtgggtagagggcgcttcggctgagcaggaaggatcaagatcaagttccagtagtccagaaccctggctcgaaacagtccccctcgtgaccccagaggaacctcctgctggcgctcagtccccggaaaccctggctagctatcccgcaccccaggaggtcccaggcccctgcgatcacgaagatctgctggatggtgtcatctttggggcccgctatctcgggtctacacaattggttagcgagagaaatccacccaccagtaccagaatggcccaggcccgcgaagccatggaccgtgtgaaagctccagatggggaaacccagcccatgacagaggtggatcttttcgtgtctacaaagagaatcaaagtgctgacggctgactcacaagaggctatgatggaccatgctctacataccattagctacacggcggatatcgggtgtgtgctagttctgatggcacgccgacggctcgcgagaaggcctgctcctcaagatcacggcagacgactgtataagatgctgtgtcatgtattctatgccgaggatgctcaattgatcgctcaggctattggacaagcgtttgcagccgcctatagtcagttccttcgggagagcggaatcgatccgtcacaagtaggtgtgcatccgagtcccggagcgtgtcatctccataatggcgacctcgaccacttcagcaatagcgacaattgtagggaggtacatctagagaagaggaggggagagggcttgggggtggccctggtggaaagtggctggggtagtctgcttcccacagctgtaattgccaaccttctgcatggcggccccgctgaacggagcggggccctgtctattggagatagactgacagcgatcaatggcacttcgctagtggggttgcctctcgcagcttgtcaggctgccgtccgtgagaccaagtctcagacctcagtcacgctcagcatcgtgcactgcccccccgttactaccgctatcatacaccgaccacacgcacgggagcagctggggttctgtgtagaggacggaattatctgttccctcctgcgtggaggtattgcggaacgaggaggcatcagggtggggcaccgcattatcgaaatcaatggacaatcagtggtcgccacaccccacgctcgcatcatagagcttctgacggaagcttacggcgaggtacacatcaaaacaatgccagcagcaacttaccgcctactgactggacaggaacagcctgtatacttgtag

SEQ ID NO: 150491 - DNA, 2158 bp, Artificial Sequence
  derived and/or modified sequence
cgcggatagaggagcgggcgccgggaccgggaatccccgagctgcgccttctggggacgcggcccgggctacgtcggggccgtccgtggggagcggggtcctggaggctgcgcggggctgaggcggcctcgatttgggaactgcctgaagatgccggcctaagcctggagtccaggcatggacttccccacaatttcccgatccccttcggggcctccagccatggacttggaggggcccagggacattcttgtgccttcggaggacctcacccctgacagccagtgggaccctatgccaggaggccccggcagcctcagtcggatggaacttgatgagtcaagccttcaggagctggtgcagcagtttgaagctctgccaggcgatctggtgggcccatccccaggtggagccccctgtcccctacacattgccacaggccatggcctggcctcccaggagattgctgatgcccacgggctcctgtctgccgaagctggccgggatgacctgctgggcctcttgcactgcgaggaatgcccgccttcccagactggtcctgaagagcctctagagcctgccccccgactgttgcagccccctgaggacccagatgaggattctgactccccagaatgggtggagggggcctctgctgagcaggagggcagcaggagctcaagcagttccccggaaccctggctggagacggtgcctctagtcacacctgaagagccacccgctggtgcccagagccccgagaccctggcttcctaccctgccccccaggaggtgcctggtccctgtgaccatgaagacctcctggacggtgtcatatttggggccaggtacctggggtccacccagctggtgtcggaacggaacccgcccaccagcacgcgcatggcccaggcccgggaggccatggaccgcgtcaaggcccccgatggggagacccagcccatgacggaggtggacctgttcgtctccaccaagaggatcaaggtcttgacagcggactcccaggaggccatgatggaccacgccctgcataccatctcctacacagccgacatcggctgcgtgctggtgctgatggcgcggcggcggctggcacggaggccggcaccccaggaccacggccgccgcctctacaagatgctctgccacgtattctacgcggaggacgcccagctcatcgcccaggccattggccaggccttcgccgccgcctacagccagttcctacgggaaagcggtattgaccccagccaggtgggcgtgcacccgagcccaggcgcctgccacctccataatggggacctggaccacttctccaacagtgacaactgccgggaggtgcacctcgagaagcggcgaggggagggcctgggcgtggccctggtggagtcgggctggggctccctgctgcccacagccgtcatcgccaacctgctgcacggggggcctgctgagcgctcgggggccctcagcatcggggaccgcctgaccgccatcaacgggaccagcctggtggggctgcccctggctgcgtgccaggccgctgtccgcgagacgaagtcgcagacgtcggtgacactcagcatcgtccactgccctcccgtcaccaccgccatcatccaccggccccacgcccgcgagcagctgggcttctgcgtggaggacggcatcatctgcagcctcctccgtggtggcatcgccgagcgtgggggcatccgcgtcggccaccgcatcattgagatcaatgggcagagtgtggtggccacgccacacgcccgcatcatcgagctgctcaccgaggcctatggcgaggtgcatatcaagacgatgccagctgccacatatcgcctccttacaggccaggagcagcccgtgtacctgtgaccacctcatcccttgcctgccactgtgccttcgcctccatggccccggagccccatcctgggcctgccctggctggccaggaccccagcggttcttggtcctgtatgatttcctaatataaaaacagtaaaagcttatgcatttggcaaagtctcggatcagggtctacgggaccgaggaccttgtccttcctggaagccactagaagccggtgctgtgaaaatactctgtttattaaagaccaggcggaggg

SEQ ID NO: 150492 - DNA, 1728 bp, Artificial Sequence
  derived and/or modified sequence
atggacttccccaccatcagccgcagccccagcggccccccagccatggacctggagggcccccgggacatcctggtgcccagcgaggacctgaccccagacagccagtgggaccccatgcctgggggccctggcagcctgagcaggatggagctggatgagagcagcctgcaggagctggtgcagcagtttgaggccctgcccggggacctggtgggccccagccctgggggcgccccctgccccctgcacatcgccactggacatggcctggccagccaggagattgctgatgcccacggcctgctgtctgctgaggccggcagagatgacctgctgggcctgctgcactgtgaggagtgcccccccagccagacaggccctgaggagcccctggagcccgccccccggctgctgcagcccccagaagatcctgatgaagattctgacagccctgagtgggtggagggcgccagcgctgagcaggagggcagccgcagcagcagcagcagccctgagccctggctggagaccgtgcccctggtgaccccagaggagcccccagctggggcccagagccctgagaccctggccagctacccagccccccaggaggtgcccggcccctgtgaccacgaggacctgctggatggagtcatctttggagcccgctacctgggcagcacccagctggtgtctgaaagaaatccacccaccagcaccaggatggcccaggcccgggaggccatggacagagtgaaggccccagatggagagacccagcccatgacagaggtggacctgtttgtgtccaccaagaggatcaaggtgctgacagctgacagccaggaggccatgatggaccacgccctgcacaccatctcctacacagctgacatcggctgtgtgctggtgctgatggcccggcggcggctggcccggcggcctgccccccaggaccatggaagaagactctacaagatgctgtgccacgtgttctatgcagaagatgcccagctgattgcccaggccatcggccaggcctttgctgctgcctacagccagttcctgcgggagagcggcatcgaccccagccaggtgggcgtgcaccccagccctggggcctgccacctgcacaacggggacctggaccacttcagcaacagcgacaactgccgggaggtgcacctggagaagagaagaggagagggcctgggcgtggccctggtggagagcggctggggcagcctgctgcccacagctgtgattgccaacctgctgcacggcggccctgctgagaggtctggggccctgagcatcggggaccggctgacagccatcaatggcaccagcctggtgggcctgcccctggccgcctgccaggccgctgtgcgggagaccaagagccagacctctgtgaccctgagcatcgtgcactgcccccctgtgaccacagccatcatccaccggccccacgcccgggagcagctgggcttctgtgtggaggatggcatcatctgcagcctgctgcggggcggcattgctgagcggggcggcatccgggtgggccaccgcatcatcgagatcaatggccagagcgtggtggccacccctcatgcccgcatcatcgagctgctgacagaggcctacggggaggtgcacatcaagaccatgcctgctgccacctaccgcctgctgaccggccaggagcagcctgtgtacctgtag

SEQ ID NO: 150493 - DNA, 1728 bp, Artificial Sequence
  derived and/or modified sequence
atggacttccccaccatcagccggagccccagcggcccccccgccatggatctggagggccctcgtgacatcctggtgccgtccgaggacctgacacccgacagccaatgggatcctatgccgggaggtcccggatccttgtcgcgtatggaactggacgagtccagtcttcaggaactggtacagcagtttgaagctctgccaggcgatctggttggtccttctcccggtggggccccttgcccactgcatatcgccacggggcacgggctagccagccaggaaatcgccgacgcccatggcctcctgtctgcagaggctggtcgcgatgacttattggggttgctccactgtgaagagtgtccaccaagccaaacaggcccagaagaacctctcgaaccggcacctaggctcctgcagccccctgaagatcccgacgaggactccgatagccccgagtgggtagaaggcgcctcagcagagcaggaggggagtcgaagcagtagttcaagccctgaaccatggctggagaccgttcctctagttactccagaagaacccccagctggcgcacagtcaccagagacgttggcaagctaccccgctcctcaggaggtcccagggccgtgcgatcacgaagatttactggacggcgtcatatttggcgcccgttatctcggctctacgcaactggtgagtgaacgcaatccacccacatccaccagaatggcccaggcacgcgaggccatggaccgggtgaaagcacccgatggggagacccaaccaatgaccgaagtggaccttttcgtctcaaccaaaaggataaaggtgctgactgctgacagtcaggaagcgatgatggatcatgctctgcacactatctcctacactgcagacatcgggtgtgtgttagttctgatggccaggcgccgtctcgcacggcgtcctgcgccacaggaccacggtagacgtctgtacaagatgctgtgccatgtgttctacgctgaggacgcccaacttattgcgcaagcaatcggtcaggcattcgcggctgcttacagtcagtttctgagagagagcggcatcgaccccagtcaggtaggcgtccaccctagtcctggggcctgtcatttgcataatggcgatctggatcactttagcaactctgataactgcagagaagtgcatttagagaaacggcgcggtgagggcctcggagtcgctttagtcgagtctgggtggggcagcttactccccacagcggttatcgcaaacctgctgcacggaggtcctgcagagcgctccggtgcgctctctatcggggaccggctgactgccattaacggcaccagtctcgtgggcctaccactcgccgcatgtcaagccgccgtaagggagactaaatctcagacatccgttacactgtccattgtgcattgcccacctgtgaccacagcgattattcatagaccacacgcacgggaacaacttggtttctgtgtggaggatggaatcatttgtagtttgctgcggggaggcatcgctgaaaggggagggattcgcgtggggcacagaattatcgagataaatggccagtcagtggttgcaacaccccatgcacgcattattgagttgctcacagaagcttacggcgaggtgcacattaaaacaatgccagccgctacctacaggcttcttaccggccaagaacaacccgtgtatctgtag

SEQ ID NO: 150494 - DNA, 1728 bp, Artificial Sequence
  derived and/or modified sequence
atggattttcctacaatatcaagatcaccgagcggcccacctgcgatggacctggagggcccacgcgacatcttagttccatcagaggacctgacacccgacagtcagtgggatcccatgcctggcggacccggatcgttgtctcggatggaattagatgagagctcgcttcaggaactggttcaacagtttgaagcattaccaggcgatctggtgggaccttcacccggtggcgctccctgcccccttcatatagcaaccggacatggtctcgctagccaggaaattgctgacgctcatggcttgctgtctgctgaggccggacgcgatgatctgcttggcctgctgcactgcgaagagtgcccaccatcacagacaggacctgaagaacctctcgaacccgctccacgcctactccaaccacccgaagacccagacgaggacagcgatagcccagaatgggtggagggcgcttccgctgaacaggagggctcacgctcttcgtcatcatcgccggagccatggctggagactgtgccactcgttacccctgaagagccaccagccggtgcccagtctccggagactctggcctcctacccggcaccgcaggaagttcccggaccatgcgatcacgaggatttactggacggtgtcatttttggcgctagatacctgggtagtacgcagctggtgtctgaaaggaatccccctacctctacaaggatggcacaggctagggaagcaatggatcgcgttaaggccccagatggagaaacccagccaatgaccgaagtagatttatttgtatctactaaacggatcaaagtgctcactgctgatagtcaggaggctatgatggaccatgcgctgcacactatctcgtatactgccgacattggctgcgtcctggtgctgatggcgagacgacgcctggctcggagacccgctccccaggatcacggcagaaggctttataaaatgttgtgtcatgtgttctacgccgaagacgcccagttgatcgctcaggctattgggcaagctttcgcggctgcctacagccaatttcttcgggagtctgggattgatccatctcaagtgggcgtgcaccccagcccaggagcctgccatttacacaacggcgaccttgaccacttctcaaattctgacaattgccgcgaggtccacctggaaaaaaggcgcggtgaggggttaggtgtggctttggttgagtctgggtggggatccttactgcctacagccgtgatcgccaatcttttgcacggtggacctgccgaaagaagtggagccctttctatcggcgaccgcctgacagccattaacggcacatctctggtgggcttgcctctcgccgcttgtcaggccgctgtgcgggaaacaaagagccagacatctgtgactttatccattgtccattgtcctcccgttactaccgccatcatacaccgcccacacgcgagagagcagctgggcttttgtgttgaggacgggatcatttgcagcttacttcggggtggaattgcggagagaggtggcatccgtgtcggccataggattatagagataaacggccagtcagtggtcgccaccccacatgctagaataatcgaacttctaactgaggcttatggtgaggtgcacattaagaccatgcctgccgcaacttataggctcctcaccgggcaagagcagcctgtatacttgtag

SEQ ID NO: 150495 - protein, 111 aa, Artificial Sequence
  derived and/or modified sequence
MSLLPRRAPPVSMRLLAAALLLLLLALYTARVDGSKCKCSRKGPKIRYSDVKKLEMKPKYPHCEEKMVIITTKSVSRYRGQEHCLHPKLQSTKRFIKWYNAWNEKRRVYEE

SEQ ID NO: 150496 - protein, 99 aa, Artificial Sequence
  derived and/or modified sequence
MRLLAAALLLLLLALYTARVDGSKCKCSRKGPKIRYSDVKKLEMKPKYPHCEEKMVIITTKSVSRYRGQEHCLHPKLQSTKRFIKWYNAWNEKRRVYEE

SEQ ID NO: 150497 - DNA, 336 bp, Artificial Sequence
  derived and/or modified sequence
atgagcctgttgccaagacgcgcacccccggtcagcatgcgtctgctggccgcagcactgctgctactgctgttggccctgtacacggccagggtggacggatctaagtgtaagtgctctcgcaaaggacctaaaatccggtatagcgatgtcaaaaagttggagatgaagcccaagtatccccactgcgaggagaaaatggtgattattacaacaaagagcgtcagtcgatatcggggccaggagcactgcctgcacccaaagctccaatctacaaaacggttcatcaagtggtataatgcatggaatgaaaaaaggcgcgtgtatgaggaatag

SEQ ID NO: 150498 - DNA, 300 bp, Artificial Sequence
  derived and/or modified sequence
atgcgcctgctggctgcagcactgctgctgctgttactcgccttatacaccgctcgagttgatggatctaaatgcaaatgttcccgcaaaggaccaaagatcaggtactccgatgtaaagaaactggaaatgaagcccaagtacccccattgcgaagaaaaaatggttatcattacaactaagagcgtttcccgctaccgggggcaggaacattgcctgcatcccaagctccagtctacaaaacgatttatcaagtggtacaatgcttggaatgagaaacgccgcgtgtacgaagaatag

SEQ ID NO: 150499 - DNA, 336 bp, Artificial Sequence
  derived and/or modified sequence
atgagcctgctgccccggcgggcccctcctgtgtccatgaggctgctggccgccgccctgctgctgctgctgctggccctgtacacagcccgggtggatggcagcaagtgcaagtgcagcaggaagggccccaagatccgctacagtgatgtgaagaagctggagatgaagcccaagtacccccactgtgaggagaagatggtgatcatcaccaccaagtctgtgagccgctaccggggccaggagcactgcctgcaccccaagctgcagagcaccaagcgcttcatcaagtggtacaatgcctggaatgagaagagaagagtgtatgaggagtag

SEQ ID NO: 150500 - DNA, 300 bp, Artificial Sequence
  derived and/or modified sequence
atgaggctgctggccgccgccctgctgctgctgctgctggccctgtacacagcccgggtggatggcagcaagtgcaagtgcagcaggaagggccccaagatccgctacagtgatgtgaagaagctggagatgaagcccaagtacccccactgtgaggagaagatggtgatcatcaccaccaagtctgtgagccgctaccggggccaggagcactgcctgcaccccaagctgcagagcaccaagcgcttcatcaagtggtacaatgcctggaatgagaagagaagagtgtatgaggagtag

SEQ ID NO: 150501 - DNA, 336 bp, Artificial Sequence
  derived and/or modified sequence
atgagcctgctgccccggcgggccccccccgtgagcatgcggctgctggccgccgccctgctgctgttacttcttgccctgtataccgcgcgagttgacggctccaaatgcaaatgttcgcggaagggcccaaagatccgatactccgatgtcaagaaactggagatgaaaccaaagtatccacattgtgaagagaagatggtgattatcacaactaagtccgtaagccgatataggggccaggaacattgccttcacccaaaactccagtccacgaagagattcataaagtggtacaacgcttggaatgagaagagacgcgtgtatgaagaatag

SEQ ID NO: 150502 - DNA, 300 bp, Artificial Sequence
  derived and/or modified sequence
atgcggctgctggccgccgccctgctgctgctgctgctggccctgtacacagcacgtgtggatgggtcaaaatgcaaatgctcgcgcaaaggacccaagataagatactctgatgtcaagaagttggagatgaagcctaaataccctcactgtgaagaaaagatggtgatcattaccaccaagtctgttagcagataccgggggcaagagcattgtctccatcctaagttgcagtccacaaagcggtttatcaaatggtataatgcatggaatgaaaagaggcgcgtgtatgaggaatag

SEQ ID NO: 150503 - DNA, 336 bp, Artificial Sequence
  derived and/or modified sequence
atgtccctgttgccaaggagggcaccacctgtttccatgcgactgctcgcggcagccttgctcctgctgctgctggcactttacactgctagggtggatggctccaaatgcaaatgttccaggaaggggcctaagattcggtacagcgatgtcaaaaagctggagatgaagcctaaatacccgcattgcgaggaaaagatggtgattattacaacaaagtctgtgtctcgatatcgcggtcaggagcactgccttcaccctaagttgcaatctacgaaaagattcattaagtggtacaacgcctggaacgagaaaagacgggtctatgaggagtag

SEQ ID NO: 150504 - DNA, 300 bp, Artificial Sequence
  derived and/or modified sequence
atgcgtttgctcgccgctgcactactgctgctgctgttggctttgtacacagccagggtggatgggtcaaaatgtaagtgtagtaggaagggacccaaaatacgctactccgacgtaaagaaactcgagatgaagcctaagtacccccactgtgaggaaaagatggttataatcactactaagagtgtgtccagatacagaggccaagagcactgtctgcacccaaagctgcaaagcaccaagagattcatcaagtggtataacgcctggaatgagaagcgtcgcgtctatgaagagtag

SEQ ID NO: 150505 - DNA, 1971 bp, Artificial Sequence
  derived and/or modified sequence
aatgtgtgcgcgctgtggtatgggtgtgcaagtgtgcgaaggcggcgtgttgtgtgagcgagagggtagcggatgtgtgtgtgcgtgtgcgcgcgtggctccgggtgtgcgccgctgcgatagcgggtcctttcccggggcgggcgacgggcgggctgggaaggtctcctcccctcaccacattgagaaatctcagtgagtcaccgagtggttctgcatattaatgagctcgctcgctgcgagggcaggagcggatttaaaagaggccagggcgggcggagggaggctgtggagagagcgcggagacaagcgcagagcgcagcgcacggccacagacagccctgggcatccaccgacggcgcagccggagccagcagagccggaaggcgcgccccgggcagagaaagccgagcagagctgggtggcgtctccgggccgccgctccgacgggccagcgccctccccatgtccctgctcccacgccgcgcccctccggtcagcatgaggctcctggcggccgcgctgctcctgctgctgctggcgctgtacaccgcgcgtgtggacgggtccaaatgcaagtgctcccggaagggacccaagatccgctacagcgacgtgaagaagctggaaatgaagccaaagtacccgcactgcgaggagaagatggttatcatcaccaccaagagcgtgtccaggtaccgaggtcaggagcactgcctgcaccccaagctgcagagcaccaagcgcttcatcaagtggtacaacgcctggaacgagaagcgcagggtctacgaagaatagggtgaaaaacctcagaagggaaaactccaaaccagttgggagacttgtgcaaaggactttgcagattaaaaaaaaaaaaaaaaaaaaaaaaaaaaaaaaaaaaaaaaaaagcctttctttctcacaggcataagacacaaattatatattgttatgaagcactttttaccaacggtcagtttttacattttatagctgcgtgcgaaaggcttccagatgggagacccatctctcttgtgctccagacttcatcacaggctgctttttatcaaaaaggggaaaactcatgcctttcctttttaaaaaatgcttttttgtatttgtccatacgtcactatacatctgagctttataagcgcccgggaggaacaatgagcttggtggacacatttcattgcagtgttgctccattcctagcttgggaagcttccgcttagaggtcctggcgcctcggcacagctgccacgggctctcctgggcttatggccggtcacagcctcagtgtgactccacagtggcccctgtagccgggcaagcaggagcaggtctctctgcatctgttctctgaggaactcaagtttggttgccagaaaaatgtgcttcattcccccctggttaatttttacacaccctaggaaacatttccaagatcctgtgatggcgagacaaatgatccttaaagaaggtgtggggtctttcccaacctgaggatttctgaaaggttcacaggttcaatatttaatgcttcagaagcatgtgaggttcccaacactgtcagcaaaaaccttaggagaaaacttaaaaatatatgaatacatgcgcaatacacagctacagacacacattctgttgacaagggaaaaccttcaaagcatgtttctttccctcaccacaacagaacatgcagtactaaagcaatatatttgtgattccccatgtaattcttcaatgttaaacagtgcagtcctctttcgaaagctaagatgaccatgcgccctttcctctgtacatatacccttaagaacgccccctccacacactgccccccagtatatgccgcattgtactgctgtgttatatgctatgtacatgtcagaaaccattagcattgcatgcaggtttcatattctttctaagatggaaagtaataaaatatatttgaaatgtacc

SEQ ID NO: 150506 - DNA, 1753 bp, Artificial Sequence
  derived and/or modified sequence
gcatattaatgagctcgctcgctgcgagggcaggagcggatttaaaagaggccagggcgggcggagggaggctgtggagagagcgcggagacaagcgcagagcgcagcgcacggccacagacagccctgggcatccaccgacggcgcagccggagccagcagagccggaaggcgcgccccgggcagagaaagccgagcagagctgggtggcgtctccgggccgccgctccgacgggccagcgccctccccatgtccctgctcccacgccgcgcccctccggtcagcatgaggctcctggcggccgcgctgctcctgctgctgctggcgctgtacaccgcgcgtgtggacgggtccaaatgcaagtgctcccggaagggacccaagatccgctacagcgacgtgaagaagctggaaatgaagccaaagtacccgcactgcgaggagaagatggttatcatcaccaccaagagcgtgtccaggtaccgaggtcaggagcactgcctgcaccccaagctgcagagcaccaagcgcttcatcaagtggtacaacgcctggaacgagaagcgcagggtctacgaagaatagggtgaaaaacctcagaagggaaaactccaaaccagttgggagacttgtgcaaaggactttgcagattaaaaaaaaaaaaaaaaaaaaaaaaaaaaaaaaaaaaaaaaaaagcctttctttctcacaggcataagacacaaattatatattgttatgaagcactttttaccaacggtcagtttttacattttatagctgcgtgcgaaaggcttccagatgggagacccatctctcttgtgctccagacttcatcacaggctgctttttatcaaaaaggggaaaactcatgcctttcctttttaaaaaatgcttttttgtatttgtccatacgtcactatacatctgagctttataagcgcccgggaggaacaatgagcttggtggacacatttcattgcagtgttgctccattcctagcttgggaagcttccgcttagaggtcctggcgcctcggcacagctgccacgggctctcctgggcttatggccggtcacagcctcagtgtgactccacagtggcccctgtagccgggcaagcaggagcaggtctctctgcatctgttctctgaggaactcaagtttggttgccagaaaaatgtgcttcattcccccctggttaatttttacacaccctaggaaacatttccaagatcctgtgatggcgagacaaatgatccttaaagaaggtgtggggtctttcccaacctgaggatttctgaaaggttcacaggttcaatatttaatgcttcagaagcatgtgaggttcccaacactgtcagcaaaaaccttaggagaaaacttaaaaatatatgaatacatgcgcaatacacagctacagacacacattctgttgacaagggaaaaccttcaaagcatgtttctttccctcaccacaacagaacatgcagtactaaagcaatatatttgtgattccccatgtaattcttcaatgttaaacagtgcagtcctctttcgaaagctaagatgaccatgcgccctttcctctgtacatatacccttaagaacgccccctccacacactgccccccagtatatgccgcattgtactgctgtgttatatgctatgtacatgtcagaaaccattagcattgcatgcaggtttcatattctttctaagatggaaagtaataaaatatatttgaaatgt

SEQ ID NO: 150507 - DNA, 336 bp, Artificial Sequence
  derived and/or modified sequence
atgagcctgctgcccagaagagccccccccgtgagcatgagactgctggccgccgccctgctgctgctgctgctggccctgtacaccgccagagtggacggcagcaagtgcaagtgcagcagaaagggccccaagatcagatacagcgacgtgaagaagctggagatgaagcccaagtacccccactgcgaggagaagatggtgatcatcaccaccaagagcgtgagcagatacagaggccaggagcactgcctgcaccccaagctgcagagcaccaagagattcatcaagtggtacaacgcctggaacgagaagagaagagtgtacgaggagtag

SEQ ID NO: 150508 - DNA, 300 bp, Artificial Sequence
  derived and/or modified sequence
atgagactgctggccgccgccctgctgctgctgctgctggccctgtacaccgccagagtggacggcagcaagtgcaagtgcagcagaaagggccccaagatcagatacagcgacgtgaagaagctggagatgaagcccaagtacccccactgcgaggagaagatggtgatcatcaccaccaagagcgtgagcagatacagaggccaggagcactgcctgcaccccaagctgcagagcaccaagagattcatcaagtggtacaacgcctggaacgagaagagaagagtgtacgaggagtag

SEQ ID NO: 150509 - protein, 118 aa, Artificial Sequence
  derived and/or modified sequence
MASQSQGIQQLLQAEKRAAEKVSEARKRKNRRLKQAKEEAQAEIEQYRLQREKEFKAKEAAALGSRGSCSTEVEKETQEKMTILQTYFRQNRDEVLDNLLAFVCDIRPEIHENYRING

SEQ ID NO: 150510 - DNA, 357 bp, Artificial Sequence
  derived and/or modified sequence
atggcctcacagagccaggggattcagcaactgctacaggccgaaaagcgagcggcagagaaggtaagtgaggctaggaagaggaaaaatcggcgcctgaaacaggcaaaagaggaggcgcaggcagaaatcgaacaatatcgactccagcgggaaaaagagtttaaggcgaaggaggccgccgcactcggctcccgggggagttgtagtacggaggtggaaaaggaaactcaggagaagatgactatccttcaaacgtattttagacaaaaccgcgatgaagttctagataacctcctcgcttttgtctgcgacatacgcccagagatccatgagaactatagaatcaatggctag

SEQ ID NO: 150511 - DNA, 357 bp, Artificial Sequence
  derived and/or modified sequence
atggccagccagagccagggcatccagcagctgctgcaggccgagaagagagctgctgagaaggtgtctgaggccaggaagaggaagaacagaaggctgaagcaggccaaggaggaggcccaggccgagattgagcagtaccgcctgcagcgggagaaggagttcaaggccaaggaggccgccgccctgggcagccggggcagctgcagcacagaggtggagaaggagacccaggagaagatgaccatcctgcagacctacttccggcagaacagagatgaggtgctggacaacctgctggcctttgtgtgtgacatccggcctgagatccacgagaactaccgcatcaatggatag

SEQ ID NO: 150512 - DNA, 357 bp, Artificial Sequence
  derived and/or modified sequence
atggccagccagagccagggcatccagcagctgctgcaggccgagaaacgtgcagctgagaaagtgtcagaggcccgaaaaagaaagaatcgcagactaaagcaggccaaagaagaggcgcaagccgaaatcgagcaatatcggctgcagagagagaaggaatttaaagctaaagaagctgccgcgctgggaagccgagggtcttgtagtaccgaggtcgaaaaagagacacaggagaaaatgacaatactacagacatacttccgacagaatcgcgacgaagttctggacaatctgctcgcttttgtgtgtgatatcagacctgagattcacgaaaattatcgcatcaacggatag

SEQ ID NO: 150513 - DNA, 357 bp, Artificial Sequence
  derived and/or modified sequence
atggcctcccagtcccagggaatacagcagctactgcaagcagagaagcgcgcagctgaaaaagtgagtgaggctcggaaacgtaagaacagacgcctgaaacaggcaaaagaagaggcccaggccgagatcgagcaatataggctacagagagagaaggagttcaaggctaaagaggcagcagccctgggatctagagggtcttgctccaccgaagtcgagaaggagactcaggaaaaaatgaccatcttacagacatattttcggcaaaacagagatgaggtccttgacaatcttctcgcttttgtgtgtgatataaggccggagatccacgagaactaccgcattaacggatag

SEQ ID NO: 150514 - DNA, 1080 bp, Artificial Sequence
  derived and/or modified sequence
gcaagcgcagattgtgggcggctgtgtcagctgacccaaggggccttcgaggtgccttaggccgcttgccttgctctcagaatcgctgccgccatggctagtcagtctcaggggattcagcagctgctgcaggccgagaagcgggcagccgagaaggtgtccgaggcccgcaaaagaaagaaccggaggctgaagcaggccaaagaagaagctcaggctgaaattgaacagtaccgcctgcagagggagaaagaattcaaggccaaggaagctgcggcattgggatcccgtggcagttgcagcactgaagtggagaaggagacccaggagaagatgaccatcctccagacatacttccggcagaacagggatgaagtcttggacaacctcttggcttttgtctgtgacattcggccagaaatccatgaaaactaccgcataaatggatagaagagagaagcacctgtgctgtggagtggcattttagatgccctcacgaatatgaagcttagcacagctctagttacattcttatgatatggcattaaattatttccatatattatataataggtccttccactttttggagagtagcaaatctagcttttttgtacagacttagaaattatctaaagatttcatctttttacctcatatttcttaggaatttaatggttatatgttgtctttttttcctatgtcttttggctcaagcaacatgtatatcagtgttgactttttctttcttagatctagtttaaaaaaaaaaaaaaccacataacaattctttgaagaaaggaagggattaaataatttttttccctaacactttcttgaaggtcaggggctttatctatgaaaaagtagtaaatagttctttgtaacctgtgtgaagcagcagccagccttaaagtagtccattcttgctaatggttagaacagtgaatactagtggaattgtttgggctgcttttagtttctcttaatcaaaattactagatgatagaattcaagaacttgttacatgtattacttggtgtatcgataatcatttaaaagtaaagactctgtcatgca

SEQ ID NO: 150515 - DNA, 357 bp, Artificial Sequence
  derived and/or modified sequence
atggccagccagagccagggcatccagcagctgctgcaggccgagaagagagccgccgagaaggtgagcgaggccagaaagagaaagaacagaagactgaagcaggccaaggaggaggcccaggccgagatcgagcagtacagactgcagagagagaaggagttcaaggccaaggaggccgccgccctgggcagcagaggcagctgcagcaccgaggtggagaaggagacccaggagaagatgaccatcctgcagacctacttcagacagaacagagacgaggtgctggacaacctgctggccttcgtgtgcgacatcagacccgagatccacgagaactacagaatcaacggctag

SEQ ID NO: 150516 - protein, 94 aa, Artificial Sequence
  derived and/or modified sequence
MASVGECPAPVPVKDKKLLEVKLGELPSWILMRDFSPSGIFGAFQRGYYRYYNKYINVKKGSISGITMVLACYVLFSYSFSYKHLKHERLRKYH

SEQ ID NO: 150517 - DNA, 285 bp, Artificial Sequence
  derived and/or modified sequence
atggccagcgtgggcgagtgccccgcccccgtgcccgtgaaggacaagaagctgctggaggtgaagctgggcgagctgcccagctggatcctgatgagagacttcagccccagcggcatcttcggcgccttccagagaggctactacagatactacaacaagtacatcaacgtgaagaagggcagcatcagcggcatcaccatggtgctggcctgctacgtgctgttcagctacagcttcagctacaagcacctgaagcacgagagactgagaaagtaccactag

SEQ ID NO: 150518 - DNA, 285 bp, Artificial Sequence
  derived and/or modified sequence
atggcttccgtgggcgaatgccccgcacccgtgccggtgaaagataagaaattactggaggttaaactaggagagttaccttcttggatactgatgagagatttctcgccatcaggcattttcggggcctttcagcggggatactatcggtattataataagtatatcaatgtaaaaaagggctctatttccggtatcacaatggtgctcgcatgctacgtgctgttctcctactcctttagctataagcatctcaagcacgaaagactccgaaaatatcactag

SEQ ID NO: 150519 - DNA, 285 bp, Artificial Sequence
  derived and/or modified sequence
atggcctctgtgggggagtgcccagcccctgtgcctgtgaaggacaagaagctgctggaggtgaagctgggggagctgcccagctggatcctgatgagggacttcagccccagcggcatctttggagccttccagaggggctactaccgctactacaacaagtacatcaacgtgaagaagggcagcatcagcggcatcaccatggtgctggcctgctacgtgctcttctcctacagcttctcctacaagcacctgaagcatgagcggctgaggaagtaccactag

SEQ ID NO: 150520 - DNA, 285 bp, Artificial Sequence
  derived and/or modified sequence
atggccagcgtgggcgagtgccccgcccccgtgcccgtgaaggacaaaaagttgctggaagttaaactgggcgaactgccatcttggatcttaatgagagattttagcccaagtggaatattcggcgcctttcagagaggttactacagatactataataagtacataaacgttaaaaaaggctcaatctcagggatcacgatggtgttggcttgttacgtactgtttagctactcctttagctataaacacttgaagcatgagaggctgcgcaaatatcattag

SEQ ID NO: 150521 - DNA, 285 bp, Artificial Sequence
  derived and/or modified sequence
atggcatctgtaggtgagtgccctgctccggtccccgttaaagacaagaagctgcttgaggtcaagctaggagaactcccgtcatggatcctcatgagagatttctcgccaagcggcattttcggtgccttccagcgcggttactatagatattataataagtacatcaatgtgaagaagggatccataagcggtattaccatggtgctcgcttgttacgtacttttcagctacagcttttcgtataagcatctcaagcatgaacgtctgagaaagtaccactag

SEQ ID NO: 150522 - DNA, 607 bp, Artificial Sequence
  derived and/or modified sequence
actgcaggaccctcggatttttgctgtccaggcacctcgcccttcgcttcatggccttctagtagttccagggtgttcgcagttgtgacctgcttcccgtgagcctctgctctacgcccctggatggggcgtgcattccctacccagcagccctcgcgcggtccggcacagcggacaccaggactccaaaatggcgtcagttggtgagtgtccggccccagtaccagtgaaggacaagaaacttctggaggtcaaactgggggagctgccaagctggatcttgatgcgggacttcagtcctagtggcattttcggagcgtttcaaagaggttactaccggtactacaacaagtacatcaatgtgaagaaggggagcatctcggggattaccatggtgctggcatgctacgtgctctttagctactccttttcctacaagcatctcaagcacgagcggctccgcaaataccactgaagaggacacactctgcacccccccaccccacgaccttggcccgagcccctccgtgaggaacacaatctcaatcgttgctgaatcctttcatatcctaataggaattaacctccaaataaaacatgactggta

SEQ ID NO: 150523 - protein, 227 aa, Artificial Sequence
  derived and/or modified sequence
MADLLGSILSSMEKPPSLGDQETRRKAREQAARLKKLQEQEKQQKVEFRKRMEKEVSDFIQDSGQIKKKFQPMNKIERSILHDVVEVAGLTSFSFGEDDDCRYVMIFKKEFAPSDEELDSYRRGEEWDPQKAEEKRKLKELAQRQEEEAAQQGPVVVSPASDYKDKYSHLIGKGAAKDAAHMLQANKTYGCVPVANKRDTRSIEEAMNEIRAKKRLRQSGEELPPTS

SEQ ID NO: 150524 - DNA, 684 bp, Artificial Sequence
  derived and/or modified sequence
atggccgacctgctgggcagcatcctgagcagcatggagaagccccccagcctgggcgaccaggagaccagaagaaaggccagagagcaggccgccagactgaagaagctgcaggagcaggagaagcagcagaaggtggagttcagaaagagaatggagaaggaggtgagcgacttcatccaggacagcggccagatcaagaagaagttccagcccatgaacaagatcgagagaagcatcctgcacgacgtggtggaggtggccggcctgaccagcttcagcttcggcgaggacgacgactgcagatacgtgatgatcttcaagaaggagttcgcccccagcgacgaggagctggacagctacagaagaggcgaggagtgggacccccagaaggccgaggagaagagaaagctgaaggagctggcccagagacaggaggaggaggccgcccagcagggccccgtggtggtgagccccgccagcgactacaaggacaagtacagccacctgatcggcaagggcgccgccaaggacgccgcccacatgctgcaggccaacaagacctacggctgcgtgcccgtggccaacaagagagacaccagaagcatcgaggaggccatgaacgagatcagagccaagaagagactgagacagagcggcgaggagctgccccccaccagctag

SEQ ID NO: 150525 - DNA, 684 bp, Artificial Sequence
  derived and/or modified sequence
atggctgatctcctgggttcaattctcagcagcatggagaagcccccaagtttgggggaccaggaaacccggcgcaaggcccgtgagcaggctgcacggctcaaaaagttacaggaacaggagaaacagcaaaaagtcgagttccgcaagaggatggagaaggaggtgagtgatttcatccaagacagcggccaaattaagaaaaaatttcagcctatgaacaaaatcgaacgttctatactacacgatgttgtcgaagtggccggactcacttcctttagctttggggaggatgatgattgccggtacgtcatgatctttaaaaaggaattcgccccaagcgatgaggagctagacagttatagacgtggagaggagtgggatccgcagaaggccgaagagaagcgcaaactcaaggaacttgctcagcgtcaggaggaggaagcagcccagcagggccccgttgtagtgagtcctgcttccgactacaaggataagtattcacacctcatcggaaagggcgcagcaaaagatgcagcccacatgctgcaggcaaacaagacatacgggtgcgttcccgttgcaaacaagagggacacgcgctctatcgaggaggccatgaacgagatcagagctaagaaacggctgcgccagagcggtgaggaacttcctcccaccagctag

SEQ ID NO: 150526 - DNA, 684 bp, Artificial Sequence
  derived and/or modified sequence
atggctgacctgctgggcagcatcctgagctccatggagaagccacccagcctgggggaccaggagaccaggaggaaggcccgggagcaggccgcccggctgaagaagctgcaggagcaggagaagcagcagaaggtggagttcaggaagaggatggagaaggaggtgtctgacttcatccaggacagcggccagatcaagaagaagttccagcccatgaacaagattgaaagaagcatcctgcatgatgtggtggaggtggccggcctgaccagcttctcctttggagaagatgatgactgccgctacgtgatgatcttcaagaaggagtttgcccccagtgatgaggagctggacagctaccgccgcggggaggagtgggacccccagaaggccgaggagaagaggaagctgaaggagctggcccagaggcaggaggaggaggccgcccagcagggccctgtggtggtgtccccagccagtgactacaaggacaagtacagccacctgattggaaaaggagctgccaaggatgctgcccacatgctgcaggccaacaagacctacggctgtgtgcctgtggccaacaagagggacaccaggagcattgaggaggccatgaatgagatccgggccaagaagaggctgcggcagagcggggaggagctgccccccaccagctag

SEQ ID NO: 150527 - DNA, 684 bp, Artificial Sequence
  derived and/or modified sequence
atggccgacctgctgggcagcatcctgagcagcatggagaagcccccttcgttgggggatcaggagacacgcagaaaggcgcgcgagcaagcagctcggcttaagaagctgcaggaacaagaaaaacagcagaaagttgagttccgcaaaagaatggagaaggaagtgagcgatttcatccaggactccggccaaatcaaaaaaaaattccagcccatgaataaaatagagagatcaattttacacgacgtggtcgaggttgccggtcttaccagctttagttttggagaggacgatgattgtcggtacgtgatgatatttaaaaaggagttcgcaccaagcgacgaggagctcgactcctacagacggggcgaagagtgggacccgcagaaggcagaggagaagcgcaaactgaaggagttggcccagcgtcaggaagaggaggcagcccagcagggccccgtcgtagtgtcccccgcttcggactataaggacaaatattctcacttgatcgggaaaggagctgctaaggacgctgcccatatgctgcaggcaaacaaaacgtacggctgcgtaccagtcgctaataagagggataccaggtccatagaggaggccatgaatgaaatccgagcaaaaaagcgcctgcgacagtcaggggaggagctgcctcccacctcatag

SEQ ID NO: 150528 - DNA, 684 bp, Artificial Sequence
  derived and/or modified sequence
atggccgatcttttgggctcgatcctgtccagcatggagaaaccacctagcctcggcgatcaagagacccgcagaaaggcacgggaacaagccgctagactaaagaaattgcaagagcaagaaaaacagcagaaggtggaattccgaaagcgtatggagaaggaggtttccgacttcatacaagattcaggacagatcaaaaaaaagtttcagccaatgaataagatagagcgatccatccttcacgacgtggtggaagtggcaggtcttaccagttttagtttcggagaggatgatgactgtaggtacgtgatgatcttcaagaaagaattcgctcctagtgacgaggagttagactcttaccgcagaggggaagaatgggatccacagaaagctgaggagaaacgcaagctgaaagagctggcccagaggcaagaagaagaggcggctcagcaaggccctgtcgtggtgtctcccgcatcagactataaagataagtactcccatctgattggcaagggcgcagctaaggacgccgctcatatgcttcaggccaacaaaacctatggctgcgtcccggtggcgaacaaaagagacacaaggagtatcgaagaggcaatgaacgaaattagggctaagaaacgcctgagacagagtggcgaggaactgcccccaacaagctag

SEQ ID NO: 150529 - DNA, 1023 bp, Artificial Sequence
  derived and/or modified sequence
aagacgcaccgccccctctcagtcactcccaagatggcggacctactgggctccatcctgagctccatggagaagccacccagcctcggtgaccaggagactcggcgcaaggcccgagaacaggccgcccgcctgaagaaactacaagagcaagagaaacaacagaaagtggagtttcgtaaaaggatggagaaggaggtgtcagatttcattcaagacagtgggcagatcaagaaaaagtttcagccaatgaacaagatcgagaggagcatactacatgatgtggtggaagtggctggcctgacatccttctcctttggggaagatgatgactgtcgctatgtcatgatcttcaaaaaggagtttgcaccctcagatgaagagctagactcttaccgtcgtggagaggaatgggacccccagaaggctgaggagaagcggaagctgaaggagctggcccagaggcaagaggaggaggcagcccagcaggggcctgtggtggtgagccctgccagcgactacaaggacaagtacagccacctcatcggcaagggagcagccaaagacgcagcccacatgctacaggccaataagacctacggctgtgtgcccgtggccaataagagggacacacgctccattgaagaggctatgaatgagatcagagccaagaagcgtctgcggcagagtggggaagagttgccgccaacctcctaggcgccccgcccagctccctttgacccctggggcagggcagggggcagggagagacaaggctgctgctattagagcccatcctggagccccacctctgaaccacctcctaccagctgtccctcaggctgggggaaaacaggtgtttgatttgtcaccgttggagcttggatatgtgcgtggcatgtgtgtgtgtgtgtgagagtgtgaatgcacaggtgggtatttaatctgtattattccccgttcttggaattttcttccccatggggctggggtactttacattcaataaatactgtttaaccc

SEQ ID NO: 150530 - protein, 69 aa, Artificial Sequence
  derived and/or modified sequence
VKVKSKNSVIKLLSTAASGYSRYISIKKGAPLVTQVRYDPVVKRHVLFKEAKKRKVAERKPLDFLRTAK

SEQ ID NO: 150531 - protein, 65 aa, Artificial Sequence [sequence omitted]

SEQ ID NO: 150532 - DNA, 198 bp, Artificial Sequence
  derived and/or modified sequence
atgttcctttccgctgttttctttgcgaagagcaagtcaaagaacatcctggtcagaatggtgagtgaggccggtaccgggttctgcttcaataccaagagaaatcgcctgcgggagaagctgacactgctgcactacgatccagtagtgaagcagagagtcctgtttgtcgaaaagaagaagatacgcagcctttag

SEQ ID NO: 150533 - DNA, 198 bp, Artificial Sequence
  derived and/or modified sequence
atgttcctgtctgctgtgttctttgccaagagcaagagcaagaacatcctggtgaggatggtgtctgaggccggcaccggcttctgcttcaacaccaagaggaaccggctgcgggagaagctgaccctgctgcactatgaccctgtggtgaagcagagggtgctgtttgtggagaagaagaagatccgcagcctgtag

SEQ ID NO: 150534 - DNA, 198 bp, Artificial Sequence
  derived and/or modified sequence
atgttcctgagcgccgtgttcttcgccaagagcaagagcaagaacatcctcgttagaatggtgtcggaggcagggacaggcttttgcttcaatacaaaaagaaaccgccttcgcgagaagctcaccctgctacactacgatccggtcgtgaagcagagagtgctctttgtggaaaagaagaagattcgcagtctttag

SEQ ID NO: 150535 - DNA, 198 bp, Artificial Sequence
  derived and/or modified sequence
atgttcctgtcagctgtcttttttgccaaatcgaagtcgaagaacatcctggtgcgcatggtctccgaggccggtaccggattttgctttaataccaagcggaatcggttgagagagaaactgacactgctccattatgatccggtagttaaacagagggtgcttttcgtggagaaaaaaaaaatccgaagcctatag

SEQ ID NO: 150536 - DNA, 518 bp, Artificial Sequence
  derived and/or modified sequence
gcagttgttgttggttgggggccttttggccggtgacggagactgcccaggtgtggtcaccatgttcctctccgcggtcttctttgccaagagcaagtcaaaaaacattctggtgagaatggtgagcgaagctgggacaggtttctgcttcaacaccaagagaaaccgactgcgggaaaaactgactcttttgcattatgatccagttgtgaaacaaagagtcctcttcgtggaaaagaaaaaaatacgctccctttaaacggtggattgaaaatgactttgatttataaagagaagactgagggcggggatactgattcagaaatcctgtagcgtgtaataaaagaagaggaaatggcatggaatcactgcctcctgtgatttgaaggccattgtgaaggaaaacaatgcagtgaaagaaagttcttcatattaggacagatatcattgcatcacatttatttatctttctgggtatttttatagcccttaataaaaaatattaaaatagcctgtgc

SEQ ID NO: 150537 - DNA, 198 bp, Artificial Sequence
  derived and/or modified sequence
atgttcctgagcgccgtgttcttcgccaagagcaagagcaagaacatcctggtgagaatggtgagcgaggccggcaccggcttctgcttcaacaccaagagaaacagactgagagagaagctgaccctgctgcactacgaccccgtggtgaagcagagagtgctgttcgtggagaagaagaagatcagaagcctgtag

SEQ ID NO: 150538 - protein, 371 aa, Artificial Sequence
  derived and/or modified sequence
MSSRGGKKKSTKTSRSAKAGVIFPVGRMLRYIKKGHPKYRIGVGAPVYMAAVLEYLTAEILELAGNAARDNKKGRVTPRHILLAVANDEELNQLLKGVTIASGGVLPNIHPELLAKKRGSKGKLEAIITPPPAKKAKSPSQKKPVSKKAGGKKGARKSKKQGEVSKAASADSTTEGTPADGFTVLSTKSLFLGQKLNLIHSEISNLAGFEVEAIINPTNADIDLKDDLGNTLEKKGGKEFVEAVLELRKKNGPLEVAGAAVSAGHGLPAKFVIHCNSPVWGADKCEELLEKTVKNCLALADDKKLKSIAFPSIGSGRNGFPKQTAAQLILKAISSYFVSTMSSSIKTVYFVLFDSESIGIYVQEMAKLDAN

SEQ ID NO: 150539 - DNA, 1116 bp, Artificial Sequence
  derived and/or modified sequence
atgagttcacgaggggggaaaaaaaagtctactaagacttctaggtcagccaaagcgggcgttattttcccagtcgggagaatgctccgctatattaaaaaaggtcatcccaaataccggatcggagtgggagcccctgtttatatggcagccgtcctggaatacctgaccgcagagattcttgaactagccggcaatgctgcgagggataacaagaaagggcgcgtcacaccccggcatatcctgctggcggttgcgaacgacgaagagctcaaccagctccttaagggcgtcacaatcgccagcggcggggttttacctaatatccatccagagctgcttgcaaagaagcgaggttccaaaggaaagctggaagctattatcacccccccacccgcaaagaaggctaagtcacctagccaaaaaaagcctgtaagtaagaaggcaggcggcaagaaaggtgctagaaaatccaaaaaacagggagaggtgtctaaggcagcttccgccgacagcacaaccgagggcacgccagctgatgggttcaccgtcctgagcactaagtctctgttcctcgggcagaaactaaatcttatccatagcgaaattagtaatctggccggcttcgaagtcgaggcaatcatcaaccctactaatgctgacatcgatctcaaggatgacctcgggaacaccctggagaagaagggagggaaggaatttgttgaagcggtactagagcttcgaaagaagaacgggccgctagaagtcgccggcgcagcggtttccgccggccatggcctacccgctaaatttgtgattcattgcaatagtcccgtgtggggagccgataagtgcgaagagctgctggagaaaactgtgaagaattgtctcgctcttgcagacgataagaagcttaaatccattgccttcccgtccataggctctgggaggaatggattccccaaacagactgcggcacagctgatcttaaaggccatctcgagttacttcgttagcaccatgagcagcagtattaagacagtgtatttcgtgctgttcgactctgagagtataggtatatacgtccaggaaatggccaagttggacgccaattag

SEQ ID NO: 150540 - DNA, 1116 bp, Artificial Sequence
  derived and/or modified sequence
atgagcagcagaggaggcaagaagaagagcaccaagaccagccgcagcgccaaggccggggtcatcttccctgtgggccgcatgctgcgctacatcaagaagggccaccccaagtacagaattggagtgggcgcccctgtgtacatggctgctgtgctggagtacctgacagctgagatcctggagctggccggaaatgctgcccgggacaacaagaagggccgggtgacccccaggcacatcctgctggccgtggccaatgatgaggagctgaaccagctgctgaagggcgtgaccatcgccagcggcggcgtgctgcccaacatccaccctgagctgctggccaagaagaggggcagcaagggcaagctggaggccatcatcaccccacctccagccaagaaggccaagagccccagccagaagaagcctgtgtccaagaaggccggcggcaagaagggggccaggaagagcaagaagcagggcgaggtgtccaaggccgccagcgctgacagcaccacagagggcaccccagcagatggcttcaccgtgctgagcaccaagagcctcttcctgggccagaagctgaacctgatccacagcgagatcagcaacctggccggctttgaggtggaggccatcatcaaccccaccaatgctgacatcgacctgaaggatgacctgggcaacaccctggagaagaagggcggcaaggagtttgtggaggccgtgctggagctgaggaagaagaatggccccctggaggtggccggggctgctgtgtctgctggccacggcctgcctgccaagtttgtgatccactgcaacagccctgtgtggggcgctgacaagtgtgaggagctgctggagaagacagtgaagaactgcctggccctggctgatgacaagaagctgaagagcatcgccttccccagcatcggcagcggcagaaatggcttccccaagcagacagctgcccagctgatcctgaaggccatcagcagctactttgtgtccaccatgagcagcagcatcaagacagtgtactttgtgctgtttgattctgagagcatcggcatctacgtgcaggagatggccaagctggatgccaactag

SEQ ID NO: 150541 - DNA, 1116 bp, Artificial Sequence
  derived and/or modified sequence
atgagcagccggggcggcaagaagaagagcaccaagaccagccggagtgccaaagcgggagtgatttttccagtgggccgcatgctgagatacattaagaaagggcaccccaaataccgtatcggggtgggggctccggtctacatggcggcagtgctcgagtatctgaccgcagaaatcctggaactggcagggaatgcagcacgcgataacaaaaagggcagagtgacgccacggcacattctcttggccgtggcaaacgatgaggagttgaatcagttgctgaagggagtaaccatcgcctctgggggagtacttcctaatattcatcccgaactgctagcaaaaaagcgaggctccaagggcaagctcgaagccatcattacaccaccgccagctaagaaagcaaagtccccgtctcagaaaaaacctgtgtctaagaaggctgggggcaagaagggggcacgaaaatcaaagaaacagggagaggtttctaaagccgcttcagcagatagtaccactgaaggcacccccgccgatggatttactgtgcttagtacgaagtcactcttcctgggccagaagctgaacctgatccacagcgaaattagcaacctcgccggattcgaggtcgaggctataatcaatcccaccaacgccgacatagacctgaaagacgatttagggaacactctggaaaaaaagggcggaaaagagttcgtggaggcagtgttggagctacgcaagaaaaacggaccccttgaggtcgccggcgccgccgtgtcggccggccacgggctgcctgccaaatttgttattcactgtaactcccccgtgtggggagccgataaatgcgaggagcttcttgaaaaaaccgtgaaaaattgtctggccttggcagacgataagaagcttaagtccatcgcgttcccatctattggttcggggagaaacggcttccccaagcagaccgccgcccagctgatcttgaaagccatcagttcatatttcgtgtcaacaatgagttccagcattaaaacagtttactttgtgctttttgatagcgagtcgataggcatctacgtccaggagatggctaagttagatgccaactag

SEQ ID NO: 150542 - DNA, 1116 bp, Artificial Sequence
  derived and/or modified sequence
atgtcaagcaggggtggcaaaaaaaagtctacgaaaactagccgctctgccaaagccggagtgatcttccccgtcggacgaatgctgaggtacatcaaaaagggccacccaaagtatagaattggtgtcggtgcacccgtgtacatggcagccgtactcgaatatcttaccgctgaaattctcgagctcgccggtaacgctgccagggataataaaaagggacgcgtgaccccaagacacatacttttggctgtggccaacgatgaagaactcaaccagctcctgaaaggggtgacgatcgccagtggcggtgttctccctaacattcacccggaactgctcgccaaaaaacgtggcagcaaaggcaaactggaagctatcatcaccccacctcctgcgaaaaaggctaaatcgccaagtcagaaaaagcccgtaagcaaaaaggcgggtggcaagaaaggcgcaagaaagtcgaagaagcagggcgaggtgtcgaaggccgcttcagccgactccactacagaggggacaccagctgatggctttaccgtactttcaacaaaatcactctttctggggcagaagctaaatttgatacattccgaaatttctaatctggctgggtttgaagtagaggctatcataaaccccaccaacgccgacatcgacctcaaagacgatctcggaaacaccttggagaaaaagggagggaaggaattcgtggaagcagtactggaactgcgaaaaaaaaatggccctctggaagtagctggggctgctgtgagtgcaggccatggactcccagctaagttcgtcattcattgtaacagcccggtctggggcgctgataagtgcgaggaactactagagaaaacagtgaagaactgtctggcgttagcggatgacaagaagcttaaatctattgctttcccatcaattggttccggccgtaacggtttccctaagcaaactgccgctcagctcatccttaaagctatctcttcttattttgtttcaacgatgtcctcctccatcaagactgtttactttgttctctttgacagtgaaagcatagggatctatgtacaggagatggctaagctggacgcgaactag

SEQ ID NO: 150543 - DNA, 1116 bp, Artificial Sequence
  derived and/or modified sequence
atgagcagcagaggcggcaagaagaagagcaccaagaccagcagaagcgccaaggccggcgtgatcttccccgtgggcagaatgctgagatacatcaagaagggccaccccaagtacagaatcggcgtgggcgcccccgtgtacatggccgccgtgctggagtacctgaccgccgagatcctggagctggccggcaacgccgccagagacaacaagaagggcagagtgacccccagacacatcctgctggccgtggccaacgacgaggagctgaaccagctgctgaagggcgtgaccatcgccagcggcggcgtgctgcccaacatccaccccgagctgctggccaagaagagaggcagcaagggcaagctggaggccatcatcacccccccccccgccaagaaggccaagagccccagccagaagaagcccgtgagcaagaaggccggcggcaagaagggcgccagaaagagcaagaagcagggcgaggtgagcaaggccgccagcgccgacagcaccaccgagggcacccccgccgacggcttcaccgtgctgagcaccaagagcctgttcctgggccagaagctgaacctgatccacagcgagatcagcaacctggccggcttcgaggtggaggccatcatcaaccccaccaacgccgacatcgacctgaaggacgacctgggcaacaccctggagaagaagggcggcaaggagttcgtggaggccgtgctggagctgagaaagaagaacggccccctggaggtggccggcgccgccgtgagcgccggccacggcctgcccgccaagttcgtgatccactgcaacagccccgtgtggggcgccgacaagtgcgaggagctgctggagaagaccgtgaagaactgcctggccctggccgacgacaagaagctgaagagcatcgccttccccagcatcggcagcggcagaaacggcttccccaagcagaccgccgcccagctgatcctgaaggccatcagcagctacttcgtgagcaccatgagcagcagcatcaagaccgtgtacttcgtgctgttcgacagcgagagcatcggcatctacgtgcaggagatggccaagctggacgccaactag

SEQ ID NO: 150544 - DNA, 1881 bp, Artificial Sequence
  derived and/or modified sequence
actgtctacattagtaattcccaacttgggtccgaaagtgaacttttgctgaagcgaagtagctaaccgcttccatgtgcaaggcaggttccagacttcggggtgaggaggattaactgaaggaccccaggggaaccggtgtgctcactgatccgcctccagggccaccgccatgtcgagccgcggtgggaagaagaagtccaccaagacgtccaggtctgccaaagcaggagtcatctttcccgtggggcggatgctgcggtacatcaagaaaggccaccccaagtacaggattggagtgggggcacccgtgtacatggccgccgtcctggaatacctgacagcggagattctggagctggctggcaatgcagcgagagacaacaagaagggacgggtcacaccccggcacatcctgctggctgtggccaatgatgaagagctgaatcagctgctaaaaggagtcaccatagccagtgggggtgtgttacccaacatccaccccgagttgctagcgaagaagcggggatccaaaggaaagttggaagccatcatcacaccacccccagccaaaaaggccaagtctccatcccagaagaagcctgtatctaaaaaagcaggaggcaagaaaggggcccggaaatccaagaagcagggtgaagtcagtaaggcagccagcgccgacagcacaaccgagggcacacctgccgacggcttcacagtcctctccaccaagagcctcttccttggccagaagctgaaccttattcacagtgaaatcagtaatttagccggctttgaggtggaggccataatcaatcctaccaatgctgacattgaccttaaagatgacctaggaaacacgctggagaagaaaggtggcaaggagtttgtggaagctgtcctggaactccggaaaaagaacgggcccttggaagtagctggagctgctgtcagcgcaggccatggcctgcctgccaagtttgtgatccactgtaatagtccagtttggggtgcagacaagtgtgaagaacttctggaaaagacagtgaaaaactgcttggccctggctgatgataagaagctgaaatccattgcatttccatccatcggcagcggcaggaacggttttccaaagcagacagcagctcagctgattctgaaggccatctccagttacttcgtgtctacaatgtcctcttccatcaaaacggtgtacttcgtgctttttgacagcgagagtataggcatctatgtgcaggaaatggccaagctggacgccaactaggctgagcaatgacagaaccagctgcaccatgtaccccaccttcagtttaaaagaaaaaaaaaatccccttcactcctactgggaggtgggacccctttcattttcagttttgctcatctagggaaaataaggctttggtttccagtttaattgtttttgaccttctaaaatgtttttatgttagcactgatagttggcattactgttgttaagcactgtgttccagaccgtgtctgacttagtgtaacctaggagattttatagttttattttaatgaaaccctgattgacgcacagcagtggggagaacagcgtcttttacctgtcaccgaagccaggaagccccgtttgtaagcgtgtgttgtggtgctttattgtacatcctccagtggcgttctttttactctaatgttcttttggtttcccccctcagaagaatcatgaatttgcaacagacctaatttttggttactttttgtcttattgatggatttgaaaatgaaagatttaataaggcaaagcagaatctgttgtccttaattatatttgcaatttggaatttgtgtgagttgatttagtaaaatgttaaaccg

SEQ ID NO: 150545 - protein, 327 aa, Artificial Sequence
  derived and/or modified sequence
MSFLGGFFGPICEIDIVLNDGETRKMAEMKTEDGKVEKHYLFYDGESVSGKVNLAFKQPGKRLEHQGIRIEFVGQIELFNDKSNTHEFVNLVKELALPGELTQSRSYDFEFMQVEKPYESYIGANVRLRYFLKVTIVRRLTDLVKEYDLIVHQLATYPDVNNSIKMEVGIEDCLHIEFEYNKSKYHLKDVIVGKIYFLLVRIKIQHMELQLIKKEITGIGPSTTTETETIAKYEIMDGAPVKGESIPIRLFLAGYDPTPTMRDVNKKFSVRYFLNLVLVDEEDRRYFKQQEIILWRKAPEKLRKQRTNFHQRFESPESQASAEQPEM

SEQ ID NO: 150546 - protein, 310 aa, Artificial Sequence
  derived and/or modified sequence
MTENPFQERYSVEDLSTFGMCLCMVRYVYDAFYKVNLAFKQPGKRLEHQGIRIEFVGQIELFNDKSNTHEFVNLVKELALPGELTQSRSYDFEFMQVEKPYESYIGANVRLRYFLKVTIVRRLTDLVKEYDLIVHQLATYPDVNNSIKMEVGIEDCLHIEFEYNKSKYHLKDVIVGKIYFLLVRIKIQHMELQLIKKEITGIGPSTTTETETIAKYEIMDGAPVKGESIPIRLFLAGYDPTPTMRDVNKKFSVRYFLNLVLVDEEDRRYFKQQEIILWRKAPEKLRKQRTNFHQRFESPESQASAEQPEM

SEQ ID NO: 150547 - DNA, 984 bp, Artificial Sequence
  derived and/or modified sequence
atgagcttcctgggcggcttcttcggccccatctgcgagatcgacatcgtgctgaacgacggcgagaccagaaagatggccgagatgaagaccgaggacggcaaggtggagaagcactacctgttctacgacggcgagagcgtgagcggcaaggtgaacctggccttcaagcagcccggcaagagactggagcaccagggcatcagaatcgagttcgtgggccagatcgagctgttcaacgacaagagcaacacccacgagttcgtgaacctggtgaaggagctggccctgcccggcgagctgacccagagcagaagctacgacttcgagttcatgcaggtggagaagccctacgagagctacatcggcgccaacgtgagactgagatacttcctgaaggtgaccatcgtgagaagactgaccgacctggtgaaggagtacgacctgatcgtgcaccagctggccacctaccccgacgtgaacaacagcatcaagatggaggtgggcatcgaggactgcctgcacatcgagttcgagtacaacaagagcaagtaccacctgaaggacgtgatcgtgggcaagatctacttcctgctggtgagaatcaagatccagcacatggagctgcagctgatcaagaaggagatcaccggcatcggccccagcaccaccaccgagaccgagaccatcgccaagtacgagatcatggacggcgcccccgtgaagggcgagagcatccccatcagactgttcctggccggctacgaccccacccccaccatgagagacgtgaacaagaagttcagcgtgagatacttcctgaacctggtgctggtggacgaggaggacagaagatacttcaagcagcaggagatcatcctgtggagaaaggcccccgagaagctgagaaagcagagaaccaacttccaccagagattcgagagccccgagagccaggccagcgccgagcagcccgagatgtag

SEQ ID NO: 150548 - DNA, 933 bp, Artificial Sequence
  derived and/or modified sequence
atgaccgagaaccccttccaggagagatacagcgtggaggacctgagcaccttcggcatgtgcctgtgcatggtgagatacgtgtacgacgccttctacaaggtgaacctggccttcaagcagcccggcaagagactggagcaccagggcatcagaatcgagttcgtgggccagatcgagctgttcaacgacaagagcaacacccacgagttcgtgaacctggtgaaggagctggccctgcccggcgagctgacccagagcagaagctacgacttcgagttcatgcaggtggagaagccctacgagagctacatcggcgccaacgtgagactgagatacttcctgaaggtgaccatcgtgagaagactgaccgacctggtgaaggagtacgacctgatcgtgcaccagctggccacctaccccgacgtgaacaacagcatcaagatggaggtgggcatcgaggactgcctgcacatcgagttcgagtacaacaagagcaagtaccacctgaaggacgtgatcgtgggcaagatctacttcctgctggtgagaatcaagatccagcacatggagctgcagctgatcaagaaggagatcaccggcatcggccccagcaccaccaccgagaccgagaccatcgccaagtacgagatcatggacggcgcccccgtgaagggcgagagcatccccatcagactgttcctggccggctacgaccccacccccaccatgagagacgtgaacaagaagttcagcgtgagatacttcctgaacctggtgctggtggacgaggaggacagaagatacttcaagcagcaggagatcatcctgtggagaaaggcccccgagaagctgagaaagcagagaaccaacttccaccagagattcgagagccccgagagccaggccagcgccgagcagcccgagatgtag

SEQ ID NO: 150549 - DNA, 984 bp, Artificial Sequence
  derived and/or modified sequence
atgtccttcttgggggggttcttcggaccaatatgtgagatcgatatcgtcctcaacgacggagagactaggaagatggcagaaatgaaaaccgaggatggaaaggttgaaaagcattacctgttttacgacggggagtcggtcagcggaaaggtaaacctggctttcaagcagccaggcaagcggctcgagcaccagggaatccgcatcgaattcgtgggccagatcgaattatttaatgacaaatccaatacacacgaattcgtgaaccttgtcaaagaactggctcttccaggggagctcacacagtcgcgctcctacgactttgagtttatgcaagtcgaaaagccgtatgaaagctatattggcgcgaacgtgcgcctacgctacttccttaaggtcacaatagtgcggcgcctaaccgacttggtgaaggagtacgacctgatcgttcaccaactggccacttatcccgacgtgaataattccattaaaatggaggtcgggatagaggactgcctgcatatcgagtttgagtacaataagtcaaagtaccatctgaaagatgttatcgttggaaagatttacttcttactggtgaggattaagattcagcacatggaacttcagttaatcaagaaagagatcacaggaattggaccttcaactaccaccgaaacggagaccatcgctaaatacgagattatggatggcgcccctgtcaagggggagagtattcctatccggttgttcttagccggctacgaccccactcctacaatgcgagacgtgaacaagaagttcagtgtgagatacttcctgaacttggttcttgtggatgaggaggaccggaggtattttaaacagcaggaaattatactgtggcggaaagcccctgaaaaactgcgtaagcaacgtaccaacttccaccagcggttcgagagtccagagtcacaagctagtgctgagcagccggaaatgtag

SEQ ID NO: 150550 - DNA, 984 bp, Artificial Sequence
  derived and/or modified sequence
atgtctttcctgggcggctttttcggaccaatatgcgaaattgatatagtcctcaatgatggcgagacccggaagatggccgagatgaagaccgaggacggaaaagtggagaaacattacctattctatgacggtgaatccgtgtctgggaaggtgaacttggccttcaaacagccaggaaaacgcctggaacatcagggtattagaattgagttcgtggggcaaatagagctgtttaatgacaagagcaacacgcatgagtttgttaatcttgtcaaggagttggcactccccggtgagcttacccagtcaaggagctacgacttcgagttcatgcaggtggagaaaccttacgagtcatacatcggggcgaacgtgcgcctgcgatacttcctcaaggtaactatcgttcgtcgcctgaccgacctcgtcaaggagtatgacctcattgtgcaccaactggccacttatcctgatgtcaataatagcatcaaaatggaagtgggcatagaagactgcctccacatagagtttgagtacaacaagagcaaatatcacctaaaagacgtgattgtgggaaaaatctatttcttactggtccggattaaaatccaacacatggaacttcaactgattaaaaaagagatcaccgggatcggaccaagtaccaccactgaaacggaaacaattgcgaagtacgagattatggatggtgcacccgtcaaaggagagtcaattccaatccgtctgtttctagctgggtatgatcccacccccactatgcgagatgtgaacaaaaagttctctgtgcggtattttcttaatctggtcttagtcgatgaagaagatagacggtactttaagcaacaggagattatcctgtggcgtaaagccccggaaaagctgcgcaaacagagaacgaacttccatcaacggtttgagagcccagaatcccaggcctcagccgagcagcccgagatgtag

SEQ ID NO: 150551 - DNA, 933 bp, Artificial Sequence
  derived and/or modified sequence
atgaccgagaatccttttcaggaacgttactccgttgaagacctttccacattcggaatgtgtctgtgcatggtccgatacgtgtacgacgcgttctacaaagtgaatctcgcctttaaacagccagggaaacggctggagcaccaaggcattcggatcgagttcgtgggacagatagaattattcaatgacaaatccaatacccacgagttcgtcaatctggtgaaggagttagcattaccaggggaacttacgcagtcgaggagttatgatttcgaatttatgcaggtcgagaaaccttatgaatcctacatcggagccaacgtgaggctgaggtatttcctgaaggtgaccatcgtccgcagattgacagatctggtgaaggagtatgatctgatcgtgcaccagcttgccacttatcccgacgtaaacaattcaataaagatggaggtgggaattgaggactgtcttcatattgagtttgagtataacaagtctaagtatcacctcaaggatgtgatcgtaggcaaaatctattttctgctggtccgcataaagatccagcatatggaattacagctgatcaagaaagaaattactggcattgggccctctactaccacagagaccgagaccatcgccaagtacgaaatcatggatggggctccggtgaagggagagtccatccctatccgcctgtttctggcaggttacgatccaaccccgacaatgcgcgacgtaaataagaagttctcggtccggtacttcctgaatctagtcttggtggatgaggaagacagaagatattttaaacagcaggaaattattctgtggcgtaaggcccctgaaaagcttcggaagcaaaggactaactttcaccagagatttgaaagccccgagtcccaggcttcagctgaacaacctgaaatgtag

SEQ ID NO: 150552 - DNA, 984 bp, Artificial Sequence
  derived and/or modified sequence
atgtccttcctgggcggcttcttcggccccatctgtgaaattgacatcgtgctgaatgatggagagaccaggaagatggccgagatgaagacagaagatggcaaggtggagaagcactacctgttctatgatggagagagcgtgtctgggaaggtgaacctggccttcaagcagcccgggaagaggctggagcaccagggcatccgcatcgagtttgtgggccagatcgagctgttcaatgacaagagcaacacccatgaatttgtgaacctggtgaaggagctggccctgcccggggagctgacccagagccgctcctatgactttgagttcatgcaggtggagaagccctatgagagctacatcggggccaacgtgcggctgcgctacttcctgaaggtgaccatcgtgcggcggctgacagacctggtgaaggagtatgacctgattgtgcaccagctggccacctacccagatgtgaacaacagcatcaagatggaggtgggcatcgaggactgcctgcacatcgagtttgagtacaacaagagcaagtaccacctgaaggatgtgattgtgggcaagatctacttcctgctggtgcgcatcaagatccagcacatggagctgcagctgatcaagaaggagatcactggaattggccccagcaccaccacagaaacagagaccatcgccaagtatgagatcatggatggagcccctgtgaagggggagagcatccccatccgcctcttcctggccggctatgaccccacccccaccatgagagatgtgaacaagaagttctctgtgcgctacttcctgaacctggtgctggtggatgaggaggaccggcgctacttcaagcagcaggagatcatcctgtggaggaaggcccctgagaagctgaggaagcagaggaccaacttccaccagagatttgagagccctgagagccaggccagcgctgagcagcctgagatgtag

SEQ ID NO: 150553 - DNA, 933 bp, Artificial Sequence
  derived and/or modified sequence
atgacagagaaccccttccaggagcgctacagcgtggaggacctgagcaccttcggcatgtgcctgtgcatggtgcgctacgtgtatgatgccttctacaaggtgaacctggccttcaagcagcccgggaagaggctggagcaccagggcatcagaattgaatttgtgggccagatcgagctgttcaatgacaagagcaacacccatgaatttgtgaacctggtgaaggagctggccctgcctggagagctgacccagagccgctcctatgactttgagttcatgcaggtggagaagccctatgagagctacatcggggccaacgtgcggctgcgctacttcctgaaggtgaccatcgtgcggcggctgacagacctggtgaaggagtatgacctgattgtgcaccagctggccacctacccagatgtgaacaacagcatcaagatggaggtgggcatcgaggactgcctgcacattgaatttgagtacaacaagagcaagtaccacctgaaggatgtgattgtgggcaagatctacttcctgctggtgcgcatcaagatccagcacatggagctgcagctgatcaagaaggagatcaccggcatcggccccagcaccaccacagaaacagagaccatcgccaagtatgagatcatggatggagcccctgtgaagggggagagcatccccatccgcctcttcctggccggctatgaccccacccccaccatgagagatgtgaacaagaagttctctgtgcgctacttcctgaacctggtgctggtggatgaagaagatcggcgctacttcaagcagcaggagatcatcctgtggaggaaggcccctgagaagctgaggaagcagaggaccaacttccaccagagatttgagagccctgagagccaggccagcgctgagcagcctgagatgtag

SEQ ID NO: 150554 - DNA, 984 bp, Artificial Sequence
  derived and/or modified sequence
atgagcttcctgggcggcttcttcggccccatctgcgagatcgacattgtgttaaacgacggtgaaacaaggaaaatggccgagatgaagactgaggatggcaaggtggagaagcactacctcttctatgacggcgagagcgtgagtgggaaagtgaatcttgctttcaagcaaccaggcaaaaggctggaacatcagggaattcggatagaattcgttggccagattgagctcttcaacgacaaatcaaacacccacgagttcgtcaatctcgttaaggagcttgccctccctggagaattgacacagtccaggagctacgatttcgagtttatgcaggtggaaaagccttatgaatcgtatattggagctaatgtgaggcttagatatttcctcaaggtgacaattgtcaggagactcacggacctcgttaaggaatatgacctgattgtccaccagctggccacgtatccagatgttaacaactctatcaagatggaagtcgggatcgaggattgcctccacattgaatttgagtacaacaagtccaagtatcacttgaaagacgtgattgtcggcaaaatctatttcctgcttgttcggattaagatacaacatatggaacttcagctaatcaagaaggagattaccggaatcggcccttcaacaacaactgaaaccgagacaatcgctaagtacgagatcatggacggcgcccctgtaaaaggtgagtccatccccatccggctcttcctggccgggtacgatccaacccccaccatgcgtgacgttaataagaagtttagcgtgcgctattttctgaatctggttttggtggatgaagaagacagacgatacttcaagcaacaggaaatcatcttatggaggaaggcccctgagaagctgaggaagcagagaaccaactttcatcaaagatttgagagcccagaaagccaggcttcggccgagcagcctgagatgtag

SEQ ID NO: 150555 - DNA, 984 bp, Artificial Sequence
  derived and/or modified sequence
atgagcttcctgggcggcttcttcggccccatctgcgagatcgacattgttcttaacgacggtgaaacccgcaagatggccgagatgaaaactgaggatggcaaagtggaaaagcactatctcttttacgacggagagtctgtgagcgggaaggttaatctagcattcaagcagcctggcaagcgtctcgagcaccagggcattcgcatcgaatttgtgggacagatcgagctatttaatgataagagtaatactcatgaattcgtcaatctcgttaaagaactcgccctgcctggggagctcacccagagcaggtcttatgacttcgagtttatgcaggtggaaaagccttacgagtcatatatcggcgctaacgtccgcctgagatattttcttaaagtgacaatagttagaaggttgacagacttagtgaaagagtacgatctcatagttcatcagcttgctacataccctgacgtaaataactccataaaaatggaggtcggcattgaagactgtttgcatatagaattcgagtacaataagtctaagtatcacctaaaagacgtgatcgtgggtaaaatctactttctcctggttagaattaagattcaacacatggaattgcagctgattaaaaaggagatcaccggaatcggcccaagcaccacaaccgagacagagacaatcgcaaagtacgagatcatggatggagcccccgttaaaggtgagtctatcccaatccgactgttcctggccggctatgacccaacacctaccatgagggacgtgaataagaaattttctgtccgttacttcttgaacctagtcctcgttgacgaagaggatcggaggtacttcaaacagcaggagataatcctctggaggaaggcgcccgagaaactgcgaaaacagcgtacaaatttccaccagagattcgaaagtcccgagagtcaggcctccgcagagcagccagagatgtag

SEQ ID NO: 150556 - DNA, 933 bp, Artificial Sequence
  derived and/or modified sequence
atgaccgagaaccccttccaggagcggtacagcgtggaggacctgtcgacctttggtatgtgcttgtgcatggtccgttatgtgtatgacgccttctataaggtaaacctggcatttaagcagcccggaaagcgtctggagcatcagggtatccgtatcgaattcgtgggccagatagagctgttcaacgataaatcaaacacccacgagtttgtcaacttagtaaaagagctggccttgcccggggaattaacacaatcccggtcttacgatttcgagttcatgcaagttgagaagccgtacgagtcatatatcggcgcgaacgtccgactgaggtatttcttgaaagttaccatcgtgagacggctcaccgacttggtcaaggaatacgatctcattgtgcaccagctggctacctacccagatgtgaacaatagcattaagatggaagtgggaatagaggattgcctgcacatagaattcgaatataataaatccaaatatcacctcaaagacgtgatcgtgggaaaaatttacttccttctcgtgcgcatcaagatccagcatatggagctccagctcattaaaaaggagattacaggcattggccctagcactacaaccgagaccgagacgattgctaagtatgagataatggatggcgctcctgtcaaaggggaatccattccaattagactgttcctcgcaggttacgacccgacacctacaatgcgcgatgtgaacaagaagttctctgtgagatatttcttgaatctcgttctggttgatgaggaggatcggagatacttcaaacagcaggaaataatactgtggcgtaaagcacccgagaaactacgcaaacagcggaccaatttccatcagcggttcgaaagtcccgaatcccaggcctctgccgagcaaccagagatgtag

SEQ ID NO: 150557 - DNA, 984 bp, Artificial Sequence
  derived and/or modified sequence
atgagctttttagggggtttcttcggtccgatatgtgaaattgatatcgtcctgaatgatggggagactcgcaagatggcagagatgaagaccgaggatggcaaagtcgaaaagcattacctcttctatgacggggaatctgtcagcggtaaggttaatcttgcctttaaacaaccagggaagcgcctggagcatcaagggatccgcatagagttcgtgggacagatcgagcttttcaatgacaaaagtaatacacatgagttcgtgaacctagtgaaggagcttgcccttcccggtgagctaacacagtcaagatcctatgacttcgagttcatgcaagtcgagaaaccttacgagagttatatcggggcaaacgtgcgtctaagatacttcctgaaggtaaccatcgtacgcaggctcaccgatttggtcaaggaatatgatctgattgtgcaccaactagccacctaccccgacgtgaataatagtataaagatggaggtcgggatcgaggattgcttgcatattgaattcgagtacaataaaagcaagtatcacctgaaggatgtgatagtgggcaagatatactttctgctggtgagaataaagattcagcacatggagctgcaactgataaagaaggagatcaccggcatcggcccttccaccacgactgagaccgaaacaatcgctaaatacgaaattatggacggagcgccagtgaagggagaaagtatccccatccggctctttctcgccggatatgacccaacacccaccatgcgggatgtgaacaagaaattctcagtgcggtatttcttgaaccttgtattggtggatgaagaggacaggagatacttcaaacagcaagagatcattctctggagaaaggctcctgaaaaacttcggaagcagcgtacaaacttccatcaacggttcgaatcccccgaatcacaagcaagtgccgagcagcccgagatgtag

SEQ ID NO: 150558 - DNA, 984 bp, Artificial Sequence
  derived and/or modified sequence
atgagctttttgggagggttcttcggccctatctgcgagatcgacatcgtacttaacgacggtgagaccaggaaaatggccgagatgaagacagaagatggaaaggttgagaagcattatctgttctacgatggcgagagcgtatccggaaaggttaacctcgcgtttaagcagcctggcaagagattggagcatcagggaatccggattgagtttgttggacaaattgagctgttcaacgacaagagtaacacacatgaatttgtaaacctcgtgaaagagcttgccttacccggagagctgacccaatcacggagttatgattttgaatttatgcaggtggaaaaaccatacgagagctacatcggcgcaaacgtgagactgcgttacttcctgaaggttacgatcgtccgccgtcttactgacctcgttaaagagtacgatctgatcgtgcatcaattggctacgtatcccgatgtcaacaatagcattaaaatggaggtagggattgaggattgtcttcacatcgaattcgagtataacaaaagtaagtaccatctcaaggacgttattgtgggcaagatttacttcctacttgtgaggatcaagatccagcacatggagctgcagctgatcaaaaaggagatcaccggaattggcccatcgacgacaacagagacagagaccatcgcaaagtacgaaattatggacggggctcctgtaaaaggggagtccattccaatacgcttattcctggccggatatgaccctacacccacaatgcgcgacgttaataaaaaattcagcgtgcggtattttttaaacttagtgttagttgacgaggaagatcggaggtactttaagcaacaagaaataattctctggaggaaggccccagaaaagctgcggaagcagcggaccaactttcatcagcgtttcgagagtcccgaatcgcaggcctccgctgagcagcctgaaatgtag

SEQ ID NO: 150559 - DNA, 933 bp, Artificial Sequence
  derived and/or modified sequence
atgaccgaaaatccgtttcaagagcgttacagcgtggaggacttatcaacgttcggaatgtgcttgtgcatggtgaggtacgtttacgatgccttttataaggtgaatctcgcttttaaacagcccggtaagcggttggaacatcaaggaatacggatcgagtttgtggggcagatcgaactgttcaacgacaaatccaacacccatgagtttgtgaatctggtcaaagaactggccttacccggagagttgactcagtcccgatcctacgattttgaattcatgcaagtcgaaaagccatacgagtcttatatcggcgcaaacgtccggctgagatactttctgaaggtcacaatcgtgaggcgccttaccgacctggtgaaggagtatgatttgatagtgcatcaacttgctacctaccccgacgtgaacaacagcataaagatggaagttggtattgaagactgtctacatatagagttcgagtacaacaaatccaaataccacttaaaagatgtgatcgttgggaagatctacttcctactggtgcggatcaaaatacaacacatggagcttcaactgattaaaaaggaaatcacaggcataggtcctagtaccactaccgaaaccgagactatagcaaaatatgagataatggacggagccccagtgaagggtgaatcaatacccatccgcctgtttttggcaggctatgatccaacccccacgatgagggatgtgaacaagaaattctccgtgcggtactttctgaacctggtactggttgatgaagaagatcgaagatacttcaagcagcaggaaatcatcctatggaggaaggccccagagaagctgaggaagcagaggactaattttcaccagcgattcgagtccccagaatctcaggcctccgccgagcagcctgaaatgtag

SEQ ID NO: 150560 - DNA, 2697 bp, Artificial Sequence
  derived and/or modified sequence
gagcggtcacgtgtgaggggcggcccgaggtcacgtgacggagcgccggagcggagggagccggggctgggagttctcctgagggaagaggagtggagtaggggggacgcggcggcggcgttgacaatgagttttcttggaggcttttttggtccaatttgtgagatcgatattgttcttaatgatggggaaaccaggaaaatggcagaaatgaaaactgaagatggcaaagtagaaaaacactatctcttctatgacggagaatccgtttcaggaaaggtaaacctagcctttaagcaacctggaaagaggctagaacaccaaggaattagaattgaatttgtaggtcaaattgaacttttcaatgacaagagtaatactcatgaatttgtaaacctagtgaaagaactagccttacctggagaactgactcagagcagaagttatgattttgaatttatgcaagttgaaaagccatatgaatcttacatcggtgccaatgtccgcttgaggtattttcttaaagtgacaatagtgagaagactgacagatttggtaaaagagtatgatcttattgttcaccagcttgccacctatcctgatgttaacaactctattaagatggaagtgggcattgaagattgtctacatatagaatttgaatataataaatcaaagtatcatttaaaggatgtgattgttggaaaaatttacttcttattagtaagaataaaaatacaacatatggagttacagctgatcaaaaaagagatcacaggaattggacccagtaccacaacagaaacagaaacaatcgccaaatatgaaataatggatggtgcaccagtaaaaggtgaatcaattccaataaggctatttttagcaggatatgacccaactccaacaatgagagatgtgaacaaaaaattttcagtaaggtactttttgaatttagtgcttgttgatgaggaagaccggaggtacttcaaacagcaggagataattttatggagaaaagctcctgaaaaactgaggaaacagagaacaaactttcaccagcgatttgaatctccagaatcacaggcatctgccgaacagcctgaaatgtgaactgaacaggagaaaaaaagaaaagcaaaaaactcctgtaacccttgagattaagttcagcaggttaaagatggttgcagctggagggggcggaaaaaggccaaaactccatatatgttagtcttcctttatcttacagcgcagcatttattttatgatataatgaaatgttcgttcatgtatatacatttttaaaagtgctttctttgaaacactggaactttgttaagctgcctttttttttttaacttcctactttgatgataagcactcagatatatatcagcgtaaacatgaaaaattttcatgtgagtaggctggtatttgtaattttgctttctttctgcataatgttgattataaatcctctcttttcaggctaatgattacctcttattctctacatgcaaaaaattaaatattttgtgttcaaataaaattagaaaacctgagtggcctcttgtgtcctgcagagatttaaaacatggcatctcaatatttttgagaactacatttgtttttaacatatgtgtttgagaaaagcatatggagtgtttcaccgcaggcacttctgagtaccattccatggcttccagaattttatcctctttgaggtcttctgtgctatgaatattagatttctttccccaagggattatgtggcaggtcattatggccttcttttttttggccatattaagtaacagttttgctatattccagtagtaccgttgtgtgttttctgcaatgtggagttgacttagcttggcattttagatttgttaaaactattttttccataaatactttgaaacatatttatatatttcaatttaaggaatctttttgccatgtgtatgcaaatattattttcttcatacattcattttcttttcaggggaaaattttgggatgggggactcaggaggacctgtgaagcatgtagttatctagatctgggtaatttcatgtttattaaactcgaactttggctagttaaactcatattgaaacttcatctagtctcttaattttttaacactaaattcaagtcatttgttttaagtctctaaaaaagaagattgcagtcatccattcatatgcatggggtctgatcgcaaatacactaaatgtggagtgtaggaaccaaaatgaaacctgctgtatggaaactactttcacttatggttcattggtttttgtaccaatattttttatgcacttcagtgcaagtcttgtcagttaaccttactttatgagtaagctaaataacccaaattacatttctttaaacctgttttactactatggcactttgataaaatggtcaggaaccaactttactggcaaaagggtccatgtaccaccatgtgctggagcatctgttctacatgtggatatctatgaatggtaatgttttccttcatgtaagtgcctattcagagtttcagaattttaaaatgccaaatattttcatggtcatttgcatgtagtaagccagaaaatattcaaagagattttgaaaaccaattgtatttaaccagcctcaaattgtgcaaccatgatgtataataaagaatttgaaac

SEQ ID NO: 150561 - DNA, 3229 bp, Artificial Sequence
  derived and/or modified sequence
gcgcctttgccctctcagaacggctgggcggaacgaggcgagaaagccaagttaagaaaacccagactcagaaggaggtggagcgggactgcgttcaggcaaggtggcagaacgcctcgccgtggacgaagagagcacatctcttcttgcgaggcctaaggaagtagggctcccactcgcctcggcaacccaaggacccagccaaggagagagcctccagatgaatccttcctctcctccttccttcccagccgctcaaactttcacaaagaggaactgggtgcggtaaagaggccggacacggaaccgctcgtccggtgaccgaagagacggcgaggaggagcccgcgaacccgcctctgttcaggccccgcccactcgacgtaatttgcccgcccctctccaccctccgaagggtggagcctgaggccccgcctccaagcggcctctccccggagtgcctggcggccagcagggcggggcaggaggctgggagagggacgggtgcgggggtgggggagaggaagggagcggtcacgtgtgaggggcggcccgaggtcacgtgacggagcgccggagcggagggagccggggctgggagttctcctgagggaagaggagtggagtaggggggacgcggcggcggcgttgacaatgagttttcttggaggcttttttggtccaatttgtgagatcgatattgttcttaatgatggggaaaccaggaaaatggcagaaatgaaaactgaagatggcaaagtagaaaaacactatctcttctatgacggagaatccgtttcaggaaaggtaaacctagcctttaagcaacctggaaagaggctagaacaccaaggaattagaattgaatttgtaggtcaaattgaacttttcaatgacaagagtaatactcatgaatttgtaaacctagtgaaagaactagccttacctggagaactgactcagagcagaagttatgattttgaatttatgcaagttgaaaagccatatgaatcttacatcggtgccaatgtccgcttgaggtattttcttaaagtgacaatagtgagaagactgacagatttggtaaaagagtatgatcttattgttcaccagcttgccacctatcctgatgttaacaactctattaagatggaagtgggcattgaagattgtctacatatagaatttgaatataataaatcaaagtatcatttaaaggatgtgattgttggaaaaatttacttcttattagtaagaataaaaatacaacatatggagttacagctgatcaaaaaagagatcacaggaattggacccagtaccacaacagaaacagaaacaatcgccaaatatgaaataatggatggtgcaccagtaaaaggtgaatcaattccaataaggctatttttagcaggatatgacccaactccaacaatgagagatgtgaacaaaaaattttcagtaaggtactttttgaatttagtgcttgttgatgaggaagaccggaggtacttcaaacagcaggagataattttatggagaaaagctcctgaaaaactgaggaaacagagaacaaactttcaccagcgatttgaatctccagaatcacaggcatctgccgaacagcctgaaatgtgaactgaacaggagaaaaaaagaaaagcaaaaaactcctgtaacccttgagattaagttcagcaggttaaagatggttgcagctggagggggcggaaaaaggccaaaactccatatatgttagtcttcctttatcttacagcgcagcatttattttatgatataatgaaatgttcgttcatgtatatacatttttaaaagtgctttctttgaaacactggaactttgttaagctgcctttttttttttaacttcctactttgatgataagcactcagatatatatcagcgtaaacatgaaaaattttcatgtgagtaggctggtatttgtaattttgctttctttctgcataatgttgattataaatcctctcttttcaggctaatgattacctcttattctctacatgcaaaaaattaaatattttgtgttcaaataaaattagaaaacctgagtggcctcttgtgtcctgcagagatttaaaacatggcatctcaatatttttgagaactacatttgtttttaacatatgtgtttgagaaaagcatatggagtgtttcaccgcaggcacttctgagtaccattccatggcttccagaattttatcctctttgaggtcttctgtgctatgaatattagatttctttccccaagggattatgtggcaggtcattatggccttcttttttttggccatattaagtaacagttttgctatattccagtagtaccgttgtgtgttttctgcaatgtggagttgacttagcttggcattttagatttgttaaaactattttttccataaatactttgaaacatatttatatatttcaatttaaggaatctttttgccatgtgtatgcaaatattattttcttcatacattcattttcttttcaggggaaaattttgggatgggggactcaggaggacctgtgaagcatgtagttatctagatctgggtaatttcatgtttattaaactcgaactttggctagttaaactcatattgaaacttcatctagtctcttaattttttaacactaaattcaagtcatttgttttaagtctctaaaaaagaagattgcagtcatccattcatatgcatggggtctgatcgcaaatacactaaatgtggagtgtaggaaccaaaatgaaacctgctgtatggaaactactttcacttatggttcattggtttttgtaccaatattttttatgcacttcagtgcaagtcttgtcagttaaccttactttatgagtaagctaaataacccaaattacatttctttaaacctgttttactactatggcactttgataaaatggtcaggaaccaactttactggcaaaagggtccatgtaccaccatgtgctggagcatctgttctacatgtggatatctatgaatggtaatgttttccttcatgtaagtgcctattcagagtttcagaattttaaaatgccaaatattttcatggtcatttgcatgtagtaagccagaaaatattcaaagagattttgaaaaccaattgtatttaaccagcctcaaattgtgcaaccatgatgtataataaagaatttgaaacagaaa

SEQ ID NO: 150562 - DNA, 1032 bp, Artificial Sequence
  derived and/or modified sequence
gagtaggggggacgcggcggcggcgttgacaatgagttttcttggaggcttttttggtccaatttgtgagatcgatattgttcttaatgatggggaaaccaggaaaatggcagaaatgaaaactgaagatggcaaagtagaaaaacactatctcttctatgacggagaatccgtttcaggaaagaacttttcaatgacaagagtaatactcatgaatttgtaaacctagtgaaagaactagccttacctggagaactgactcagagcagaagttatgattttgaatttatgcaagttgaaaagccatatgaatcttacatcggtgccaatgtccgcttgaggtattttcttaaagtgacaatagtgagaagactgacagatttggtaaaagagtatgatcttattgttcaccagcttgccacctatcctgatgttaacaactctattaagatggaagtgggcattgaagattgtctacatatagaatttgaatataataaatcaaagtatcatttaaaggatgtgattgttggaaaaatttacttcttattagtaagaataaaaatacaacatatggagttacagctgatcaaaaaagagatcacaggaattggacccagtaccacaacagaaacagaaacaatcgccaaatatgaaataatggatggtgcaccagtaaaaggtgaatcaattccaataaggctatttttagcaggatatgacccaactccaacaatgagagatgtgaacaaaaaattttcagtaaggtactttttgaatttagtgcttgttgatgaggaagaccggaggtacttcaaacagcaggagataattttatggagaaaagctcctgaaaaactgaggaaacagagaacaaactttcaccagcgatttgaatctccagaatcacaggcatctgccgaacagcctgaaatgtgaactgaacaggagaaaaaaagaaaagcaaaaaactcctgtaacccttgagattaagttcagcaggttaaagatggttgcagctggagggggcgg

SEQ ID NO: 150563 - DNA, 1410 bp, Artificial Sequence
  derived and/or modified sequence
acgtgacggagcgccggagcggagggagccggggctgggagttctcctgagggaagaggagtggagtaggggggacgcggcggcggcgttgacaatgagttttcttggaggcttttttggtccaatttgtgagatcgatattgttcttaatgatggggaaaccaggaaaatggcagaaatgaaaactgaagatggcaaagtagaaaaacactatctcttctatgacggagaatccgtttcaggaaaggtactctgtagaggacttgagtacttttgggatgtgtctatgcatggtcagatatgtttatgacgccttctataaggtaaacctagcctttaagcaacctggaaagaggctagaacaccaaggaattagaattgaatttgtaggtcaaattgaacttttcaatgacaagagtaatactcatgaatttgtaaacctagtgaaagaactagccttacctggagaactgactcagagcagaagttatgattttgaatttatgcaagttgaaaagccatatgaatcttacatcggtgccaatgtccgcttgaggtattttcttaaagtgacaatagtgagaagactgacagatttggtaaaagagtatgatcttattgttcaccagcttgccacctatcctgatgttaacaactctattaagatggaagtgggcattgaagattgtctacatatagaatttgaatataataaatcaaagtatcatttaaaggatgtgattgttggaaaaatttacttcttattagtaagaataaaaatacaacatatggagttacagctgatcaaaaaagagatcacaggaattggacccagtaccacaacagaaacagaaacaatcgccaaatatgaaataatggatggtgcaccagtaaaaggtgaatcaattccaataaggctatttttagcaggatatgacccaactccaacaatgagagatgtgaacaaaaaattttcagtaaggtactttttgaatttagtgcttgttgatgaggaagaccggaggtacttcaaacagcaggagataattttatggagaaaagctcctgaaaaactgaggaaacagagaacaaactttcaccagcgatttgaatctccagaatcacaggcatctgccgaacagcctgaaatgtgaactgaacaggagaaaaaaagaaaagcaaaaaactcctgtaacccttgagattaagttcagcaggttaaagatggttgcagctggagggggcggaaaaaggccaaaactccatatatgttagtcttcctttatcttacagcgcagcatttattttatgatataatgaaatgttcgttcatgtatatacatttttaaaagtgctttctttgaaacactggaactttgttaagctgcctttttttttttaacttcctac

SEQ ID NO: 150564 - protein, 487 aa, Artificial Sequence
  derived and/or modified sequence
MLRAPGCLLRTSVAPAAALAAALLSSLARCSLLEPRDPVASSLSPYFGTKTRYEDVNPVLLSGPEAPWRDPELLEGTCTPVQLVALIRHGTRYPTVKQIRKLRQLHGLLQARGSRDGGASSTGSRDLGAALADWPLWYADWMDGQLVEKGRQDMRQLALRLASLFPALFSRENYGRLRLITSSKHRCMDSSAAFLQGLWQHYHPGLPPPDVADMEFGPPTVNDKLMRFFDHCEKFLTEVEKNATALYHVEAFKTGPEMQNILKKVAATLQVPVNDLNADLIQVAFFTCSFDLAIKGVKSPWCDVFDIDDAKVLEYLNDLKQYWKRGYGYTINSRSSCTLFQDIFQHLDKAVEQKQRSQPISSPVILQFGHAETLLPLLSLMGYFKDKEPLTAYNYKKQMHRKFRSGLIVPYASNLIFVLYHCENAKTPKEQFRVQMLLNEKVLPLAYSQETVSFYEDLKNHYKDILQSCQTSEECELARANSTSDEL

SEQ ID NO: 150565 - protein, 346 aa, Artificial Sequence
  derived and/or modified sequence
MDGQLVEKGRQDMRQLALRLASLFPALFSRENYGRLRLITSSKHRCMDSSAAFLQGLWQHYHPGLPPPDVADMEFGPPTVNDKLMRFFDHCEKFLTEVEKNATALYHVEAFKTGPEMQNILKKVAATLQVPVNDLNADLIQVAFFTCSFDLAIKGVKSPWCDVFDIDDAKVLEYLNDLKQYWKRGYGYTINSRSSCTLFQDIFQHLDKAVEQKQRSQPISSPVILQFGHAETLLPLLSLMGYFKDKEPLTAYNYKKQMHRKFRSGLIVPYASNLIFVLYHCENAKTPKEQFRVQMLLNEKVLPLAYSQETVSFYEDLKNHYKDILQSCQTSEECELARANSTSDEL

SEQ ID NO: 150566 - DNA, 1464 bp, Artificial Sequence
  derived and/or modified sequence
atgttgcgggcaccaggttgcctcttacgaaccagcgtggcacccgcagctgctctggcagctgcgctcttgtcctcccttgcacgctgtagcttgttggaaccccgagatccggtcgccagctctctttcaccgtatttcgggacgaagacaagatatgaggacgtgaacccggtactcctttcagggcccgaggccccctggcgggatcccgaacttttggaaggaacttgcaccccggtgcaacttgttgccttgatccggcacggtaccaggtatcctacggttaagcagatccgaaagctcagacagctccatgggctcctgcaagcacggggatccagggacggtggggcctctagcacagggtcgcgcgacctgggcgcggcgttggccgattggcctctctggtatgcagattggatggatggacagcttgtcgagaagggtagacaggacatgcgccaattagcactgcgcctcgcctccctattccctgccctgttttccagagagaattacgggcggttgcggctgattacttctagcaaacaccggtgtatggactcttccgccgcgttcctacagggcttatggcagcattaccaccccggtttaccaccaccagacgtggctgatatggagtttgggccaccgaccgtgaacgataagctgatgaggttctttgaccactgtgagaaatttttaactgaagtggaaaagaacgctactgcactttaccacgtcgaagccttcaaaacaggccccgagatgcaaaacatcctgaaaaaggttgccgccacattacaagtccctgtgaacgacctcaacgccgatttaatccaggtggcctttttcacctgcagtttcgacctcgccattaagggcgtcaaatccccctggtgtgacgtcttcgacatcgatgatgcaaaagttctagagtatcttaatgacctcaaacagtactggaagcgaggctacgggtacacaatcaactcacgttcttcatgtaccctgttccaagatattttccagcatcttgataaggccgtcgagcagaaacaaaggagtcagcctatctcctccccagtcatcctgcagtttggacacgctgagacgttgcttccgctgctttccctaatgggatacttcaaagacaaggagccgcttacagcctacaactataagaaacagatgcatcggaagtttaggtccggcttaattgtgccctatgccagcaacttgatctttgtgctctatcattgcgaaaacgcgaaaacaccaaaggaacagttccgcgtgcagatgctgctgaatgaaaaggtgctgcctctggcttactcccaagaaactgttagtttctatgaagacctgaaaaatcactataaggacatactgcaaagttgccagacgtcagaggagtgcgagttagctagggcgaattcaacctcagacgagctttag

SEQ ID NO: 150567 - DNA, 1041 bp, Artificial Sequence
  derived and/or modified sequence
atggatggacagctggtggaaaagggtcggcaggatatgaggcaactggccctccggttggcctccctctttcccgcgcttttctctagggaaaattacggccgtctgagactcatcactagtagcaagcaccggtgtatggactcaagcgccgcatttctgcagggattatggcaacattatcaccctggcttgcctccaccagacgtggcagatatggagtttgggccccccactgtgaatgacaaactcatgaggtttttcgatcattgcgagaagtttctcaccgaagtcgaaaagaacgcgacagcactataccatgtcgaagccttcaagactggccccgaaatgcagaacattctgaaaaaagtggcagccactcttcaggtgcctgttaacgacctcaatgcagacctgattcaagttgccttttttacctgtagcttcgatctggccatcaagggggtgaagtctccatggtgtgatgtcttcgatattgacgatgccaaggtgctcgagtatctcaacgacctgaaacagtattggaaaaggggctacggatataccattaacagtagaagctcatgcactctgttccaggacatttttcaacatctggacaaagccgtcgagcagaagcagaggagccagcccatctccagccccgtgattttacagtttgggcatgccgagacacttctgccactgctcagcctgatgggatactttaaggataaggagcctttgacagcgtataattacaaaaaacaaatgcatcggaagttccggtccggactgatagtcccatacgcttccaacttaattttcgtcctttaccactgcgagaacgcaaagacaccaaaggagcagttcagagtgcaaatgttgctgaacgaaaaagtgttgcccctggcttacagccaggaaactgtgagcttttacgaggatctgaaaaaccattataaagatatcttacaaagctgtcaaacaagcgaagagtgcgaactggcccgagctaactccacatctgacgagctatag

SEQ ID NO: 150568 - DNA, 1464 bp, Artificial Sequence
  derived and/or modified sequence
atgctgcgggcccctggctgcctgctgcggacctctgtggccccagctgctgccctggccgccgccctgctgagcagcctggcccgctgcagcctgctggagccccgggaccctgtggccagcagcctgagcccctacttcggcaccaagaccaggtatgaagatgtgaaccctgtgctgctgagcggccctgaggccccctggagggaccctgagctgctggagggcacctgcacccctgtgcagctggtggccctgatcagacatggcacccgctaccccaccgtgaagcagatcaggaagctgcggcagctgcacggcctgctgcaggcccggggcagcagagatggaggagccagcagcacaggcagccgggacctgggcgccgccctggccgactggcccctgtggtatgctgactggatggatggccagctggtggagaagggccggcaggacatgaggcagctggccctgcggctggccagcctcttccctgccctcttcagccgggagaactacggccgcctgcggctcatcaccagcagcaagcaccgctgcatggacagcagcgctgccttcctgcagggcctgtggcagcactaccaccctggcctgcccccaccagatgtggccgacatggagtttggcccccccaccgtgaatgacaagctgatgaggttctttgaccactgtgagaagttcctgacagaggtggagaagaatgccacagccctgtaccacgtggaggccttcaagacaggccctgagatgcagaacatcctgaagaaggtggccgccaccctgcaggtgcctgtgaatgacctgaatgctgacctgatccaggtggccttcttcacctgcagctttgacctggccatcaagggcgtgaagagcccctggtgtgatgtgtttgatattgatgatgccaaggtgctggagtacctgaatgacctgaagcagtactggaagaggggctacggctacaccatcaacagccgcagcagctgcaccctcttccaggacatcttccagcacctggacaaggctgtggagcagaagcagaggagccagcccatcagcagccctgtgatcctgcagtttggacatgctgagaccctgctgcccctgctgagcctgatgggctacttcaaggacaaggagcccctgacagcctacaactacaagaagcagatgcacaggaagttccgcagcggcctcatcgtgccctatgccagcaacctgatctttgtgctgtaccactgtgaaaatgccaagacccccaaggagcagttccgggtgcagatgctgctgaatgagaaggtgctgcccctggcctacagccaggagaccgtgtccttctatgaggacctgaagaaccactacaaggacatcctgcagagctgccagaccagcgaggagtgtgagctggcccgggccaacagcaccagtgatgagctgtag

SEQ ID NO: 150569 - DNA, 1041 bp, Artificial Sequence
  derived and/or modified sequence
atggatggccagctggtggagaagggccggcaggacatgaggcagctggccctgcggctggccagcctcttccctgccctcttcagcagagaaaattatggccgcctgcggctcatcaccagcagcaagcaccgctgcatggacagcagcgctgccttcctgcagggcctgtggcagcactaccaccctggcctgcccccaccagatgtggccgacatggagtttggaccacccaccgtgaatgacaagctgatgaggttctttgaccactgtgagaagttcctgacagaggtggagaagaatgccacagccctgtaccacgtggaggccttcaagacaggccctgagatgcagaacatcctgaagaaggtggccgccaccctgcaggtgcctgtgaatgacctgaatgctgacctgatccaggtggccttcttcacctgcagctttgacctggccatcaagggcgtgaagagcccctggtgtgatgtgtttgatattgatgatgccaaggtgctggagtacctgaatgacctgaagcagtactggaagaggggctacggctacaccatcaacagccgcagcagctgcaccctcttccaggacatcttccagcacctggacaaggctgtggagcagaagcagaggagccagcccatcagcagccctgtgatcctgcagtttggacatgctgagaccctgctgcccctgctgagcctgatgggctacttcaaggacaaggagcccctgacagcctacaactacaagaagcagatgcacaggaagttccgcagcggcctgattgtgccctatgccagcaacctgatctttgtgctgtaccactgtgaaaatgccaagacccccaaggagcagttccgggtgcagatgctgctgaatgagaaggtgctgcccctggcctacagccaggagaccgtgtccttctatgaggacctgaagaaccactacaaggacatcctgcagagctgccagaccagtgaagaatgtgagctggcccgggccaacagcaccagtgatgagctgtag

SEQ ID NO: 150570 - DNA, 2415 bp, Artificial Sequence
  derived and/or modified sequence
atctgcagctggctcggcgcactccactgaccgtcccgacgatgctacgcgcgcccggctgcctcctccggacctccgtagcgcctgccgcggccctggctgcggcgctgctctcgtcgcttgcgcgctgctctcttctagagccgagggacccggtggcctcgtcgctcagcccctatttcggcaccaagactcgctacgaggatgtcaaccccgtgctattgtcgggccccgaggctccgtggcgggaccctgagctgctggaggggacctgcaccccggtgcagctggtcgccctcattcgccacggcacccgctaccccacggtcaaacagatccgcaagctgaggcagctgcacgggttgctgcaggcccgcgggtccagggatggcggggctagtagtaccggcagccgcgacctgggtgcagcgctggccgactggcctttgtggtacgcggactggatggacgggcagctagtagagaagggacggcaggatatgcgacagctggcgctgcgtctggcctcgctcttcccggcccttttcagccgtgagaactacggccgcctgcggctcatcaccagttccaagcaccgctgcatggatagcagcgccgccttcctgcaggggctgtggcagcactaccaccctggcttgccgccgccggacgtcgcagatatggagtttggacctccaacagttaatgataaactaatgagattttttgatcactgtgagaagtttttaactgaagtagaaaaaaatgctacagctctttatcacgtggaagccttcaaaactggaccagaaatgcagaacattttaaaaaaagttgcagctactttgcaagtgccagtaaatgatttaaatgcagatttaattcaagtagcctttttcacctgttcatttgacctggcaattaaaggtgttaaatctccttggtgtgatgtttttgacatagatgatgcaaaggtattagaatatttaaatgatctgaaacaatattggaaaagaggatatgggtatactattaacagtcgatccagctgcaccttgtttcaggatatctttcagcacttggacaaagcagttgaacagaaacaaaggtctcagccaatttcttctccagtcatcctccagtttggtcatgcagagactcttcttccactgctttctctcatgggctacttcaaagacaaggaacccctaacagcgtacaattacaaaaaacaaatgcatcggaagttccgaagtggtctcattgtaccttatgcctcgaacctgatatttgtgctttaccactgtgaaaatgctaagactcctaaagaacaattccgagtgcagatgttattaaatgaaaaggtgttacctttggcttactcacaagaaactgtttcattttatgaagatctgaagaaccactacaaggacatccttcagagttgtcaaaccagtgaagaatgtgaattagcaagggctaacagtacatctgatgaactatgagtaactgaagaacatttttaattctttaggaatctgcaatgagtgattacatgcttgtaataggtaggcaattccttgattacaggaagcttttatattacttgagtatttctgtcttttcacagaaaaacattgggtttctctctgggtttggacatgaaatgtaagaaaagatttttcactggagcagctctcttaaggagaaacaaatctatttagagaaacagctggccctgcaaatgtttacagaaatgaaattcttcctacttatataagaaatctcacactgagatagaattgtgatttcataataacacttgaaaagtgctggagtaacaaaatatctcagttggaccatccttaacttgattgaactgtctaggaactttacagattgttctgcagttctctcttcttttcctcaggtaggacagctctagcattttcttaatcaggaatattgtggtaagctgggagtatcactctggaagaaagtaacatctccagatgagaatttgaaacaagaaacagagtgttgtaaaaggacaccttcactgaagcaagtcggaaagtacaatgaaaataaatatttttggtatttatttatgaaatatttgaacattttttcaataattcctttttacttctaggaagtctcaaaagaccatcttaaattattatatgtttggacaattagcaacaagtcagatagttagaatcgaagtttttcaaatccattgcttagctaactttttcattctgtcacttggcttcgatttttatattttcctattatatgaaatgtatcttttggttgtttgatttttctttctttctttgtaaatagttctgagttctgtcaaatgccgtgaaagtatttgctataataaagaaaattcttgtgacttta

SEQ ID NO: 150571 - DNA, 1713 bp, Artificial Sequence
  derived and/or modified sequence
atctgcagctggctcggcgcactccactgaccgtcccgactggcctttgtggtacgcggactggatggacgggcagctagtagagaagggacggcaggatatgcgacagctggcgctgcgtctggcctcgctcttcccggcccttttcagccgtgagaactacggccgcctgcggctcatcaccagttccaagcaccgctgcatggatagcagcgccgccttcctgcaggggctgtggcagcactaccaccctggcttgccgccgccggacgtcgcagatatggagtttggacctccaacagttaatgataaactaatgagattttttgatcactgtgagaagtttttaactgaagtagaaaaaaatgctacagctctttatcacgtggaagccttcaaaactggaccagaaatgcagaacattttaaaaaaagttgcagctactttgcaagtgccagtaaatgatttaaatgcagatttaattcaagtagcctttttcacctgttcatttgacctggcaattaaaggtgttaaatctccttggtgtgatgtttttgacatagatgatgcaaaggtattagaatatttaaatgatctgaaacaatattggaaaagaggatatgggtatactattaacagtcgatccagctgcaccttgtttcaggatatctttcagcacttggacaaagcagttgaacagaaacaaaggtctcagccaatttcttctccagtcatcctccagtttggtcatgcagagactcttcttccactgctttctctcatgggctacttcaaagacaaggaacccctaacagcgtacaattacaaaaaacaaatgcatcggaagttccgaagtggtctcattgtaccttatgcctcgaacctgatatttgtgctttaccactgtgaaaatgctaagactcctaaagaacaattccgagtgcagatgttattaaatgaaaaggtgttacctttggcttactcacaagaaactgtttcattttatgaagatctgaagaaccactacaaggacatccttcagagttgtcaaaccagtgaagaatgtgaattagcaagggctaacagtacatctgatgaactatgagtaactgaagaacatttttaattctttaggaatctgcaatgagtgattacatgcttgtaataggtaggcaattccttgattacaggaagcttttatattacttgagtatttctgtcttttcacagaaaaacattgggtttctctctgggtttggacatgaaatgtaagaaaagatttttcactggagcagctctcttaaggagaaacaaatctatttagagaaacagctggccctgcaaatgtttacagaaatgaaattcttcctacttatataagaaatctcacactgagatagaattgtgatttcataataacacttgaaaagtgctggagtaacaaaatatctcagttggaccatccttaacttgattgaactgtctaggaactttacagattgttctgcagttctctcttcttttcctcaggtaggacagctctagcattttcttaatcaggaatattgtggtaagctgggagtatcactctggaagaaagtaacatctccagatgagaatttgaaacaagaaacagagtgttgtaaaaggacaccttcactgaagcaagtcggaaagtacaatgaaaataaatatttttggtatttatttatg

SEQ ID NO: 150572 - DNA, 1464 bp, Artificial Sequence
  derived and/or modified sequence
atgctgcgggcccccggctgcctgctgcggaccagcgtggcccccgctgccgccctggctgctgcgctactcagttcactcgctagatgctcgcttctggaacctagggatcccgtcgctagcagtctgagcccctatttcgggaccaagacccggtatgaggatgtgaacccagtgttgctgtccgggccagaggccccctggcgcgaccctgagctgttagaagggacatgcacaccagttcaactcgtcgctttgattcggcatggaacacggtatcccacagtgaaacagatccggaaactgcgccaactccacgggctgctccaagcaaggggcagtcgtgacggaggtgcttcttccaccgggagtcgggacctgggcgcggcattggccgactggcctctctggtacgccgattggatggatggccagttggtcgaaaaaggtagacaagacatgaggcaattggccctgcggctggcctccctcttccccgccttatttagccgggagaattatgggcgcctccgactgatcacatcatcaaagcacagatgtatggactcttctgccgcttttcttcaggggctgtggcagcactatcaccctggcttgccccctcctgatgtagccgatatggaatttggcccccccaccgtgaacgacaagctcatgcggtttttcgaccattgtgaaaagttcctgacagaggtcgaaaaaaatgctacggctttgtaccatgttgaggcatttaaaaccggccccgaaatgcaaaatatcctgaagaaggtggctgcaacactccaggtgcccgtgaatgacttgaacgctgacttaatccaggtcgcgtttttcacttgcagttttgacttggccatcaagggggttaaaagcccctggtgtgatgtgtttgacattgacgatgccaaggtgctggagtatctgaacgaccttaagcagtactggaaacgtggctatggctatactattaactcacgctcctcttgcacccttttccaggatatcttccagcacctcgataaggcagtggagcaaaagcagcgtagccagcctatcagttcccctgtgatacttcagttcgggcatgcagagacgctgttgccgctgctgagcttgatgggttactttaaggataaggagccacttaccgcttataattataagaaacagatgcatagaaagttccgctccggcttaatagtcccgtacgcaagtaacctgatcttcgtcctctaccactgtgagaatgcgaagacccccaaggaacagtttcgggtccagatgctcctgaacgaaaaggtcctccccctggcttactctcaagaaaccgttagcttttatgaagacctgaaaaaccactataaggacattctccagtcttgccagacctccgaagagtgcgaactggcccgcgcaaactccaccagcgacgaactgtag

SEQ ID NO: 150573 - DNA, 1041 bp, Artificial Sequence
  derived and/or modified sequence
atggacggccagctggtggagaagggccggcaggacatgcggcagctggctctgcgactggcatcgctgttccccgcattgttttctcgcgagaactacggccgattgcgcttgattacttcctcgaaacaccgctgcatggacagttcagccgcttttctgcaaggcctgtggcagcattatcaccccggactgccaccacctgacgtcgcagacatggaatttggacctccaaccgtgaatgataaactgatgagattcttcgaccattgtgaaaagttcctgacagaggtcgaaaaaaacgccaccgctctgtaccatgtagaagccttcaagaccgggcctgaaatgcaaaatattcttaagaaggtggctgctaccctacaggttcccgtcaatgacctgaacgccgatttgatccaagtggccttttttacatgctcatttgacctcgcgatcaagggagttaaaagcccttggtgcgacgtcttcgacatcgacgacgccaaagtgctggagtatctgaacgacctgaagcaatattggaagaggggctacgggtatactatcaattcacgcagctcatgtacactgttccaggatatctttcagcatctagacaaagctgtggagcagaaacagcgatctcaaccaatctcatcccctgttatcctccagtttggacatgccgagactctgctgccccttctcagcctcatggggtactttaaggacaaagaaccgctgacagcttacaattacaaaaaacaaatgcatcgcaagttcaggtccggcctgatcgtcccttacgcatcgaacctgatcttcgtgctgtaccattgcgagaatgccaaaacgcctaaagaacagtttcgcgtacagatgctgttgaacgagaaggtgctcccactggcgtacagccaggaaacagtgagcttttacgaggatcttaagaatcactataaagacatcctccagagttgccaaacaagcgaggaatgtgaactcgcccgcgctaattccacatccgacgaactctag

SEQ ID NO: 150574 - DNA, 1464 bp, Artificial Sequence
  derived and/or modified sequence
atgctgcgggcacccggttgtctactcagaacgtcggtagcccctgctgccgcactcgcagccgcactcctgagctcacttgcccgatgttctttgctggaaccccgagatccagtggctagcagtttgagtccttatttcgggactaagactcgttacgaagatgtgaatccggtcctgttgtccggccctgaggccccttggcgcgaccccgaacttctggaggggacttgcactccggttcaattggttgcattgatccgtcatggcacgcggtatccaaccgtcaaacaaatccgcaagctgcggcaattgcacgggttactgcaggcccgtggctccagggacggtggggcttccagcaccggaagtagggacctaggggcagctctggcagactggcctctgtggtacgcagattggatggacggacagttagtggagaaaggtagacaggacatgcgccagctggcccttaggctggctagcctatttcctgcgctgttctcaagggaaaactatggcaggctgcgcctgatcacctcatccaagcaccgatgcatggactcaagcgcagcgttcctgcaggggctctggcaacattaccatcctgggctgccaccacccgatgtcgcagacatggaattcggaccacccacggtcaacgataaactgatgcggtttttcgatcattgtgagaagtttctgacggaggtggagaagaacgccacagccctgtaccacgtggaggccttcaagaccgggcctgaaatgcagaatattctgaagaaggtcgctgcaacattgcaagtacccgtcaatgatcttaacgctgatctgattcaagtggcattctttacctgttcgttcgatctggcgataaaaggagtcaagtctccttggtgcgacgtgttcgacatcgacgacgccaaagtattggagtatttgaacgaccttaagcagtactggaagcgaggatacggatacaccattaatagtaggtcctcctgtactctgtttcaagatattttccagcatctcgataaggctgtcgaacaaaaacagagaagccaaccaatctcatcacctgtgattctccagtttggacatgctgagacactgctgccactgctctcccttatgggctactttaaagataaggaacccctgactgcttacaactataaaaaacagatgcaccggaagtttcgtagcgggcttattgtgccctatgcatccaatttaatctttgtcttgtatcattgcgagaacgcgaagacacctaaggagcagttcagagtacaaatgctgcttaatgaaaaggtactgcctctcgcctactcccaagagaccgtgagtttttacgaggacctgaagaatcattacaaagatatcttacaaagttgccaaacctctgaggagtgcgaactcgcacgcgcaaactctacatctgatgagctgtag

SEQ ID NO: 150575 - DNA, 1041 bp, Artificial Sequence
  derived and/or modified sequence
atggatggacagctcgtcgagaaggggcgacaggatatgaggcagctggccctgcggctggcatcgctctttcccgctcttttttccagagaaaactacgggaggttgagactgatcactagcagcaaacatcgttgcatggatagcagtgcagcattccttcaggggctgtggcagcattatcaccctgggctgccccctcccgatgtcgcggatatggaattcgggcctccaacagtcaacgacaaactgatgcgatttttcgatcactgcgaaaagttcctgaccgaggtcgagaagaacgctacggccctgtatcatgttgaggcgttcaagaccggacccgagatgcagaatatactcaaaaaagtcgctgctactctacaggtccctgtcaatgacctcaatgctgatcttattcaagtcgccttctttacgtgctcattcgatctggctataaagggcgtgaagagtccgtggtgtgacgtgtttgacattgacgatgccaaagtgcttgagtacttgaacgacctgaagcagtattggaaaagggggtacggatataccattaattctcggagttcctgtacactgttccaggacattttccagcacctcgacaaggccgtggaacagaagcagaggtcacagccaatctctagcccagtaatcctacaatttggccacgctgaaacattgctgcccctcctctctctgatggggtacttcaaggacaaggaaccattgacagcttataactacaaaaaacaaatgcacaggaagttccggagtggcttgatcgtgccatacgcgtctaacctgatcttcgtgctgtaccattgtgaaaacgccaagacccccaaggaacagtttcgtgtgcaaatgctgctgaatgagaaagtgctgcccctggcatactcccaggagactgtgagcttctacgaggacctcaagaatcactataaggacatcctgcagtcctgtcagacatccgaggagtgtgaactggccagagccaatagtacttctgatgagctttag

SEQ ID NO: 150576 - DNA, 1464 bp, Artificial Sequence
  derived and/or modified sequence
atgctgagagcccccggctgcctgctgagaaccagcgtggcccccgccgccgccctggccgccgccctgctgagcagcctggccagatgcagcctgctggagcccagagaccccgtggccagcagcctgagcccctacttcggcaccaagaccagatacgaggacgtgaaccccgtgctgctgagcggccccgaggccccctggagagaccccgagctgctggagggcacctgcacccccgtgcagctggtggccctgatcagacacggcaccagataccccaccgtgaagcagatcagaaagctgagacagctgcacggcctgctgcaggccagaggcagcagagacggcggcgccagcagcaccggcagcagagacctgggcgccgccctggccgactggcccctgtggtacgccgactggatggacggccagctggtggagaagggcagacaggacatgagacagctggccctgagactggccagcctgttccccgccctgttcagcagagagaactacggcagactgagactgatcaccagcagcaagcacagatgcatggacagcagcgccgccttcctgcagggcctgtggcagcactaccaccccggcctgcccccccccgacgtggccgacatggagttcggcccccccaccgtgaacgacaagctgatgagattcttcgaccactgcgagaagttcctgaccgaggtggagaagaacgccaccgccctgtaccacgtggaggccttcaagaccggccccgagatgcagaacatcctgaagaaggtggccgccaccctgcaggtgcccgtgaacgacctgaacgccgacctgatccaggtggccttcttcacctgcagcttcgacctggccatcaagggcgtgaagagcccctggtgcgacgtgttcgacatcgacgacgccaaggtgctggagtacctgaacgacctgaagcagtactggaagagaggctacggctacaccatcaacagcagaagcagctgcaccctgttccaggacatcttccagcacctggacaaggccgtggagcagaagcagagaagccagcccatcagcagccccgtgatcctgcagttcggccacgccgagaccctgctgcccctgctgagcctgatgggctacttcaaggacaaggagcccctgaccgcctacaactacaagaagcagatgcacagaaagttcagaagcggcctgatcgtgccctacgccagcaacctgatcttcgtgctgtaccactgcgagaacgccaagacccccaaggagcagttcagagtgcagatgctgctgaacgagaaggtgctgcccctggcctacagccaggagaccgtgagcttctacgaggacctgaagaaccactacaaggacatcctgcagagctgccagaccagcgaggagtgcgagctggccagagccaacagcaccagcgacgagctgtag

SEQ ID NO: 150577 - DNA, 1041 bp, Artificial Sequence
  derived and/or modified sequence
atggacggccagctggtggagaagggcagacaggacatgagacagctggccctgagactggccagcctgttccccgccctgttcagcagagagaactacggcagactgagactgatcaccagcagcaagcacagatgcatggacagcagcgccgccttcctgcagggcctgtggcagcactaccaccccggcctgcccccccccgacgtggccgacatggagttcggcccccccaccgtgaacgacaagctgatgagattcttcgaccactgcgagaagttcctgaccgaggtggagaagaacgccaccgccctgtaccacgtggaggccttcaagaccggccccgagatgcagaacatcctgaagaaggtggccgccaccctgcaggtgcccgtgaacgacctgaacgccgacctgatccaggtggccttcttcacctgcagcttcgacctggccatcaagggcgtgaagagcccctggtgcgacgtgttcgacatcgacgacgccaaggtgctggagtacctgaacgacctgaagcagtactggaagagaggctacggctacaccatcaacagcagaagcagctgcaccctgttccaggacatcttccagcacctggacaaggccgtggagcagaagcagagaagccagcccatcagcagccccgtgatcctgcagttcggccacgccgagaccctgctgcccctgctgagcctgatgggctacttcaaggacaaggagcccctgaccgcctacaactacaagaagcagatgcacagaaagttcagaagcggcctgatcgtgccctacgccagcaacctgatcttcgtgctgtaccactgcgagaacgccaagacccccaaggagcagttcagagtgcagatgctgctgaacgagaaggtgctgcccctggcctacagccaggagaccgtgagcttctacgaggacctgaagaaccactacaaggacatcctgcagagctgccagaccagcgaggagtgcgagctggccagagccaacagcaccagcgacgagctgtag

SEQ ID NO: 150578 - protein, 846 aa, Artificial Sequence
  derived and/or modified sequence
MLFTVSCSKMSSIVDRDDSSIFDGLVEEDDKDKAKRVSRNKSEKKRRDQFNVLIKELGSMLPGNARKMDKSTVLQKSIDFLRKHKEITAQSDASEIRQDWKPTFLSNEEFTQLMLEALDGFFLAIMTDGSIIYVSESVTSLLEHLPSDLVDQSIFNFIPEGEHSEVYKILSTHLLESDSLTPEYLKSKNQLEFCCHMLRGTIDPKEPSTYEYVKFIGNFKSLNSVSSSAHNGFEGTIQRTHRPSYEDRVCFVATVRLATPQFIKEMCTVEEPNEEFTSRHSLEWKFLFLDHRAPPIIGYLPFEVLGTSGYDYYHVDDLENLAKCHEHLMQYGKGKSCYYRFLTKGQQWIWLQTHYYITYHQWNSRPEFIVCTHTVVSYAEVRAERRRELGIEESLPETAADKSQDSGSDNRINTVSLKEALERFDHSPTPSASSRSSRKSSHTAVSDPSSTPTKIPTDTSTPPRQHLPAHEKMVQRRSSFSSQSINSQSVGSSLTQPVMSQATNLPIPQGMSQFQFSAQLGAMQHLKDQLEQRTRMIEANIHRQQEELRKIQEQLQMVHGQGLQMFLQQSNPGLNFGSVQLSSGNSSNIQQLAPINMQGQVVPTNQIQSGMNTGHIGTTQHMIQQQTLQSTSTQSQQNVLSGHSQQTSLPSQTQSTLTAPLYNTMVISQPAAGSMVQIPSSMPQNSTQSAAVTTFTQDRQIRFSQGQQLVTKLVTAPVACGAVMVPSTMLMGQVVTAYPTFATQQQQSQTLSVTQQQQQQSSQEQQLTSVQQPSQAQLTQPPQQFLQTSRLLHGNPSTQLILSAAFPLQQSTFPQSHHQQHQSQQQQQLSRHRTDSLPDPSKVQPQ

SEQ ID NO: 150579 - DNA, 5801 bp, Artificial Sequence
  derived and/or modified sequence
gagcgagagcgcgaaggaaatctggccgccgccgccgcgagcgctcccgaatttttacttgttcctgcaaagctgctggagctcagaagctgattctatcacattgtaagatgcctttggataattctacagtcctcttaaatgaatctttagaacttggcaagtctcactagataccttcaatcatcattttgagctcaaagaattctgagacttatggttggtcatatagaagagtaccttgaacctatagtttcctgaagaatcagtttaaaagatccaaggagtacaaaaggagaagtacaaatgtctactacaagacgaaaacgtagtatgttatgttgtttaccgtaagctgtagtaaaatgagctcgattgttgacagagatgacagtagtatttttgatgggttggtggaagaagatgacaaggacaaagcgaaaagagtatctagaaacaaatctgaaaagaaacgtagagatcaatttaatgttctcattaaagaactgggatccatgcttcctggtaatgctagaaagatggacaaatctactgttctgcagaaaagcattgattttttacgaaaacataaagaaatcactgcacagtcagatgctagtgaaattcgacaggactggaaacctacattccttagtaatgaagagtttacacaattaatgttagaggctcttgatggtttttttttagcaatcatgacagatggaagcataatatatgtgtctgagagtgtaacttcattacttgaacatttaccatctgatcttgtggatcaaagtatatttaattttatcccagaaggggaacattcagaggtttataaaatactctctactcatctgctggaaagtgattcattaaccccagaatatttaaaatcaaaaaatcagttagaattctgttgtcacatgctgcgaggaacaatagacccaaaggagccatctacctatgaatatgtaaaatttataggaaatttcaaatctttaaacagtgtatcctcttcagcacacaatggttttgaaggaactatacaacgcacacataggccatcttatgaagatagagtttgttttgtagctactgtcaggttagctacacctcagttcatcaaggaaatgtgcactgttgaagaacccaatgaagagtttacatctagacatagtttagaatggaagtttctgtttctagatcacagggcaccacccataatagggtatttgccatttgaagttctgggaacatcaggctatgattactatcatgtggatgacctagaaaatttggcaaaatgtcatgagcacttaatgcaatatgggaaaggcaaatcatgttattataggttcctgactaaggggcaacagtggatttggcttcagactcattattatatcacttaccatcagtggaattcaaggccagagtttattgtttgtactcacactgtagtaagttatgcagaagttagggctgaaagacgacgagaacttggcattgaagagtctcttcctgagacagctgctgacaaaagccaagattctgggtcagataatcgtataaacacagtcagtctcaaggaagcattggaaaggtttgatcacagcccaaccccttctgcctcttctcggagttcaagaaaatcatctcacacggccgtctcagacccttcctcaacaccaaccaagatcccgacggatacgagcactccacccaggcagcatttaccagctcatgagaagatggtgcaaagaaggtcatcatttagtagtcagtccataaattcccagtctgttggttcatcattaacacagccagtgatgtctcaagctacaaatttaccaattccacaaggcatgtcccagtttcagttttcagctcaattaggagccatgcaacatctgaaagaccaattggaacaacggacacgcatgatagaagcaaatattcatcggcaacaagaagaactaagaaaaattcaagaacaacttcagatggtccatggtcaggggctgcagatgtttttgcaacaatcaaatcctgggttgaattttggttccgttcaactttcttctggaaattcatctaacatccagcaacttgcacctataaatatgcaaggccaagttgttcctactaaccagattcaaagtggaatgaatactggacacattggcacaactcagcacatgatacaacaacagactttacagagtacatcaactcagagtcaacaaaatgtactgagtgggcacagtcagcaaacatctctacccagtcagacacagagcactcttacagccccactgtataacactatggtgatttctcagcctgcagccggaagcatggtccagattccatctagtatgccacaaaacagcacccagagtgctgcagtaactacattcactcaggacaggcagataagattttctcaaggtcaacaacttgtgaccaaattagtgactgctcctgtagcttgtggggcagtcatggtacctagtactatgcttatgggccaggtggtgactgcatatcctacttttgctacacaacagcaacagtcacagacattgtcagtaacgcagcagcagcagcagcagagctcccaggagcagcagctcacttcagttcagcaaccatctcaggctcagctgacccagccaccgcaacaatttttacagacttctaggttgctccatgggaatccctcaactcaactcattctctctgctgcatttcctctacaacagagcaccttccctcagtcacatcaccagcaacatcagtctcagcaacagcagcaactcagccggcacaggactgacagcttgcccgacccttccaaggttcaaccacagtagcacacgtgcttcctctcttgacatcaagggaggaaggggatggcccattaagagttactcagatgacctgaggaaaggagggaaagttccagcagtttcatgagatgcagtattgagtgttctagttcctggaattagttggcagagaaaatgctgcctagtgctacagatgtacattaaataccagccagcaggaggtgatcataggggcatagccagttctgacagtgttttaggtgcctggatattttttgatggaaaaagaatatattgccaaatattaagaagctcagctatgaaatgacctccagggaatcagaaaggcactaatgatgttagtaacttttagtggttctgtgcctcttatcaagtgttacagaggacataccactgccatgtcaggggtttgcttacagtgatgccatgaagacagtccagtagacttggtagcgaccccctcccccaacccctctcccttttcagataatgatggaacagtaattactttcagaatgttgtgtgggttcaaattctctatgtacagatgatgtaaaaatatgtatatgtctagataaaaggagagaaagcaaaacattttgtatgctgcatgaaagcgttatctcttccttacaggtgtgagcacctttcctgaaattctgacaccatgtgcaaactgatccatcctgtttttccttttgtttacaacacagtagtgttctgttcacttttccggggcacaagtttttttgttcatactttggctgtgatgtcacagtttgttcagtgaggtatgatgtgctgctgggaatggattttttttttcaggttaaattattgatacaacaggattttcaagttattcagaaatatccctcatttcattatttttcaattatgtttgaaaataggatttgcactgctttattttaggtggctgggagttttgattgcatattttgttatagttcatagttggaaatatttgcgtaaatggttttcaacaagcctgaaagtaatttcaagaatgtttcagttatagaggtaaaatttgcacacaaaacatcttaggcactttttaacattctcaatcatgggaattttaacttttgggatttgttgaaatcttttttattatccttcacaatttcaatgcttcttttagtcagaaatgattcagggttatttgaggggaaaaaaccccatagtgccttgattttaattcaggtgataactcaccatcttgaagtcattgtccggtttccgtagcagttttgaaaccttagtacctttttaacagcatgtgggtgtcagtgtcattattagtctcctaataagttcctctgaagactgctatcagtctcttggactggaggtacaaataatttagaaataaaagatgataacctaacactatcatagttattaatgtgatcctaaaattgtttcctaaatcagcatttttctttagtcatttaagaatttaccagaaatatttgctcaatatgatcttgatattcctacaaagaaaaaagaaggggtagggatttggctatgccttcactacaacattagaatattgtaactcacatgccttctaaacgtgaactaagatttcctttggcaatatcatattctaaaagtaataaattccaatacaagttacatacatttaaaaaacattttacagattttatggtactaatgaaatttacagtgatagaacaaaagaggattagtagaaaatacattattagaatataaaaaatgttattactgaggaaagggaggagaggacaagtgtaataaatcaaaattgacctcaaaagaaaatgtgtaacagagttgaggttgttaaaacagaaaaggttctgaataatgaagattaacctaatgcagaattgctaggtaaagaggtcaggggaatgctaagccagttcttaagacttctctgtcctctgctttgctgttatccttaaggcatatactttgtctttctgcagaaaattctacctggctacaattactttgaacattaatgttgaaaaagaaaacaaccaaagaaaattggtacttacccttctacaaaagaagtgtgactagatatcaatcagtaattaacatatcaaggagctcttctagctaaatgaccatccagtagagatttcccacattcccatgaatatcaagaatagttgtcagaatatgtatgtacctgagcatatgtacacagacaagggggatgttgtggaatatggcaatagcattgttcttctcccctttcaaattgcctttcttgaccttatgccattccatatatatctgagttgtgcctcatttatttattggcaatacctagtgatacggatttagctaacaaaagatatgaagaactattatattgaggcctgtcctctacataccacacttaaaagatggtgaactgtgagtactacttaggttgacagcaacaaagcataagacaagccccaggtaaacgtctaaactgtttactcacattgtcctactccagccccttcaattatttcccatctccacaaatagtcgggggaaaaaattaaaattttcctttatgattcttactgttcttcgcagctcatcttttcctgcttagaattaaccattgctaatttaaaggagcagctagctgcttttctgtcagtctgaagcgtagtagtggaagaggtagtaagcaccagctgcctctttgctgctttgttttcctcctgattctcttaaatttgggttgcaaagctatcccgccccccaccctgccccatgaaacttgagcattcaaatgaagattcagcagtgtctgttcttcatttctatagccaaagctgttagttaaaatcccaaatctatagcatttaaagataccaaatagaaacaccttccagcttt

SEQ ID NO: 150580 - DNA, 2541 bp, Artificial Sequence
  derived and/or modified sequence
atgctgttcacagtcagttgttctaaaatgtccagtatagtggacagggatgacagttcaatctttgacggcctggttgaggaggatgataaagacaaggcgaaaagagtctcccgcaataagtccgaaaaaaagaggcgtgaccagttcaatgtgctgatcaaagaattaggctctatgctgcctggcaacgcccgcaaaatggacaaatcaactgtgctacaaaaaagcattgacttccttagaaagcacaaagaaataactgcccagagtgacgccagcgaaatacgacaagactggaagcccacatttctcagcaacgaggaatttacgcagctgatgttggaggctctagatgggttttttctagccatcatgactgacgggagcattatctacgtgtccgagagcgttacgagccttcttgagcacttgccctccgatttggttgatcagagcatcttcaactttattcctgaaggcgagcatagcgaggtctataagattctttccacccacttgctggagtccgactccttgacgcccgagtatctcaagtcaaagaatcagctggagttttgctgtcatatgctgcggggcactattgaccccaaagaaccgtccacttatgaatacgtcaagtttatcgggaacttcaaatcactgaacagtgtcagcagtagcgctcataacggctttgaagggacaatccagcggacacaccggccctcctacgaggatagggtctgcttcgtggccaccgtgagactggcaacacctcaattcatcaaggaaatgtgcactgtcgaagagcccaacgaggagtttacctctcggcatagcctcgagtggaaattcttgtttttagatcatagggctccccccatcattggctacctcccattcgaggtcttgggcactagcggatatgactactaccacgtcgacgacttagagaacctcgccaagtgtcatgaacatctgatgcaatacgggaaggggaagagctgctattaccggtttctgactaagggccagcagtggatctggctgcagacccactactacatcacttatcatcagtggaactccaggccggaattcatcgtgtgcacacacactgttgtgagctatgcagaagtgcgagcagaaaggcggagggagctcggcatcgaagaatccctgcccgagactgccgcagataaatcccaggatagcggtagcgataaccgaatcaacacggtctctctcaaagaagcattggaacgatttgatcatagtcctaccccatccgcctcttctcgatcctccagaaaaagttcacacacagccgtgagtgatccctccagcacccctaccaaaatccctactgatacttccacaccccctagacagcatctcccagctcacgagaaaatggtccagagacgaagctccttcagcagtcagtctatcaatagccaatctgtgggttcgtccctgacccagcctgttatgagccaggcgacgaatctgcccattccccagggtatgtctcagtttcagttctcagctcaactgggcgctatgcaacaccttaaggaccagctggaacagagaacccgcatgatcgaagccaatattcatcggcagcaagaagaactgaggaaaattcaggagcagctgcagatggtccacgggcaaggcctgcagatgttcctgcagcagtccaacccaggcctcaattttggaagtgtgcagctgagcagtgggaacagctctaacattcagcagctcgccccgatcaacatgcaaggacaggtcgtgccaacaaatcagatacagtccggaatgaacacgggtcatatcgggaccacacagcacatgatccaacaacaaacattgcagagtacttctacacagagtcagcaaaacgttctaagcggtcacagtcaacagacttcattgcccagccagacccagagtaccctgacagcgccgctatataacactatggtgatcagccaacctgcagcaggctcaatggtccagataccctcatctatgccccagaactcaactcagagcgccgccgttaccactttcacacaagatcgacagattcggtttagccagggtcagcagctagtcactaagctggtaacggcccctgtagcgtgcggcgcagtgatggttccatctaccatgctcatgggccaggtcgtaacagcatatcctacattcgctacacagcagcagcaaagtcagacactgagcgtgactcagcagcagcagcaacagtcttcacaggaacagcagcttacgagtgtacagcagccatcccaggcccagctgacccagcccccacagcagtttctgcagacatctaggttgttgcacggtaatccgtcaacacaactaattctgtcggcagcatttcctttacagcagtccaccttccctcagtcccatcatcagcaacatcagagtcaacagcagcagcagttgtccagacatagaacagactccctgcccgatcccagcaaggtccagccccagtag

SEQ ID NO: 150581 - DNA, 2541 bp, Artificial Sequence
  derived and/or modified sequence
atgttgtttactgtgtcgtgctccaagatgtccagcattgtggacagagacgattcttcgatatttgacgggctggtggaggaggacgataaagacaaagcgaaaagagtcagtcgcaataagtccgaaaagaaacgacgggaccagttcaatgtgttgatcaaggaactcgggtcaatgttacccggaaacgcacgaaagatggacaaatcaacggtgttgcagaagagcatcgatttcttgagaaagcacaaagagatcactgcgcagtcagacgcttccgagattaggcaggactggaaacctacattcctctctaacgaggagttcactcagctcatgctcgaggccctagatggattcttccttgcaatcatgactgatggtagcatcatctatgtcagcgaatctgtgacctccctgttggagcacctccccagcgatctcgtggatcagtcgatctttaacttcattcccgagggggagcatagcgaagtatacaagattctgtctacccatttactggaatctgactccttaactccagaatacctcaagtccaagaatcaattggaattttgttgtcacatgttgagaggaaccatcgatcctaaggagccatctacttatgagtacgtgaagttcatcgggaattttaagtcacttaatagcgtttcttccagcgctcacaacgggtttgaaggtaccatccagaggacgcatcgaccttcatatgaagacagggtctgtttcgtggcaacagttaggttggcaacaccccagttcatcaaagagatgtgcaccgtggaggaacccaatgaggaatttacaagtaggcatagtctggagtggaaattcctatttctggaccatcgggctccccctatcatcggctatttaccctttgaggtgctcggcacgtccgggtatgactactatcacgttgatgatctcgagaaccttgcgaagtgccatgaacaccttatgcagtatggaaagggaaaatcttgctattaccgcttcctgaccaaagggcagcagtggatctggctgcagactcattactacataacttatcatcagtggaatagccggcctgaattcatcgtgtgcacacacactgtggtttcctatgctgaagtgagagccgaacgacgcagagagctgggcattgaagagtccttgcccgagacagccgccgacaaatcccaagactccggtagcgataaccgaattaacaccgtgtccctcaaagaggcgctcgaacggttcgaccactcccctaccccgagtgctagcagccggagctcaagaaagagttctcatactgccgtttccgacccatcttccacacccactaagattcccacagacactagtactcctcccagacagcatctgcctgcccatgagaagatggtccagagaagaagcagcttttcttcccagtctataaacagccagagcgtcggctcttctctaacacagcccgtgatgtcacaggcaacgaacctgcctatccctcagggtatgagccagttccaattttccgcccagctgggtgccatgcaacacctgaaggaccagcttgagcagaggactcggatgattgaagctaacattcacaggcagcaggaagagcttcggaaaattcaggaacagctccaaatggtgcacggacagggactgcagatgttcctccagcagtccaatcctgggctgaattttggaagcgttcaactatcgagcggaaattccagcaacatccagcagttggctcccatcaacatgcaggggcaggtagttcccactaatcaaatccaatcaggcatgaacaccgggcacatcgggacaactcagcacatgatccaacagcaaacattgcagtcaacttctactcaaagtcaacagaatgttctcagcgggcactcccaacagacatccctgcccagccagacgcagtcgacattgacagctcccttatataacactatggttatttctcagcctgctgccggaagtatggtgcagattccctccagtatgccccagaactctacccagagtgctgctgtgaccacctttactcaggatagacaaataaggtttagccaggggcaacagctggttacaaaattggtcacagcccccgtggcatgcggagccgtcatggtgccctctactatgctcatggggcaagtcgtgacagcatacccgacattcgccactcagcaacaacagtcacagacgttgtctgtgacacaacaacagcagcagcaatctagtcaggagcaacagctgacctctgtccagcagccttctcaggctcaattaacgcaaccccctcagcaatttctgcagaccagccgactgttgcatggaaatccgtctactcaactgattctgtctgccgccttccccttacagcagtccacttttccgcagagccaccatcaacagcaccaaagccagcagcaacagcaactgtctcgtcaccggacagactcactccccgacccatccaaggtccaacctcagtag

SEQ ID NO: 150582 - DNA, 2541 bp, Artificial Sequence
  derived and/or modified sequence
atgctgttcaccgtgtcctgcagcaagatgagcagcatcgtggacagagatgacagcagcatctttgatggcctggtggaggaggatgacaaggacaaggccaagagggtgtccaggaacaagtctgagaagaagaggcgggaccagttcaacgtgctgatcaaggagctgggctccatgctgcctggaaatgccaggaagatggacaagagcacagtgctgcagaagagcattgacttcctgaggaagcacaaggagatcacagcccagagtgatgccagcgagatccggcaggactggaagcccaccttcctgagcaatgaggagttcacccagctgatgctggaggccctggatggcttcttcctggccatcatgacagatggcagcatcatctacgtgtctgagagcgtgaccagcctgctggagcacctgcccagcgacctggtggaccagagcatcttcaacttcatccctgagggggagcacagcgaggtgtacaagatcctgagcacccacctgctggagagtgacagcctgaccccagagtacctgaagagcaagaaccagctggagttctgctgccacatgctgcggggcaccatcgaccccaaggagcccagcacctatgaatatgtgaagttcatcggcaacttcaagagcctgaacagcgtgagcagcagcgcccacaatggatttgagggcaccatccagaggacccaccggcccagctatgaggacagagtgtgctttgtggccaccgtgcggctggccaccccccagttcatcaaggagatgtgcaccgtggaggagcccaatgaggagttcaccagccgccacagcctggagtggaagttcctgttcctggaccaccgggccccacccatcatcggctacctgccctttgaggtgctgggcaccagcggctatgactactaccacgtggatgacctggagaacctggccaagtgccacgagcacctgatgcagtatggcaagggcaagagctgctactaccgcttcctgaccaagggccagcagtggatctggctgcagacccactactacatcacctaccaccagtggaacagcaggcctgagttcatcgtgtgcacccacacagtggtgtcctatgcagaggtgcgggcagagcggcggcgggagctgggcatcgaggagagcctgcctgagacagctgctgacaagagccaggacagcggcagtgacaaccgcatcaacacagtgtccctgaaggaggccctggagagatttgaccacagccccaccccatctgccagcagccgcagcagcaggaagagcagccacacagctgtgtctgaccccagcagcacccccaccaagatccccacagacaccagcaccccaccccggcagcacctgcctgcccacgagaagatggtgcagaggaggagcagcttcagcagccagagcatcaacagccagagcgtgggcagcagcctgacccagcctgtgatgagccaggccaccaacctgcccatcccccagggcatgagccagttccagttcagcgcccagctgggcgccatgcagcacctgaaggaccagctggagcagaggaccaggatgattgaggccaacatccaccggcagcaggaggagctgaggaagatccaggagcagctgcagatggtgcacggccagggcctgcagatgttcctgcagcagagcaaccctggcctgaactttggatctgtgcagctgagcagcggcaacagcagcaacatccagcagctggcccccatcaacatgcagggccaggtggtgcccaccaaccagatccagagcggcatgaacacaggccacatcggcaccacccagcacatgatccagcagcagaccctgcagagcaccagcacccagagccagcagaatgtgctgagcggccacagccagcagaccagcctgcccagccagacccagagcaccctgacagcccccctgtacaacaccatggtgatcagccagcctgctgctggctccatggtgcagatccccagctccatgccccagaacagcacccagagcgctgctgtgaccaccttcacccaggaccggcagatccgcttcagccagggccagcagctggtgaccaagctggtgacagcccctgtggcctgtggggctgtgatggtgcccagcaccatgctgatgggccaggtggtgacagcctaccccacctttgccacccagcagcagcagagccagaccctgtctgtgacccagcagcagcagcagcagagcagccaggagcagcagctgacctctgtgcagcagcccagccaggcccagctgacccagcccccccagcagttcctgcagaccagccggctgctgcacggcaaccccagcacccagctgatcctgtctgctgccttccccctgcagcagagcaccttcccccagagccaccaccagcagcaccagagccagcagcagcagcagctgagccgccacaggacagacagcctgcctgaccccagcaaggtgcagccccagtag

SEQ ID NO: 150583 - DNA, 4059 bp, Artificial Sequence
  derived and/or modified sequence
gtctgactccagcgaccgcgcgcgggttcgagggttggcggcgaggcgctcggtttctcttcttccgtccacccgcgcttcccgttccccgtcaccgccgctggcgtttgtagatttctttccgccagtgaagctgggttttctggagttggctctggcgctctggcccctggagtgtaatttcctacacgcagcgccgcagagtttatattctttgaaagtgtttgtagctttgtagaggtcctcttgttgatggtaggtgagcctaattctgcaagataaaagcctagtctctgacctggcagatgaaagatcaaatcagattgtggtttcctgctattagaatgccgtgctattagactttaaggctttttagccttctttaaaaaataaaaaaatttttacagtggaagaaaagcacaagaagtaaacttttacagtcgttgatttgactataacgctgatccccccaaatcaaagaatttttacttgttcctgcaaagctgctggagctcagaagctgattctatcacattgtaagatgcctttggataattctacagtcctcttaaatgaatctttagaacttggcaagtctcactagataccttcaatcatcattttgagctcaaagaattctgagacttatggttggtcatatagaagagtaccttgaacctatagtttcctgaagaatcagtttaaaagatccaaggagtacaaaaggcagttattggaggaattactcaacaaaaataaagaagtaaactaaaaaagatgaaggcataggatacaagtaacagggaatatgacctaactagagacccagggaatcaccaggatgatgatgaataatgatcacaagaagacagcttgtcctcaggagaagtacaaatgtctactacaagacgaaaacgtagtatgttatgttgtttaccgtaagctgtagtaaaatgagctcgattgttgacagagatgacagtagtatttttgatgggttggtggaagaagatgacaaggacaaagcgaaaagagtatctagaaacaaatctgaaaagaaacgtagagatcaatttaatgttctcattaaagaactgggatccatgcttcctggtaatgctagaaagatggacaaatctactgttctgcagaaaagcattgattttttacgaaaacataaagaaatcactgcacagtcagatgctagtgaaattcgacaggactggaaacctacattccttagtaatgaagagtttacacaattaatgttagaggctcttgatggtttttttttagcaatcatgacagatggaagcataatatatgtgtctgagagtgtaacttcattacttgaacatttaccatctgatcttgtggatcaaagtatatttaattttatcccagaaggggaacattcagaggtttataaaatactctctactcatctgctggaaagtgattcattaaccccagaatatttaaaatcaaaaaatcagttagaattctgttgtcacatgctgcgaggaacaatagacccaaaggagccatctacctatgaatatgtaaaatttataggaaatttcaaatctttaaacagtgtatcctcttcagcacacaatggttttgaaggaactatacaacgcacacataggccatcttatgaagatagagtttgttttgtagctactgtcaggttagctacacctcagttcatcaaggaaatgtgcactgttgaagaacccaatgaagagtttacatctagacatagtttagaatggaagtttctgtttctagatcacagggcaccacccataatagggtatttgccatttgaagttctgggaacatcaggctatgattactatcatgtggatgacctagaaaatttggcaaaatgtcatgagcacttaatgcaatatgggaaaggcaaatcatgttattataggttcctgactaaggggcaacagtggatttggcttcagactcattattatatcacttaccatcagtggaattcaaggccagagtttattgtttgtactcacactgtagtaagttatgcagaagttagggctgaaagacgacgagaacttggcattgaagagtctcttcctgagacagctgctgacaaaagccaagattctgggtcagataatcgtataaacacagtcagtctcaaggaagcattggaaaggtttgatcacagcccaaccccttctgcctcttctcggagttcaagaaaatcatctcacacggccgtctcagacccttcctcaacaccaaccaagatcccgacggatacgagcactccacccaggcagcatttaccagctcatgagaagatggtgcaaagaaggtcatcatttagtagtcagtccataaattcccagtctgttggttcatcattaacacagccagtgatgtctcaagctacaaatttaccaattccacaaggcatgtcccagtttcagttttcagctcaattaggagccatgcaacatctgaaagaccaattggaacaacggacacgcatgatagaagcaaatattcatcggcaacaagaagaactaagaaaaattcaagaacaacttcagatggtccatggtcaggggctgcagatgtttttgcaacaatcaaatcctgggttgaattttggttccgttcaactttcttctggaaattcatctaatatccagcaacttgcacctataaatatgcaaggccaagttgttcctactaaccagattcaaagtggaatgaatactggacacattggcacaactcagcacatgatacaacaacagactttacagagtacatcaactcagagtcaacaaaatgtactgagtgggcacagtcagcaaacatctctacccagtcagacacagagcactcttacagccccactgtataacactatggtgatttctcagcctgcagccggaagcatggtccagattccatctagtatgccacaaaacagcacccagagtgctgcagtaactacattcactcaggacaggcagataagattttctcaaggtcaacaacttgtgaccaaattagtgactgctcctgtagcttgtggggcagtcatggtacctagtactatgcttatgggccaggtggtgactgcatatcctacttttgctacacaacagcaacagtcacagacattgtcagtaacgcagcagcagcagcagcagagctcccaggagcagcagctcacttcagttcagcaaccatctcaggctcagctgacccagccaccgcaacaatttttacagacttctaggttgctccatgggaatccctcaactcaactcattctctctgctgcatttcctctacaacagagcaccttccctcagtcacatcaccagcaacatcagtctcagcaacagcagcaactcagccggcacaggactgacagcttgcccgacccttccaaggttcaaccacagtagcacacgtgcttcctctcttgacatcaagggaggaaggggatggcccattaagagttactcagatgacctgaggaaaggagggaaagttccagcagtttcatgagatgcagtattgagtgttctagttcctggaattagttggcagagaaaatgctgcctagtgctacagatgtacattaaataccagccagcaggaggtgatcataggggcatagccagttctgacagtgttttaggtgcctggatattttttgatggaaaaagaatatattgccaaatattaagaagctcagctatgaaatgacctccagggaatcagaaaggcactaatgatgttagtaacttttagtggttctgtgcctcttatcaagtgttacagaggacataccactgccatgtcaggggtttgcttacagtgatgccatgaagacagtccagtagacttggtagcgaccccctcccccaacccctctcccttttcagataatgatggaacagtaattactttcagaatgttgtgtgggttcaaattctctatgtacagatgatgtaaaaatatgtatatgtctagataaaaggagagaaagcaaaa

SEQ ID NO: 150584 - DNA, 2541 bp, Artificial Sequence
  derived and/or modified sequence
atgctgttcaccgtgagctgcagcaagatgagcagcatcgtggaccgagacgactcgagcattttcgatggactggtggaggaggatgataaagataaggcgaagcgtgtatctcgcaacaagagcgaaaagaagagacgcgaccagttcaatgtcttgatcaaagagctcgggtcaatgcttccaggaaatgccaggaagatggataaaagcactgtgctgcagaaatctattgattttttgagaaaacacaaggagattaccgctcagagtgacgcctccgaaattcgacaggattggaagccgacgttcctatccaacgaagagtttactcagttgatgctggaggccctggacggcttcttcttagccatcatgacggatgggagcataatctatgtgtccgagagcgtcacatctttactcgagcacctcccctctgacttggtcgaccaaagcatcttcaacttcattccagaaggcgagcactccgaggtgtacaagatccttagtacacacctactggagagtgattcactgacccccgaatacctgaagtccaaaaaccagctggagttctgttgtcacatgctgagagggactatcgaccctaaggagccgagcacgtatgaatatgtaaagttcattgggaattttaagtccctcaattctgttagttccagtgcccacaacgggttcgagggtaccatacagaggacccaccgcccctcctacgaggaccgagtgtgcttcgtggcgaccgttagacttgcaactcctcagttcatcaaggagatgtgtaccgtggaggaaccaaacgaggaatttacttcccggcactcgctggagtggaagttcctgtttctggaccacagggcccccccaataatcggctatttacccttcgaggtgctggggacaagtggatacgattattatcacgtggacgatctggagaatctggccaaatgtcatgaacacctgatgcagtacggtaagggcaaaagctgttactaccggtttctaaccaaaggccagcagtggatctggctacaaactcattactatatcacctaccaccagtggaacagccggccagagtttatcgtctgcactcacaccgtggtgagctacgcggaggtgcgagccgagcggcgccgtgagctgggtatcgaagagtcgctgccggaaaccgcagcggacaaaagccaggattcaggctccgataatcggataaatacagtgagtctgaaggaggctctggagagattcgaccattccccaacaccgtcagcttcttctaggagtagtaggaaaagcagccacactgccgtatcagacccctccagcacaccgaccaagatcccaactgataccagcacccctcctaggcagcatctgcccgcccatgaaaagatggtgcaaagacgcagctccttctcaagccaatcaatcaactctcaatcggtgggaagttccttgacgcagccagtgatgagtcaggccacaaacctgccgatcccgcaaggcatgtctcaatttcaattttcagctcagctaggcgccatgcaacacctgaaggatcagctggagcaaaggacaagaatgatcgaagccaacattcatcgacagcaggaggaattgaggaaaatccaggaacagcttcaaatggtacatggccagggcctccagatgtttctacagcagagcaaccccggcctgaactttggaagtgtccagctgtctagcgggaattccagcaatattcagcaacttgcgcccatcaatatgcagggacaggtggtccctaccaaccagatacagagtggaatgaatacgggccatataggcaccacccagcatatgattcagcagcagacgcttcagtctactagtacacagagccaacaaaatgtgcttagcggacatagccagcagacctctctcccctctcagacacagagtaccctcacagcgcctctatacaatacgatggtgatttcacagccggcggctgggagcatggtgcagattccatccagcatgcctcagaattctacccaatctgctgcggtgactaccttcacccaagatagacagatcaggtttagccaaggccagcaactggttacgaagctcgtgacagcccctgtggcttgtggcgctgtgatggtgccatccacaatgctgatgggacaggttgttacagcctatcccactttcgccacacagcagcagcagagccagacactctccgtcactcagcagcagcagcagcagagcagccaggagcagcagcttactagcgtacaacaacccagtcaggcccagctgacccagcccccacagcaattcttgcagacaagccgcctattgcacggcaaccccagtacgcaactgatcctgtctgccgctttcccattacagcaatctacttttccacagagccatcaccagcaacaccagtcccagcagcaacagcaattgagccgacatcgaacggacagtctacccgacccctcgaaagtccagccacagtag

SEQ ID NO: 150585 - DNA, 2541 bp, Artificial Sequence
  derived and/or modified sequence
atgctgttcaccgtgagctgcagcaagatgagcagcatcgtggacagggacgatagttctatatttgacggccttgtggaggaggacgacaaggataaggcgaaacgggtctccagaaacaaaagcgagaaaaaacgccgcgatcaatttaacgtcttgatcaaggaactgggttcaatgctccccggaaacgccagaaaaatggacaaaagcactgtccttcagaagtcaatcgacttcttacgaaagcacaaagaaatcacagcccagagcgacgcttccgagattagacaagattggaaacctacattcttaagtaatgaggagttcacacagttaatgcttgaggcactggatggtttctttctggccatcatgacggatggctctattatctatgtcagtgagagtgtgacaagcctgctagaacacttgccttccgatctcgtcgatcagagcatattcaattttatcccagagggggagcacagtgaggtgtacaaaatattgtcaacacatcttcttgagtcagattccctaacacccgagtacctcaagagcaagaaccagctggagttttgttgtcacatgctgagaggcactattgaccctaaggagccttcaacctacgaatacgtaaagttcatcggcaatttcaagagtctgaactcagtgtcttcctcagctcacaatggcttcgaggggactattcaaaggacacatcgacccagctacgaagatcgtgtgtgcttcgtcgccacagttcggctcgccaccccacagtttattaaggagatgtgtactgtcgaagagcccaacgaagaattcacgtctagacacagtcttgagtggaaatttctgttccttgatcacagagcacctcccattataggatatctgcctttcgaagtgctgggcacctctggatacgattattatcatgtggatgatttggagaacctcgctaaatgtcatgagcatttgatgcaatacggtaagggaaagagctgctactaccgattccttaccaagggccagcagtggatctggctacagacacactactatataacctaccaccaatggaacagtcgccccgagtttatagtctgtacccacactgtggtttcttacgcagaggtgagagcagaacggcggagagagttgggaattgaggagagcctgccggaaaccgctgcagataaaagtcaggacagcggttccgataacaggattaacactgtcagtctcaaggaagctttagagcgctttgatcactctcctaccccttcagctagctcccggtcctccagaaagtcctcacacaccgccgtatcagacccgagcagtacccctacaaaaattccgaccgacacatccacccccccccgtcagcacttacccgcacatgagaaaatggtgcagcgaagatctagtttctcctctcagtccataaactcacaaagtgtgggaagttctctcactcagcctgtgatgtcccaggctacaaatctgcctatcccccagggaatgtcccagttccagttctcggcccagctgggagcaatgcagcacctgaaggaccagctcgagcaacgaaccagaatgattgaagctaatatacacagacagcaagaggaacttaggaagatacaggaacagctgcagatggttcatgggcaaggattgcagatgtttctgcagcagagcaatccaggtcttaatttcggcagcgtgcaactgtctagcggaaatagttcgaacatccagcagctcgcacccataaatatgcagggacaggtggtccctactaaccagatacaaagtggaatgaataccggccacatcggcacgacacagcatatgattcagcagcaaactctgcagtcaactagcactcagagccagcagaatgtgctatccggccacagtcaacagactagcttgccgtcccagacacagagcacccttactgccccattgtacaatacgatggtgatctcacagccagctgccggctccatggtgcagattccatcttcgatgccgcagaacagcacccagagcgccgcagtgacaactttcacccaggataggcagatacggttttcccaggggcaacagttggtgactaaactggttaccgcaccagtggcatgtggggccgttatggtccctagcacaatgcttatggggcaagtggtgaccgcgtacccaaccttcgcaacacagcagcagcagagccagacgcttagcgtgacccagcagcaacagcagcagtcatctcaagaacagcagttgactagtgtacagcaaccctctcaggcgcagctgacccagcctccacagcagtttctacagacgtcccggctgctgcacgggaatcccagtactcagttgatactcagcgctgctttcccactgcaacagtcaacctttccccagagccaccaccagcagcatcaatcacagcagcagcagcagctctcaaggcatagaaccgacagcctccccgacccatccaaggtgcagcctcaatag

SEQ ID NO: 150586 - DNA, 2541 bp, Artificial Sequence
  derived and/or modified sequence
atgctgttcacggttagctgctccaagatgtccagcattgtggaccgcgatgactccagtatatttgatggacttgttgaggaagacgataaggataaggccaagcgtgtgtccaggaacaaatctgaaaaaaagcgcagggaccaattcaacgtactgatcaaagaattaggttccatgttacctggtaacgcaagaaaaatggacaaatcaacggtgctccaaaaaagcatagatttcctgcgcaaacacaaggaaattaccgcccagtccgacgctagcgagatccgccaggactggaagccaacctttttgtcaaacgaagagttcacgcagctgatgctggaggctctggacgggttcttcttggccatcatgaccgacggctctatcatctacgtgtctgagtccgttacttccctgctggagcatctgccaagcgacctggtggatcagtccatctttaattttatcccagaaggcgaacacagcgaggtgtataaaatactgagcacccatctgctggaaagtgactctctgacgccagaataccttaaaagtaagaaccaattagaattttgctgtcatatgctgcgcggaactattgacccaaaggagccatctacttacgagtacgtcaaattcatagggaattttaaatccttaaactctgtttccagctctgcacacaatggcttcgagggcacaatccaaagaactcaccggccttcctatgaggaccgggtctgtttcgtagcgaccgtgcggctggccacaccccagtttatcaaagagatgtgtaccgtggaggaacctaacgaagagtttacctcccggcacagcctcgagtggaagtttctgtttctggaccatcgtgctccacccatcatcggctatcttcctttcgaggtgctggggacctccggctatgactactatcacgttgacgatctcgagaacctggcaaaatgccatgaacatctaatgcaatacgggaaaggaaaatcgtgttattaccgcttcctgacaaaagggcagcaatggatttggctgcaaacacattactatatcacataccatcagtggaatagcagaccagaattcattgtctgcacgcataccgtggtgtcttacgctgaggtgcgagctgaacggcgacgagagctaggcatagaagagtcattgccagaaactgcagcggataagtctcaggactcaggcagcgacaatagaattaatactgtctctctgaaagaggcccttgaacgctttgaccacagccccactccttccgccagctcccggtcgagccgtaagagcagccacacagcggtgtctgatcccagttccacgcccacgaagattccgaccgacactagtacccccccacggcaacatttgccggctcacgagaagatggtgcagcgccgaagcagcttctcatcccagagcataaattcacagtctgtcggcagctcccttacacagccagtgatgtcccaggcgaccaacctgccaatccctcagggcatgagtcagttccagttttcagcccaactgggagcaatgcagcatctgaaggatcagttggagcagagaacacgcatgatcgaggccaatatccaccggcaacaagaggagctgcgtaaaatacaggagcagctccagatggtccacggacagggcctacagatgtttttgcagcagagtaaccccggactgaacttcggatcagttcagttgtccagcggcaatagcagtaatattcagcaattggcaccaattaacatgcagggtcaggttgtgcctactaaccaaatccagagcggcatgaataccggtcatatcggcacaacccagcatatgatacaacaacagacacttcaaagtacaagtactcagagtcagcagaacgttctaagcggccattcccagcaaacgagcctgcccagccaaacccagagcacgttaactgcccctctgtataacaccatggtgatttctcagccggctgcgggaagcatggtccaaatacccagttcgatgccccagaacagtacccagtctgccgctgttaccacgttcactcaagatcgccagatacgtttttcccaggggcaacagctggtgaccaaactggttaccgccccagttgcctgcggcgctgttatggtgcccagcactatgcttatgggccaggtcgtgacagcttatccgacattcgccacccaacagcaacagtcccagacactctcggtcacgcagcagcaacagcaacagtcaagccaggaacagcagctgacttctgtccagcaacctagccaggcgcagctgactcaacctccgcaacagtttctgcagacatctaggctgctgcacggaaatccctctacccagctgatactgagtgctgcatttcctctccagcagtccaccttccctcaatcccatcatcagcaacatcagtcccagcagcagcagcagctcagtcgccaccggaccgactcacttcctgaccctagcaaggttcagcctcagtag

SEQ ID NO: 150587 - DNA, 2541 bp, Artificial Sequence
  derived and/or modified sequence
atgcttttcactgtctcctgctccaaaatgagctcaattgtagacagggatgattcttctatattcgatggactggtggaagaagacgacaaagacaaagctaagcgcgtatccagaaacaaaagcgaaaagaaaaggcgtgaccaattcaacgtgctgattaaggagctgggcagtatgctgccagggaatgcacgcaagatggacaaatccacagtactgcaaaaatctatagactttctgcggaagcacaaagaaatcaccgcccagagcgatgcctctgagatcaggcaggattggaaaccaacctttctcagcaatgaagagttcacgcaattaatgctggaagccttagatgggttctttttggcaatcatgacagatggatccatcatttacgtgtcggaaagcgtaacgtcgctgcttgaacatctcccatccgatttagttgaccaaagcatcttcaattttattcccgagggcgaacattcagaggtgtacaaaatcctaagcacgcacctattggaatccgacagcctgactccggaatatctgaaaagtaagaatcagttggaattctgctgccatatgctgagaggcactattgatcctaaggaaccaagtacttacgaatatgttaagtttataggcaattttaagagtttaaacagtgtctcttcaagcgctcataacgggttcgaagggacgattcagcggactcatagaccatcttatgaggaccgggtttgtttcgttgcgaccgtgaggctggctaccccacagtttatcaaggaaatgtgcacggtggaggagccaaatgaagagtttacatccaggcacagtttagagtggaaattcctgtttctggaccaccgtgcccctcccatcattggctacctgccattcgaggtgttgggcacatccgggtatgattactaccacgtcgacgatttggagaatttggccaagtgtcatgaacacctgatgcagtatggcaaaggtaagagctgttattataggtttcttacgaaaggccagcagtggatttggcttcaaacacattattacataacgtatcaccagtggaacagcagacctgagtttatcgtgtgcacccataccgtggtgagttatgccgaggtgagagccgagcggagacgcgagctggggattgaagaatctttgccggaaactgcagccgataaatcccaagacagcggctccgacaaccggattaatactgttagtctaaaagaggccctggagcgttttgatcattcgccgaccccctctgcaagcagcaggtcgtcgcgaaagtcgagtcacactgcagtgtccgatccctcaagtacacctactaagattcctaccgatacgagcaccccccctagacagcatctgcctgctcacgagaaaatggtgcagcggcgatcaagtttcagttcccaatccattaacagccagagtgtgggtagtagcctgacccagcctgttatgagccaggcgacaaacctgccaattccacaggggatgtcccagttccagttttccgcccaactgggggctatgcagcaccttaaggatcagctggagcaaaggacgcggatgattgaggctaacattcacaggcagcaagaagaactgcggaaaatccaagaacagctccagatggttcacggtcagggactacaaatgttcctccagcaaagcaacccaggcctaaactttggcagcgtgcagctgtcaagcgggaactcatccaacatccagcaattggcacctatcaatatgcaggggcaggtggtgccgaccaaccaaatccagagcggcatgaacacaggtcacatcggcactacccagcacatgatccagcaacagacactgcagtctaccagcacgcagagtcaacagaatgtgctctccggacactctcagcaaacttccttgccctcacagacccagtcaactcttactgcgccactttacaacaccatggttatttcccagcccgcagcaggcagtatggtgcagatacccagctccatgccccagaatagcacacaaagcgcggcagtaacaaccttcacacaggaccggcagatccgcttttcccaggggcagcaactcgtgacgaagctcgttactgcacctgtagcttgtggagcggttatggtacccagcacaatgctcatggggcaggttgttacagcctaccccaccttcgcgacccagcagcagcaatcccagactctgtccgtcacccaacagcagcaacagcagtcctcacaggaacagcagctgacatccgtgcaacaacccagccaggcccaactcactcagccgccacagcagtttctccaaaccagcagacttttgcatgggaaccccagcacacagttgattctgagtgcggcttttccactgcaacaatcaacgttcccccagagtcaccaccagcagcaccaaagccagcagcagcaacaactgtctcgtcacaggactgattctctgcccgatccaagcaaagttcagccgcagtag

SEQ ID NO: 150588 - DNA, 5714 bp, Artificial Sequence
  derived and/or modified sequence
agctgattctatcacattgtaagatgcctttggataattctacagtcctcttaaatgaatctttagaacttggcaagtctcactagataccttcaatcatcattttgagctcaaagaattctgagacttatggttggtcatatagaagagtaccttgaacctatagtttcctgaagaatcagtttaaaagatccaaggagtacaaaaggagaagtacaaatgtctactacaagacgaaaacgtagtatgttatgttgtttaccgtaagctgtagtaaaatgagctcgattgttgacagagatgacagtagtatttttgatgggttggtggaagaagatgacaaggacaaagcgaaaagagtatctagaaacaaatctgaaaagaaacgtagagatcaatttaatgttctcattaaagaactgggatccatgcttcctggtaatgctagaaagatggacaaatctactgttctgcagaaaagcattgattttttacgaaaacataaagaaatcactgcacagtcagatgctagtgaaattcgacaggactggaaacctacattccttagtaatgaagagtttacacaattaatgttagaggctcttgatggtttttttttagcaatcatgacagatggaagcataatatatgtgtctgagagtgtaacttcattacttgaacatttaccatctgatcttgtggatcaaagtatatttaattttatcccagaaggggaacattcagaggtttataaaatactctctactcatctgctggaaagtgattcattaaccccagaatatttaaaatcaaaaaatcagttagaattctgttgtcacatgctgcgaggaacaatagacccaaaggagccatctacctatgaatatgtaaaatttataggaaatttcaaatctttaaacagtgtatcctcttcagcacacaatggttttgaaggaactatacaacgcacacataggccatcttatgaagatagagtttgttttgtagctactgtcaggttagctacacctcagttcatcaaggaaatgtgcactgttgaagaacccaatgaagagtttacatctagacatagtttagaatggaagtttctgtttctagatcacagggcaccacccataatagggtatttgccatttgaagttctgggaacatcaggctatgattactatcatgtggatgacctagaaaatttggcaaaatgtcatgagcacttaatgcaatatgggaaaggcaaatcatgttattataggttcctgactaaggggcaacagtggatttggcttcagactcattattatatcacttaccatcagtggaattcaaggccagagtttattgtttgtactcacactgtagtaagttatgcagaagttagggctgaaagacgacgagaacttggcattgaagagtctcttcctgagacagctgctgacaaaagccaagattctgggtcagataatcgtataaacacagtcagtctcaaggaagcattggaaaggtttgatcacagcccaaccccttctgcctcttctcggagttcaagaaaatcatctcacacggccgtctcagacccttcctcaacaccaaccaagatcccgacggatacgagcactccacccaggcagcatttaccagctcatgagaagatggtgcaaagaaggtcatcatttagtagtcagtccataaattcccagtctgttggttcatcattaacacagccagtgatgtctcaagctacaaatttaccaattccacaaggcatgtcccagtttcagttttcagctcaattaggagccatgcaacatctgaaagaccaattggaacaacggacacgcatgatagaagcaaatattcatcggcaacaagaagaactaagaaaaattcaagaacaacttcagatggtccatggtcaggggctgcagatgtttttgcaacaatcaaatcctgggttgaattttggttccgttcaactttcttctggaaattcatctaatatccagcaacttgcacctataaatatgcaaggccaagttgttcctactaaccagattcaaagtggaatgaatactggacacattggcacaactcagcacatgatacaacaacagactttacagagtacatcaactcagagtcaacaaaatgtactgagtgggcacagtcagcaaacatctctacccagtcagacacagagcactcttacagccccactgtataacactatggtgatttctcagcctgcagccggaagcatggtccagattccatctagtatgccacaaaacagcacccagagtgctgcagtaactacattcactcaggacaggcagataagattttctcaaggtcaacaacttgtgaccaaattagtgactgctcctgtagcttgtggggcagtcatggtacctagtactatgcttatgggccaggtggtgactgcatatcctacttttgctacacaacagcaacagtcacagacattgtcagtaacgcagcagcagcagcagcagagctcccaggagcagcagctcacttcagttcagcaaccatctcaggctcagctgacccagccaccgcaacaatttttacagacttctaggttgctccatgggaatccctcaactcaactcattctctctgctgcatttcctctacaacagagcaccttccctcagtcacatcaccagcaacatcagtctcagcaacagcagcaactcagccggcacaggactgacagcttgcccgacccttccaaggttcaaccacagtagcacacgtgcttcctctcttgacatcaagggaggaaggggatggcccattaagagttactcagatgacctgaggaaaggagggaaagttccagcagtttcatgagatgcagtattgagtgttctagttcctggaattagttggcagagaaaatgctgcctagtgctacagatgtacattaaataccagccagcaggaggtgatcataggggcatagccagttctgacagtgttttaggtgcctggatattttttgatggaaaaagaatatattgccaaatattaagaagctcagctatgaaatgacctccagggaatcagaaaggcactaatgatgttagtaacttttagtggttctgtgcctcttatcaagtgttacagaggacataccactgccatgtcaggggtttgcttacagtgatgccatgaagacagtccagtagacttggtagcgaccccctcccccaacccctctcccttttcagataatgatggaacagtaattactttcagaatgttgtgtgggttcaaattctctatgtacagatgatgtaaaaatatgtatatgtctagataaaaggagagaaagcaaaacattttgtatgctgcatgaaagcgttatctcttccttacaggtgtgagcacctttcctgaaattctgacaccatgtgcaaactgatccatcctgtttttccttttgtttacaacacagtagtgttctgttcacttttccggggcacaagtttttttgttcatactttggctgtgatgtcacagtttgttcagtgaggtatgatgtgctgctgggaatggattttttttttcaggttaaattattgatacaacaggattttcaagttattcagaaatatccctcatttcattatttttcaattatgtttgaaaataggatttgcactgctttattttaggtggctgggagttttgattgcatattttgttatagttcatagttggaaatatttgcgtaaatggttttcaacaagcctgaaagtaatttcaagaatgtttcagttatagaggtaaaatttgcacacaaaacatcttaggcactttttaacattctcaatcatgggaattttaacttttgggatttgttgaaatcttttttattatccttcacaatttcaatgcttcttttagtcagaaatgattcagggttatttgaggggaaaaaaccccatagtgccttgattttaattcaggtgataactcaccatcttgaagtcattgtccggtttccgtagcagttttgaaaccttagtacctttttaacagcatgtgggtgtcagtgtcattattagtctcctaataagttcctctgaagactgctatcagtctcttggactggaggtacaaataatttagaaataaaagatgataacctaacactatcatagttattaatgtgatcctaaaattgtttcctaaatcagcatttttctttagtcatttaagaatttaccagaaatatttgctcaatatgatcttgatattcctacaaagaaaaaagaaggggtagggatttggctatgccttcactacaacattagaatattgtaactcacatgccttctaaacgtgaactaagatttcctttggcaatatcatattctaaaagtaataaattccaatacaagttacatacatttaaaaaacattttacagattttatggtactaatgaaatttacagtgatagaacaaaagaggattagtagaaaatacattattagaatataaaaaatgttattactgaggaaagggaggagaggacaagtgtaataaatcaaaattgacctcaaaagaaaatgtgtaacagagttgaggttgttaaaacagaaaaggttctgaataatgaagattaacctaatgcagaattgctaggtaaagaggtcaggggaatgctaagccagttcttaagacttctctgtcctctgctttgctgttatccttaaggcatatactttgtctttctgcagaaaattctacctggctacaattactttgaacattaatgttgaaaaagaaaacaaccaaagaaaattggtacttacccttctacaaaagaagtgtgactagatatcaatcagtaattaacatatcaaggagctcttctagctaaatgaccatccagtagagatttcccacattcccatgaatatcaagaatagttgtcagaatatgtatgtacctgagcatatgtacacagacaagggggatgttgtggaatatggcaatagcattgttcttctcccctttcaaattgcctttcttgaccttatgccattccatatatatctgagttgtgcctcatttatttattggcaatacctagtgatacggatttagctaacaaaagatatgaagaactattatattgaggcctgtcctctacataccacacttaaaagatggtgaactgtgagtactacttaggttgacagcaacaaagcataagacaagccccaggtaaacgtctaaactgtttactcacattgtcctactccagccccttcaattatttcccatctccacaaatagtcgggggaaaaaattaaaattttcctttatgattcttactgttcttcgcagctcatcttttcctgcttagaattaaccattgctaatttaaaggagcagctagctgcttttctgtcagtctgaagcgtagtagtggaagaggtagtaagcaccagctgcctctttgctgctttgttttcctcctgattctcttaaatttgggttgcaaagctatcccgccccccaccctgccccatgaaacttgagcattcaaatgaagattcagcagtgtctgttcttcatttctatagccaaagctgttagttaaaatcccaaatctatagcatttaaagataccaaatagaaacaccttccagcttt

SEQ ID NO: 150589 - DNA, 2541 bp, Artificial Sequence
  derived and/or modified sequence
atgctgttcaccgtgagctgcagcaagatgagcagcatcgtggacagagacgacagcagcatcttcgacggcctggtggaggaggacgacaaggacaaggccaagagagtgagcagaaacaagagcgagaagaagagaagagaccagttcaacgtgctgatcaaggagctgggcagcatgctgcccggcaacgccagaaagatggacaagagcaccgtgctgcagaagagcatcgacttcctgagaaagcacaaggagatcaccgcccagagcgacgccagcgagatcagacaggactggaagcccaccttcctgagcaacgaggagttcacccagctgatgctggaggccctggacggcttcttcctggccatcatgaccgacggcagcatcatctacgtgagcgagagcgtgaccagcctgctggagcacctgcccagcgacctggtggaccagagcatcttcaacttcatccccgagggcgagcacagcgaggtgtacaagatcctgagcacccacctgctggagagcgacagcctgacccccgagtacctgaagagcaagaaccagctggagttctgctgccacatgctgagaggcaccatcgaccccaaggagcccagcacctacgagtacgtgaagttcatcggcaacttcaagagcctgaacagcgtgagcagcagcgcccacaacggcttcgagggcaccatccagagaacccacagacccagctacgaggacagagtgtgcttcgtggccaccgtgagactggccaccccccagttcatcaaggagatgtgcaccgtggaggagcccaacgaggagttcaccagcagacacagcctggagtggaagttcctgttcctggaccacagagccccccccatcatcggctacctgcccttcgaggtgctgggcaccagcggctacgactactaccacgtggacgacctggagaacctggccaagtgccacgagcacctgatgcagtacggcaagggcaagagctgctactacagattcctgaccaagggccagcagtggatctggctgcagacccactactacatcacctaccaccagtggaacagcagacccgagttcatcgtgtgcacccacaccgtggtgagctacgccgaggtgagagccgagagaagaagagagctgggcatcgaggagagcctgcccgagaccgccgccgacaagagccaggacagcggcagcgacaacagaatcaacaccgtgagcctgaaggaggccctggagagattcgaccacagccccacccccagcgccagcagcagaagcagcagaaagagcagccacaccgccgtgagcgaccccagcagcacccccaccaagatccccaccgacaccagcaccccccccagacagcacctgcccgcccacgagaagatggtgcagagaagaagcagcttcagcagccagagcatcaacagccagagcgtgggcagcagcctgacccagcccgtgatgagccaggccaccaacctgcccatcccccagggcatgagccagttccagttcagcgcccagctgggcgccatgcagcacctgaaggaccagctggagcagagaaccagaatgatcgaggccaacatccacagacagcaggaggagctgagaaagatccaggagcagctgcagatggtgcacggccagggcctgcagatgttcctgcagcagagcaaccccggcctgaacttcggcagcgtgcagctgagcagcggcaacagcagcaacatccagcagctggcccccatcaacatgcagggccaggtggtgcccaccaaccagatccagagcggcatgaacaccggccacatcggcaccacccagcacatgatccagcagcagaccctgcagagcaccagcacccagagccagcagaacgtgctgagcggccacagccagcagaccagcctgcccagccagacccagagcaccctgaccgcccccctgtacaacaccatggtgatcagccagcccgccgccggcagcatggtgcagatccccagcagcatgccccagaacagcacccagagcgccgccgtgaccaccttcacccaggacagacagatcagattcagccagggccagcagctggtgaccaagctggtgaccgcccccgtggcctgcggcgccgtgatggtgcccagcaccatgctgatgggccaggtggtgaccgcctaccccaccttcgccacccagcagcagcagagccagaccctgagcgtgacccagcagcagcagcagcagagcagccaggagcagcagctgaccagcgtgcagcagcccagccaggcccagctgacccagcccccccagcagttcctgcagaccagcagactgctgcacggcaaccccagcacccagctgatcctgagcgccgccttccccctgcagcagagcaccttcccccagagccaccaccagcagcaccagagccagcagcagcagcagctgagcagacacagaaccgacagcctgcccgaccccagcaaggtgcagccccagtag

SEQ ID NO: 150590 - DNA, 2541 bp, Artificial Sequence
  derived and/or modified sequence
atgctctttaccgtgagttgcagtaaaatgtcttccatcgtcgacagggatgacagctctatctttgacgggcttgtggaagaggacgacaaagacaaagcaaaacgtgtctccagaaacaaaagtgagaaaaaaaggagagatcaatttaatgtgctcatcaaggaactgggctccatgctgcccggtaacgcccgaaagatggataaatccacggtgttgcagaagagcatcgactttctccgtaagcacaaagagatcacggctcagtccgacgcttctgaaattagacaggattggaaacctacctttctctctaacgaggagtttacccaactgatgctggaagcgctggacggattttttttagctattatgactgatgggtccatcatctacgtcagcgagtctgtaactagtctgctcgagcaccttccatccgatctggttgaccagagtatctttaactttataccagaaggtgaacatagtgaggtctacaagatcctctctactcacctcctcgagtcagattcacttacccccgagtaccttaagtccaaaaaccaactggaattctgttgtcacatgctgagaggcaccattgatccgaaagaaccctcgacatatgaatatgtgaaatttattggcaatttcaaaagcctgaatagcgtgagctcctctgcacataacgggttcgagggcaccattcagaggacacatcgacctagttacgaagatcgtgtttgttttgttgctacagttcgattggctacccctcagttcattaaggaaatgtgcaccgtagaggaaccgaatgaagaatttacaagcagacactccctagagtggaagtttcttttcctggatcatcgggcaccccccattatcgggtacctgccctttgaggtgctgggcacatccggctacgactattaccatgtggacgatctggagaatctcgccaagtgtcatgaacacctgatgcagtatggaaaaggcaagtcatgctattatcgcttcttgacaaaagggcagcagtggatctggctgcagacgcattactatatcacgtaccaccagtggaacagtagaccagagttcattgtgtgtacccacacagtggtctcttatgccgaggtgagggccgagaggcgacgagaactaggcattgaagagtcactgccggagactgccgccgacaagtctcaggactcaggcagcgacaatcgcatcaatactgtctccctgaaggaggccctggagcgttttgatcatagtccaactcccagcgcttcctcccgctcaagcagaaaaagcagccacactgcggtctctgatccatcctccacccccaccaagatccccaccgacacatctaccccaccccggcaacatcttcctgcgcacgagaagatggtgcagcggaggtcgagttttagcagccaatcgattaattcacaatccgtgggctcctccttgacccagcccgtcatgagccaagctaccaatttgcccatacctcaggggatgagtcagtttcagttcagcgctcagttgggagcgatgcagcatcttaaggatcaactggagcagcggacccgtatgattgaggctaacatccataggcagcaggaggagctccgcaagatccaggagcaacttcagatggtccacggccagggcctccagatgttcctccagcagagcaaccctggactgaattttggctccgttcagcttagtagtgggaacagttcgaatattcaacagctggctcccatcaatatgcaaggacaggtggtgcctacaaaccagatccagagcgggatgaacaccggccacatcggtaccacccagcacatgatccagcagcaaacgctccaatcaacatctacccagtctcaacaaaatgtgctgtccggacattctcagcagacttctctgccatcccagacacagagtactctcaccgctcctctgtacaacacgatggtgatctcccaacccgccgccggctctatggtgcagatccccagcagcatgccacagaactctacacagtccgctgccgtcacaacatttacccaagacaggcagatccggttttctcagggacagcagctcgtgactaagctggttaccgccccagtggcatgcggagccgttatggtgccatcaactatgctcatgggtcaagtggttaccgcatacccaacgtttgccacccagcagcagcaatcgcagacactgagcgttactcagcagcagcagcagcagagctcccaggaacagcaactaaccagcgtgcaacagccctctcaggcccaattgacccagccccctcagcaattcctgcaaacttctcgtttgctccacggtaatcccagcacccagttgattttgtccgcagccttcccactccagcaatccacatttcctcaaagtcaccaccagcagcatcagagccagcagcagcagcagttgtcaaggcacagaacagattctctcccagatccctccaaggtgcagccgcagtag

SEQ ID NO: 150591 - DNA, 2541 bp, Artificial Sequence
  derived and/or modified sequence
atgctgttcaccgtgagctgcagcaagatgagcagcatcgtggaccgtgacgactcctccatctttgacgggctggtggaagaagacgacaaggataaagctaagagagtcagcagaaacaaatccgagaaaaaacgcagagaccagttcaacgtgttaataaaggaacttggctctatgctccccggcaatgcccgcaagatggacaagagcactgtcttgcagaagtccatcgactttcttaggaagcacaaagagatcactgctcagtcagacgcatccgagattagacaggattggaagcccacatttctgagcaacgaagagttcacgcagcttatgctggaggccctggacggattctttctcgccatcatgactgatggcagcatcatatacgtctctgaatcagtcacctccctgctagaacatctacctagtgatcttgtggatcagagcatattcaattttattccagagggcgaacattccgaagtttataagattctgtcaacacacttgctggaatctgactctctgactcccgaatatcttaagagcaagaatcagctggagttctgctgtcacatgctgcgaggaactatcgaccccaaggagcccagcacatatgagtatgttaagtttatcggaaactttaaatccctgaactcggtgtccagctccgcacacaatgggtttgagggaacaattcagcgaacgcacaggccaagttacgaggaccgggtctgcttcgtggctactgtgcgtctggccacaccacagtttatcaaagagatgtgcacagtggaagagcccaacgaagaattcacaagccgacactctctggaatggaagttccttttcttggaccaccgagctccccctataattgggtatctccctttcgaggttctgggcacaagtggatacgactattaccacgtagacgacctcgaaaatctggcgaaatgccacgagcatttaatgcagtatgggaagggtaagtcctgttattatcgcttccttacgaaaggccagcagtggatctggctccagacccattattacataacttaccatcaatggaattctcggcccgaatttatagtctgtacccacaccgtggtgtcttatgcagaagtgcgggccgagaggagacgggagctgggcatcgaggagtccctacccgagacagccgcagataagagccaggactccggctccgataaccgcattaacacagtgtctctcaaggaggcactggaacgctttgatcacagccctacaccatccgcatcttctcgatccagtcgcaagtcctctcacacagccgtgtcagatcccagctcgacccccaccaagatccctacagatacatctaccccaccaaggcaacatctccccgcccacgagaaaatggtgcagcggcgctcctctttcagttcccagtccatcaatagccagtccgtcggcagttctctgacccagcccgttatgtcgcaggcgacgaacctccctatcccacaggggatgtcacaatttcagttcagtgcccagcttggcgccatgcagcacctcaaggatcagcttgagcagcgaacgaggatgattgaggctaatattcacaggcagcaggaggagctgagaaaaatccaagagcagctccagatggttcatggacagggcctgcagatgttcctgcaacaaagcaatcctgggctgaattttggctctgtgcaattgtcctctgggaattcttccaatattcagcaactggccccaatcaacatgcaggggcaagtggttccaaccaatcaaattcaatctggcatgaataccggacatatcgggacaactcagcacatgatacagcagcaaactctgcaaagcacctccactcagtcacaacaaaatgttctgagcggccactcacagcagacatcactgcctagtcagacacagtcgacgctaaccgcccccctgtataacactatggtcatctcacagcccgccgccggatccatggttcagatcccgtcctcaatgcctcagaacagcactcagtcagccgccgtgactacgttcacacaggataggcaaataaggttcagccagggccagcaattggtaaccaagctggttacggcacctgtcgcctgtggagcagttatggtgcccagcaccatgctgatgggccaggttgtaactgcatatcccacttttgccactcagcagcaacagagccaaactctttcggtgacccagcaacagcagcaacagtccagccaggaacaacagttgacctcagtacaacagcctagccaagcgcagctcactcaacccccccagcaattcctccagacaagcaggctgctgcacggcaatccttctactcagctgattctgtccgcagccttccccctacagcagtctacattcccccagtcccatcaccaacagcatcagagccagcagcaacagcaactgtcccgccacagaactgattcactccccgacccctccaaagtccagccccagtag

SEQ ID NO: 150592 - DNA, 2541 bp, Artificial Sequence
  derived and/or modified sequence
atgttgttcaccgtgtcttgtagtaaaatgtcctccattgtggaccgggatgactccagcatcttcgatggactggtggaagaggacgacaaagacaaagccaaaagagtgtctaggaataaatccgaaaagaagcggcgtgaccagtttaatgtgctgataaaggaactcggctccatgctgccgggaaacgctcgcaagatggacaaaagcacagtccttcagaagtctattgatttcctcagaaagcacaaggagattacagcacagtccgacgcaagcgaaattagacaggattggaagcccacttttcttagtaatgaggagttcacacagttgatgctggaggctcttgatggtttcttcctggccatcatgaccgatggctcaatcatttatgtgtcggagtcagtgacctccctactggagcatctgccctcagatctggttgatcaatctatcttcaactttatccccgaaggggagcactccgaagtttacaaaatcttaagcacccacctgctggagagtgactctctcacccccgagtacctcaaaagtaaaaatcagttggagttttgctgtcatatgctcagggggacgattgatccaaaagagccatcaacatacgagtacgtaaagtttatagggaactttaagtctctcaacagtgtctcaagcagcgcgcacaacggcttcgaaggaactattcagcggacacatcgaccttcctacgaggatagggtgtgctttgtggctactgtgaggttagccactccccagttcatcaaagagatgtgcaccgtcgaggaacctaatgaggagtttactagtcggcactccctggagtggaagtttctgttccttgatcaccgggctcccccaatcattggctacctgccgttcgaggtgctgggcacaagcgggtacgattattatcatgtggatgacctagagaatctggccaagtgccacgagcatcttatgcagtatggcaagggtaaaagttgttactatagattcctgacaaaaggccagcagtggatttggctgcagacacactattacatcacttatcatcagtggaattctaggccagaattcatcgtatgtacacacacagtggtttcttatgcagaggtgcgggctgagaggcggcgagaactgggcattgaggaaagcttgcctgaaactgctgctgataagtcacaggattcagggtctgataaccgaatcaataccgtatctctgaaagaagctctggaacgcttcgatcactcgcccacacccagcgcctctagccgatcatcgcggaagtcctcgcatactgcggtcagcgacccaagtagcacccccactaaaattcccaccgatactagcacacctcctcgacaacacctgccagcccacgaaaagatggtgcagagacgaagttcattttcttcacagagcatcaatagtcagtctgtgggtagcagcctaacccaaccagtgatgtcccaggcaactaatctcccaattccccaggggatgagtcagtttcaattcagcgcccagttgggtgccatgcagcatctcaaggaccagttagaacaacgaacaagaatgattgaagcaaacattcatagacagcaggaagagctgcggaagatacaggaacagctccagatggtgcatgggcaaggcctgcagatgtttctccagcagtctaatccgggactgaatttcggatctgtgcagctgtccagcggaaacagcagtaacattcaacaactcgcccctatcaacatgcagggccaagtcgtgccaactaaccagatccagtcaggcatgaacaccggacacattggcacaacccagcacatgatccaacagcagacactccaatcaacttcaacccaatcccagcagaacgtgctttccggtcattctcaacagacctcactcccaagtcagacccaatccactttaacagcccctctttataatacaatggttatcagtcagccagcagcaggatctatggtccaaataccctctagcatgccacagaatagcacacaatccgcagccgtgacaaccttcacccaagaccgacagattcggttcagccagggccagcaattagtgaccaagctggttaccgcacccgtggcctgcggggctgtaatggtgccgtccacaatgctgatgggccaggtggtgactgcctatcccacgtttgcgacccagcaacaacaaagccagacactgagcgtaacccagcaacagcagcagcagagctctcaggagcaacagttgacatccgtgcagcagccatcccaggctcagttaactcagcctccacagcagtttttgcagacgtccagactgctccacggcaatcctagcacacaactgattctaagcgcagccttccccctgcagcagtcgaccttcccccagagtcaccaccagcagcaccaaagccagcagcagcagcagctgagccgtcacagaaccgactcactacctgatccatccaaggtccaaccccagtag

SEQ ID NO: 150593 - DNA, 3580 bp, Artificial Sequence
  derived and/or modified sequence
tttctagtaaccggcgccgttcccggccggggcagggaacggtgcgcctgcagagccagatttcggcccaaggggcgcgggagtctcttcgggcgtccgggatcccctggcgcggctccgtgctgcctaacggggcaagtcgcatgcgcaccgagccgcgctggggaaagggagagtgaggggaggggcgagcgcagagcctccgccggccgtctgagcccgcggggtcgctgacgacgcatgcgccgggagggggcgcaatcacggactcggcttgcggctgccggtttaaaaaaggaaaccccggagagcgagagcgcgaaggaaatctggccgccgccgccgcgagcgctcccgaatttttacttgttcctgcaaagctgctggagctcagaagctgattctatcacattgtaagatgcctttggataattctacagtcctcttaaatgaatctttagaacttggcaagtctcactagataccttcaatcatcattttgagctcaaagaattctgagacttatggttggtcatatagaagagtaccttgaacctatagtttcctgaagaatcagtttaaaagatccaaggagtacaaaaggagaagtacaaatgtctactacaagacgaaaacgtagtatgttatgttgtttaccgtaagctgtagtaaaatgagctcgattgttgacagagatgacagtagtatttttgatgggttggtggaagaagatgacaaggacaaagcgaaaagagtatctagaaacaaatctgaaaagaaacgtagagatcaatttaatgttctcattaaagaactgggatccatgcttcctggtaatgctagaaagatggacaaatctactgttctgcagaaaagcattgattttttacgaaaacataaagaaatcactgcacagtcagatgctagtgaaattcgacaggactggaaacctacattccttagtaatgaagagtttacacaattaatgttagaggctcttgatggtttttttttagcaatcatgacagatggaagcataatatatgtgtctgagagtgtaacttcattacttgaacatttaccatctgatcttgtggatcaaagtatatttaattttatcccagaaggggaacattcagaggtttataaaatactctctactcatctgctggaaagtgattcattaaccccagaatatttaaaatcaaaaaatcagttagaattctgttgtcacatgctgcgaggaacaatagacccaaaggagccatctacctatgaatatgtaaaatttataggaaatttcaaatctttaaacagtgtatcctcttcagcacacaatggttttgaaggaactatacaacgcacacataggccatcttatgaagatagagtttgttttgtagctactgtcaggttagctacacctcagttcatcaaggaaatgtgcactgttgaagaacccaatgaagagtttacatctagacatagtttagaatggaagtttctgtttctagatcacagggcaccacccataatagggtatttgccatttgaagttctgggaacatcaggctatgattactatcatgtggatgacctagaaaatttggcaaaatgtcatgagcacttaatgcaatatgggaaaggcaaatcatgttattataggttcctgactaaggggcaacagtggatttggcttcagactcattattatatcacttaccatcagtggaattcaaggccagagtttattgtttgtactcacactgtagtaagttatgcagaagttagggctgaaagacgacgagaacttggcattgaagagtctcttcctgagacagctgctgacaaaagccaagattctgggtcagataatcgtataaacacagtcagtctcaaggaagcattggaaaggtttgatcacagcccaaccccttctgcctcttctcggagttcaagaaaatcatctcacacggccgtctcagacccttcctcaacaccaaccaagatcccgacggatacgagcactccacccaggcagcatttaccagctcatgagaagatggtgcaaagaaggtcatcatttagtagtcagtccataaattcccagtctgttggttcatcattaacacagccagtgatgtctcaagctacaaatttaccaattccacaaggcatgtcccagtttcagttttcagctcaattaggagccatgcaacatctgaaagaccaattggaacaacggacacgcatgatagaagcaaatattcatcggcaacaagaagaactaagaaaaattcaagaacaacttcagatggtccatggtcaggggctgcagatgtttttgcaacaatcaaatcctgggttgaattttggttccgttcaactttcttctggaaattcatctaatatccagcaacttgcacctataaatatgcaaggccaagttgttcctactaaccagattcaaagtggaatgaatactggacacattggcacaactcagcacatgatacaacaacagactttacagagtacatcaactcagagtcaacaaaatgtactgagtgggcacagtcagcaaacatctctacccagtcagacacagagcactcttacagccccactgtataacactatggtgatttctcagcctgcagccggaagcatggtccagattccatctagtatgccacaaaacagcacccagagtgctgcagtaactacattcactcaggacaggcagataagattttctcaaggtcaacaacttgtgaccaaattagtgactgctcctgtagcttgtggggcagtcatggtacctagtactatgcttatgggccaggtggtgactgcatatcctacttttgctacacaacagcaacagtcacagacattgtcagtaacgcagcagcagcagcagcagagctcccaggagcagcagctcacttcagttcagcaaccatctcaggctcagctgacccagccaccgcaacaatttttacagacttctaggttgctccatgggaatccctcaactcaactcattctctctgctgcatttcctctacaacagagcaccttccctcagtcacatcaccagcaacatcagtctcagcaacagcagcaactcagccggcacaggactgacagcttgcccgacccttccaaggttcaaccacagtagcacacgtgcttcctctcttgacatcaagggaggaaggggatggcccattaagagttactcagatgacctgaggaaaggagggaaagttccagcagtttcatgagatgcagtattgagtgttctagttcctggaattagttggcagagaaaatgctgcctagtgctacagatgtacattaaataccagccagcaggaggtgatcataggggcatagccagttctgacagtgttttaggtgcctggatattttttgatggaaaaagaatatattgccaaatattaagaagctcagctatgaaatgacctccagggaatcagaaaggcactaatgatgttagtaacttttagtggttctgtgcctcttatcaagtgttacagaggacataccactg

SEQ ID NO: 150594 - protein, 415 aa, Artificial Sequence
  derived and/or modified sequence
MSPEVALNRISPMLSPFISSVVRNGKVGLDATNCLRITDLKSGCTSLTPGPNCDRFKLHIPYAGETLKWDIIFNAQYPELPPDFIFGEDAEFLPDPSALQNLASWNPSNPECLLLVVKELVQQYHQFQCSRLRESSRLMFEYQTLLEEPQYGENMEIYAGKKNNWTGEFSARFLLKLPVDFSNIPTYLLKDVNEDPGEDVALLSVSFEDTEATQVYPKLYLSPRIEHALGGSSALHIPAFPGGGCLIDYVPQVCHLLTNKVQYVIQGYHKRREYIAAFLSHFGTGVVEYDAEGFTKLTLLLMWKDFCFLVHIDLPLFFPRDQPTLTFQSVYHFTNSGQLYSQAQKNYPYSPRWDGNEMAKRAKGCQGSRDACSPWEQVLAFAVAKTGCKLLQPQRNWPSSRGPPWRASEGERTAQ

SEQ ID NO: 150595 - DNA, 1248 bp, Artificial Sequence
  derived and/or modified sequence
atgagccccgaggtggccctgaacagaatcagccccatgctgagccccttcatcagcagcgtggtgagaaacggcaaggtgggcctggacgccaccaactgcctgagaatcaccgacctgaagagcggctgcaccagcctgacccccggccccaactgcgacagattcaagctgcacatcccctacgccggcgagaccctgaagtgggacatcatcttcaacgcccagtaccccgagctgccccccgacttcatcttcggcgaggacgccgagttcctgcccgaccccagcgccctgcagaacctggccagctggaaccccagcaaccccgagtgcctgctgctggtggtgaaggagctggtgcagcagtaccaccagttccagtgcagcagactgagagagagcagcagactgatgttcgagtaccagaccctgctggaggagccccagtacggcgagaacatggagatctacgccggcaagaagaacaactggaccggcgagttcagcgccagattcctgctgaagctgcccgtggacttcagcaacatccccacctacctgctgaaggacgtgaacgaggaccccggcgaggacgtggccctgctgagcgtgagcttcgaggacaccgaggccacccaggtgtaccccaagctgtacctgagccccagaatcgagcacgccctgggcggcagcagcgccctgcacatccccgccttccccggcggcggctgcctgatcgactacgtgccccaggtgtgccacctgctgaccaacaaggtgcagtacgtgatccagggctaccacaagagaagagagtacatcgccgccttcctgagccacttcggcaccggcgtggtggagtacgacgccgagggcttcaccaagctgaccctgctgctgatgtggaaggacttctgcttcctggtgcacatcgacctgcccctgttcttccccagagaccagcccaccctgaccttccagagcgtgtaccacttcaccaacagcggccagctgtacagccaggcccagaagaactacccctacagccccagatgggacggcaacgagatggccaagagagccaagggctgccagggcagcagagacgcctgcagcccctgggagcaggtgctggccttcgccgtggccaagaccggctgcaagctgctgcagccccagagaaactggcccagcagcagaggccccccctggagagccagcgagggcgagagaaccgcccagtag

SEQ ID NO: 150596 - DNA, 1852 bp, Artificial Sequence
  derived and/or modified sequence
gagtgcgcacgcatcctgcccgcggcgcgcgcgcaggtcggtgcgtctgtcgggggcgcgctcgggtacctgtaccccacgtagtcgccggttaccgatcggactaagttccagtggtgatttacaagtcaagttaaaatgtccccagaagtggccttgaaccgaatatctccaatgctctcccctttcatatctagcgtggtccggaatggaaaagtgggactggatgctacaaactgtttgaggataactgacttaaaatctggctgcacatcattgactcctgggcccaactgtgaccgatttaaactgcacataccatatgctggagagacattaaagtgggatatcattttcaatgcccaatacccagaactgcctcccgattttatctttggagaagatgctgaattcctgccagacccctcagctttgcagaatcttgcctcctggaatccttcaaatcctgaatgtctcttacttgtggtgaaggaacttgtgcaacaatatcaccaattccaatgtagccgcctccgggagagctcccgcctcatgtttgaataccagacattactggaggagccacagtatggagagaacatggaaatttatgctgggaaaaaaaacaactggactggtgaattttcagctcgtttccttttgaagctgcccgtagatttcagcaatatccccacataccttctcaaggatgtaaatgaagaccctggagaagatgtggccctcctctctgttagttttgaggacactgaagccacccaggtgtaccccaagctgtacttgtcacctcgaattgagcatgcacttggaggctcctcagctcttcatatcccagcttttccaggaggaggatgtctcattgattacgttcctcaagtatgccacctgctcaccaacaaggtgcagtacgtgattcaagggtatcacaaaagaagagagtatattgctgcttttctcagtcactttggcacaggtgtcgtggaatatgatgcagaaggctttacaaaactcactctgctgctgatgtggaaagatttttgttttcttgtacacattgacctgcctctgtttttccctcgagaccagccaactctcacatttcagtccgtttatcactttaccaacagtggacagctttactcccaggcccaaaaaaattatccgtacagccccagatgggatggaaatgaaatggccaaaagagcaaagggatgccaagggagcagagatgcctgcagcccgtgggagcaagtcctggcctttgcagttgcaaaaactggctgcaagctgctccagccccagaggaactggccaagctccagagggcctccttggagggcctcagagggagagagaactgctcagtaattttgatcactttgggcttatttcaaaacctttgtccctcagttccaggaggcagcatttgccaatggaaagctctaggaaacaccagtcttgagaggtggccagccagactgcctgtccacatgcgtgtcagcacatacagccgcttcctggaagccgcctggaatgtcttcacggcagcgttttgctcacacagcagcttttgcacgccccaggcagccccgactgctgaaatccaacttgagctggctggtggtccctggatcctagagcccttcacttcgggttactccctctttcttgcctctatttcttagttggaagaaataaactcacaaattatggtgcagtaattttccggggaaagtaaagcctcaggaatgcccacgcctttcttccaaagcctttgtctctgagacctcttaagttctaagattaaatgcccctcgctgttcttcctctgaaa

SEQ ID NO: 150597 - DNA, 1248 bp, Artificial Sequence
  derived and/or modified sequence
atgtctccggaggtggctctaaacagaatcagtcccatgttgagcccattcatcagctcggtggtgcgtaatgggaaagtaggtttagacgcgaccaactgtctaagaatcacagacctgaaatctggatgcacatcactgactcctggccctaattgcgatcggtttaaactacatataccctacgcaggcgaaactttgaagtgggatatcatcttcaatgctcaatatccagagctgcctccagatttcatcttcggcgaagacgccgaatttctgccagatccctccgcgctgcaaaacctggcaagttggaacccatcaaatcccgagtgtctcctgctcgtggtcaaagagctggtgcagcagtatcatcaattccagtgttcgagattacgtgagagcagtcggctcatgttcgagtaccagaccctgctcgaagagccccagtacggcgagaacatggagatctatgccggcaagaaaaataattggactggagaattttctgccaggtttcttttaaaactgccagtggactttagtaacatcccaacctaccttttgaaagatgtgaacgaggaccctggagaggacgtcgcattactaagcgtgtcgtttgaagacaccgaagctacacaggtgtacccaaaactttatctgtctccacgtatcgagcacgcattgggaggttcgtccgccctgcacattccagcatttcctgggggtgggtgcctgatcgactacgtgccccaagtgtgccatcttttaacaaataaggtgcagtacgtcatccaggggtaccacaagcggcgcgaatacattgcagccttcctcagccatttcgggaccggggtggttgagtatgacgctgaggggttcacgaagctgaccctcctgctcatgtggaaagatttttgcttcctggtgcatattgatctgcccttgttcttcccccgggaccaaccaactttgacattccaatccgtgtaccatttcacaaatagtggccagctgtacagtcaagcgcagaagaattacccatatagccctaggtgggatgggaacgagatggccaagagggccaaagggtgtcagggttctcgtgacgcgtgttctccctgggaacaggtgttagcctttgccgtcgccaagaccggatgtaaattactccagccccagcggaactggccaagcagtcggggtccaccatggcgtgcatctgaaggcgagagaacagcgcaatag

SEQ ID NO: 150598 - DNA, 1248 bp, Artificial Sequence
  derived and/or modified sequence
atgagccctgaggtggccctgaaccgcatcagccccatgctgagccccttcatcagctctgtggtgagaaatggcaaggtgggcctggatgccaccaactgcctgcgcatcacagacctgaagagcggctgcaccagcctgaccccaggccccaactgtgaccgcttcaagctgcacatcccctatgctggggagaccctgaagtgggacatcatcttcaatgcccagtacccagagctgcccccagacttcatctttggagaagatgctgagttcctgcctgaccccagcgccctgcagaacctggcctcctggaaccccagcaacccagaatgtctgctgctggtggtgaaggagctggtgcagcagtaccaccagttccagtgcagccggctgcgggagagcagccggctgatgtttgagtaccagaccctgctggaggagccccagtatggagagaacatggagatctatgccggcaagaagaacaactggacaggagagttcagcgcccgcttcctgctgaagctgcctgtggacttcagcaacatccccacctacctgctgaaggatgtgaatgaagaccccggggaggatgtggccctgctgtctgtgtcctttgaggacacagaggccacccaggtgtaccccaagctgtacctgagccccagaattgaacatgccctgggcggcagcagcgccctgcacatcccagccttccctgggggcggctgcctgattgattatgtgccccaggtgtgccacctgctgaccaacaaggtgcagtatgtgatccagggctaccacaagagaagagagtacatcgccgccttcctgagccacttcggcaccggggtggtggagtatgatgctgagggcttcaccaagctgaccctgctgctgatgtggaaggacttctgcttcctggtgcacatcgacctgcccctcttcttcccccgggaccagcccaccctgaccttccagagcgtgtaccacttcaccaacagcggccagctgtacagccaggcccagaagaactacccctacagcccccgctgggatggaaatgagatggccaagagggccaagggctgccagggcagcagagatgcctgcagcccctgggagcaggtgctggcctttgctgtggccaagacaggctgcaagctgctgcagccccagaggaactggcccagcagccggggccccccctggagggccagcgagggggagaggacagcccagtag

SEQ ID NO: 150599 - DNA, 1248 bp, Artificial Sequence
  derived and/or modified sequence
atgagccccgaggtggccctgaaccggatcagccccatgctgagcccgtttatcagcagcgtggttcggaacgggaaggtgggacttgacgcaactaattgcctccgcataactgatctgaaatccggctgtaccagcttaacccctggcccaaactgcgatcgcttcaaactgcatatcccgtacgctggcgagacgttgaagtgggacattatctttaatgcacaatatcccgaactccccccagactttatattcggcgaggacgcggagtttctgcctgaccccagcgctttgcagaatcttgcctcctggaaccccagcaatcctgagtgcttgctcctcgtggtgaaggaacttgtacagcagtaccatcagttccaatgctcccggctcagggagagctcaagattgatgtttgaataccaaacacttttagaagaaccacaatatggtgagaatatggagatctatgctggaaaaaaaaacaattggaccggagaatttagcgcaaggtttctgctgaaactacctgttgacttttcaaacatccctacctacctgcttaaagacgtgaatgaggaccctggcgaggatgtggcgcttctctctgtgagcttcgaagatacggaagccacgcaggtgtatccaaagctctacttgtcgcctcgaatagagcatgcccttggcggctcatctgctttgcacattcctgctttcccaggaggtgggtgtcttattgattatgtgccccaggtttgccatctactgacaaataaagtgcaatacgtcatccagggttatcacaaacggcgggagtatatcgcagcatttctctctcacttcggcacgggggttgtggaatacgacgccgaggggttcaccaagctgaccttacttcttatgtggaaagatttctgcttcttggtacatatcgaccttccactcttcttccccagggatcaacccaccctcacattccaatcggtgtatcacttcaccaatagcggacagctatactcccaagcacaaaaaaactacccttactccccaagatgggatgggaacgagatggcgaaaagagccaaaggatgccaggggtcaagggacgcatgctcgccatgggagcaggtcttagcttttgccgtggcgaagacgggatgtaagctgctgcagccccaaagaaattggccctcttctcgggggccaccctggagggcatcggagggcgagaggaccgcgcagtag

SEQ ID NO: 150600 - DNA, 1248 bp, Artificial Sequence
  derived and/or modified sequence
atgagcccagaggttgcactcaataggatctctcccatgttgagcccgttcattagcagtgtggttagaaacggaaaggtgggactggatgccactaactgcctgagaattaccgacctgaaaagtggctgcacatcactgaccccaggcccaaattgcgataggtttaaactgcacatcccatatgctggagagacattgaaatgggacattatcttcaacgcacagtatcccgagctgcccccagacttcatattcggcgaggacgccgagttcctgccagatcccagtgcactgcaaaatcttgcttcgtggaacccttcaaaccctgagtgtctcctcttagtcgtcaaagaactggtgcagcaataccatcaatttcagtgttcgagactacgcgaaagtagtcggctgatgttcgagtatcagacattactcgaggaaccacaatacggcgagaacatggaaatatatgccggtaaaaaaaacaattggacaggcgaattcagcgccagattccttctcaagctgcctgtggattttagtaacatcccaacttatctgctcaaggatgtcaacgaggaccccggagaggatgtcgccctgctcagtgtctccttcgaagacacagaagcgactcaggtgtatcctaaactctacctgtccccccgaatcgagcacgctttaggcggtagctccgcgctgcatattccagccttccccggagggggatgcttaattgattacgttccccaggtttgccacctgttaaccaataaagtccagtacgttatccagggctatcataaaaggcgcgagtacattgcagccttcctgagtcattttgggaccggggtagtcgagtatgacgctgaaggatttactaaactgactctcctacttatgtggaaggacttctgttttctggtccacatcgatttgcccctcttcttcccacgggaccaacctacgctaacgttccaaagcgtctaccactttaccaacagtgggcagttatatagtcaagcccaaaaaaattacccttacagtccccgatgggatggcaacgaaatggccaagcgagcaaaaggctgccagggctcacgcgatgcttgcagcccatgggaacaggtgttggcatttgccgtggccaagactggctgcaagctcctacagcctcaacgcaactggccgtcatcaagaggcccaccatggcgcgcttctgaaggtgagcgaactgcgcagtag

SEQ ID NO: 150601 - protein, 382 aa, Artificial Sequence
  derived and/or modified sequence
MNPQIRNPMERMYRDTFYDNFENEPILYGRSYTWLCYEVKIKRGRSNLLWDTGVFRGQVYFKPQYHAEMCFLSWFCGNQLPAYKCFQITWFVSWTPCPDCVAKLAEFLSEHPNVTLTISAARLYYYWERDYRRALCRLSQAGARVTIMDYEEFAYCWENFVYNEGQQFMPWYKFDENYAFLHRTLKEILRYLMDPDTFTFNFNNDPLVLRRRQTYLCYEVERLDNGTWVLMDQHMGFLCNEAKNLLCGFYGRHAELRFLDLVPSLQLDPAQIYRVTWFISWSPCFSWGCAGEVRAFLQENTHVRLRIFAARIYDYDPLYKEALQMLRDAGAQVSIMTYDEFEYCWDTFVYRQGCPFQPWDGLEEHSQALSGRLRAILQNQGN

SEQ ID NO: 150602 - DNA, 1149 bp, Artificial Sequence
  derived and/or modified sequence
atgaatccgcagatcagaaatcctatggagaggatgtatcgggacacattttatgataattttgaaaatgagcctatactttacggaaggtcttatacttggctgtgttatgaagtcaaaattaagcgaggacgctcaaaccttttgtgggatacaggggtattccggggccaggtgtatttcaaacctcagtaccatgcagagatgtgctttctgagctggttttgcgggaatcagctccctgcttacaagtgctttcaaatcacctggtttgtttcttggaccccttgtcccgactgcgtggccaagttagcagaattcttgtctgaacacccgaacgtcactcttactatttcagctgcccggctctattactactgggagagagactacagaagagcgctttgccggttgagtcaggccggagctagagttacaataatggactacgaagaattcgcttattgctgggaaaatttcgtgtacaatgaaggtcagcagtttatgccctggtacaagtttgatgagaattatgcttttttgcacaggactttgaaggaaatactccggtatcttatggaccctgacaccttcacgttcaattttaacaatgatccccttgtgctcagacgacgacagacttacctctgctatgaggtcgagcgactggataacgggacgtgggtgttgatggatcagcatatgggattcctttgtaacgaggccaagaacttgctctgtggattctatgggcgccacgctgagctgcggttcttagaccttgtcccgtcactccagcttgacccagcccagatttacagagtgacatggtttatctcctggagcccctgttttagttggggatgcgcaggtgaagtacgagcatttctgcaggaaaatacacatgtgcgcctccggatctttgcagcacggatttatgactacgaccccttatataaggaggccctccagatgctccgggacgccggggcccaggtgagtatcatgacctacgatgaatttgaatactgttgggacacatttgtataccggcaggggtgcccatttcaaccatgggacggactggaggagcattcccaagccctcagtggcaggcttagagcaattctgcagaaccagggtaactag

SEQ ID NO: 150603 - DNA, 1149 bp, Artificial Sequence
  derived and/or modified sequence
atgaacccccagatccggaaccccatggagaggatgtacagagacaccttctatgacaactttgaaaatgagcccatcctgtatggccgcagctacacctggctgtgctatgaggtgaagatcaagaggggccgcagcaacctgctgtgggacaccggggtcttccggggccaggtgtacttcaagccccagtaccacgccgagatgtgcttcctgtcctggttctgtggcaaccagctgcctgcctacaagtgcttccagatcacctggtttgtgtcctggaccccctgcccagactgtgtggccaagctggccgagttcctgtctgagcaccccaacgtgaccctgaccatctctgctgcccggctgtactactactgggagcgggactaccgccgggccctgtgccgcctgagccaggccggggcccgggtgaccatcatggactatgaggagtttgcctactgctgggagaactttgtgtacaatgaaggccagcagttcatgccctggtacaagtttgatgagaactatgccttcctgcacaggaccctgaaggagatcctgcgctacctgatggaccctgacaccttcaccttcaacttcaacaatgaccccctggtgctgcggcggcggcagacctacctgtgctatgaggtggagcggctggacaatggcacctgggtgctgatggaccagcacatgggcttcctgtgcaatgaggccaagaacctgctgtgtggcttctacggcagacatgctgagctgcgcttcctggacctggtgcccagcctgcagctggaccctgcccagatctacagagtgacctggttcatctcctggagcccctgcttctcctggggctgtgccggggaggtgcgggccttcctgcaggagaacacccacgtgcggctgcgcatctttgctgcccgcatctatgactatgaccccctgtacaaggaggccctgcagatgctgagagatgctggggcccaggtgtccatcatgacctatgatgaatttgagtactgctgggacacctttgtgtaccggcagggctgccccttccagccctgggatggcctggaggagcacagccaggccctgagcggccgcctgcgggccatcctgcagaaccagggcaactag

SEQ ID NO: 150604 - DNA, 1149 bp, Artificial Sequence
  derived and/or modified sequence
atgaacccccagatccggaaccccatggagcggatgtaccgggacaccttctacgacaactttgagaacgagccaatactgtacggccgaagctacacgtggctgtgctatgaggtcaaaatcaagcgggggaggtcaaacctgctttgggacacaggagtctttcgcggacaggtatattttaaaccccagtatcacgcggaaatgtgctttctctcgtggttttgtggaaaccagctcccggcctacaagtgtttccagattacatggtttgtatcatggacaccttgcccggattgcgtggccaagctggcagagtttctcagcgagcacccaaacgtgacgttgacgatctcagccgcccgcctctactattattgggagagggattaccgaagagccctatgtcgattgtctcaggccggggcccgagtgacaatcatggattacgaagaatttgcctactgctgggagaacttcgtgtataatgaaggacagcaattcatgccctggtacaaattcgacgagaactacgcgtttcttcacagaaccctgaaagagattttacgttacctcatggaccccgatacatttacctttaactttaacaacgacccactggtgctccgacgaaggcaaacttatctttgttatgaagtggagcgactggacaatgggacctgggtgctcatggaccagcatatgggctttctgtgcaacgaggccaaaaacctgttgtgtggcttctacgggcgccacgcagaactgcgatttttggatctcgtccctagtcttcaattggaccctgcgcagatctacagagtgacatggtttataagttggtctccctgctttagttggggctgtgcaggtgaggttcgagcattcctgcaggaaaatacacacgtgcgtctgaggatttttgccgcccgtatttacgattacgatcctttgtacaaagaagcattgcaaatgttaagagatgctggggcccaggtctctatcatgacctatgatgagttcgaatattgttgggacacctttgtctaccgccagggctgtccgttccagccatgggacggtcttgaagaacacagtcaggccctgtctgggcggctgagagcaatactgcaaaatcagggaaactag

SEQ ID NO: 150605 - DNA, 1149 bp, Artificial Sequence
  derived and/or modified sequence
atgaacccccagatcagaaatccaatggaacgcatgtatagggacacattttacgataacttcgagaacgagcctatcttgtatggaaggagttacacgtggctatgttacgaggtgaagattaaaagaggcaggtctaacctgctgtgggacaccggggtgttcagagggcaggtgtactttaagccccagtatcacgccgagatgtgtttcctctcctggttttgcggcaatcagctgcccgcttataaatgcttccagataacatggttcgtaagctggacaccatgccctgactgcgtggctaaactagccgagttcctttcagaacaccccaacgtgactcttacaatctctgctgctaggttatactattactgggagcgggactatcggcgtgcactctgtaggctttcccaagcaggggctcgcgtgaccattatggactacgaggagtttgcgtactgttgggagaattttgtgtacaatgagggtcagcagttcatgccttggtataagtttgatgaaaattacgcatttctccatagaaccctaaaggagatcctgcggtacctaatggaccccgacactttcacctttaattttaataacgacccattggtgctcagaagaagacagacttacctttgttatgaggtagagcgcctggataacgggacctgggtcctgatggatcagcatatgggctttctgtgtaacgaggccaaaaacctgctctgcggcttctacggaaggcacgctgagcttagattccttgatctggtccccagtttgcaactcgaccctgcccaaatttaccgggtcacatggtttatttcgtggagcccttgcttttcgtggggttgcgccggagaggtgcgcgcttttctgcaggaaaacacccacgtgcgcctgcgcattttcgcagccagaatttacgattatgatccactctataaggaggcattgcagatgctgcgggatgcaggggcacaggtctcaatcatgacctatgacgagtttgaatattgctgggacaccttcgtttatcgccaggggtgccccttccagccatgggacggactggaagagcactcacaggctctgtcgggcagactacgcgctattctgcagaatcaaggcaattag

SEQ ID NO: 150606 - DNA, 1533 bp, Artificial Sequence
  derived and/or modified sequence
caaaaaaagagcgggacagggacaagcgtatctaagaggctgaacatgaatccacagatcagaaatccgatggagcggatgtatcgagacacattctacgacaactttgaaaacgaacccatcctctatggtcggagctacacttggctgtgctatgaagtgaaaataaagaggggccgctcaaatctcctttgggacacaggggtctttcgaggccaggtgtatttcaagcctcagtaccacgcagaaatgtgcttcctctcttggttctgtggcaaccagctgcctgcttacaagtgtttccagatcacctggtttgtatcctggaccccctgcccggactgtgtggcgaagctggccgaattcctgtctgagcaccccaatgtcaccctgaccatctctgccgcccgcctctactactactgggaaagagattaccgaagggcgctctgcaggctgagtcaggcaggagcccgcgtgacgatcatggactatgaagaatttgcatactgctgggaaaactttgtgtacaatgaaggtcagcaattcatgccttggtacaaattcgatgaaaattatgcattcctgcaccgcacgctaaaggagattctcagatacctgatggatccagacacattcactttcaactttaataatgaccctttggtccttcgacggcgccagacctacttgtgctatgaggtggagcgcctggacaatggcacctgggtcctgatggaccagcacatgggctttctatgcaacgaggctaagaatcttctctgtggcttttacggccgccatgcggagctgcgcttcttggacctggttccttctttgcagttggacccggcccagatctacagggtcacttggttcatctcctggagcccctgcttctcctggggctgtgccggggaagtgcgtgcgttccttcaggagaacacacacgtgagactgcgcatcttcgctgcccgcatctatgattacgaccccctatataaggaggcgctgcaaatgctgcgggatgctggggcccaagtctccatcatgacctacgatgagtttgagtactgctgggacacctttgtgtaccgccagggatgtcccttccagccctgggatggactagaggagcacagccaagccctgagtgggaggctgcgggccattctccagaatcagggaaactgaaggatgggcctcagtctctaaggaaggcagagacctgggttgagcagcagaataaaagatcttcttccaagaaatgcaaacagaccgttcaccaccatctccagctgctcacagacaccagcaaagcaatgtgctcctgatcaagtagattttttaaaaatcagagtcaattaattttaattgaaaatttctcttatgttccaagtgtacaagagtaagattatgctcaatattcccagaatagttttcaatgtattaatgaagtgattaattggctccatatttagactaataaaacattaagaatcttccataattgtttccacaaacactagcaaa

SEQ ID NO: 150607 - DNA, 1149 bp, Artificial Sequence
  derived and/or modified sequence
atgaacccccagatcagaaaccccatggagagaatgtacagagacaccttctacgacaacttcgagaacgagcccatcctgtacggcagaagctacacctggctgtgctacgaggtgaagatcaagagaggcagaagcaacctgctgtgggacaccggcgtgttcagaggccaggtgtacttcaagccccagtaccacgccgagatgtgcttcctgagctggttctgcggcaaccagctgcccgcctacaagtgcttccagatcacctggttcgtgagctggaccccctgccccgactgcgtggccaagctggccgagttcctgagcgagcaccccaacgtgaccctgaccatcagcgccgccagactgtactactactgggagagagactacagaagagccctgtgcagactgagccaggccggcgccagagtgaccatcatggactacgaggagttcgcctactgctgggagaacttcgtgtacaacgagggccagcagttcatgccctggtacaagttcgacgagaactacgccttcctgcacagaaccctgaaggagatcctgagatacctgatggaccccgacaccttcaccttcaacttcaacaacgaccccctggtgctgagaagaagacagacctacctgtgctacgaggtggagagactggacaacggcacctgggtgctgatggaccagcacatgggcttcctgtgcaacgaggccaagaacctgctgtgcggcttctacggcagacacgccgagctgagattcctggacctggtgcccagcctgcagctggaccccgcccagatctacagagtgacctggttcatcagctggagcccctgcttcagctggggctgcgccggcgaggtgagagccttcctgcaggagaacacccacgtgagactgagaatcttcgccgccagaatctacgactacgaccccctgtacaaggaggccctgcagatgctgagagacgccggcgcccaggtgagcatcatgacctacgacgagttcgagtactgctgggacaccttcgtgtacagacagggctgccccttccagccctgggacggcctggaggagcacagccaggccctgagcggcagactgagagccatcctgcagaaccagggcaactag

SEQ ID NO: 150608 - protein, 616 aa, Artificial Sequence
  derived and/or modified sequence
MGRIGISCLFPASWHFSISPVGCPRILNTNLRQIMVISVLAAAVSLLYFSVVIIRNKYGRLTRDKKFQRYLARVTDIEATDTNNPNVNYGIVVDCGSSGSRVFVYCWPRHNGNPHDLLDIRQMRDKNRKPVVMKIKPGISEFATSPEKVSDYISPLLNFAAEHVPRAKHKETPLYILCTAGMRILPESQQKAILEDLLTDIPVHFDFLFSDSHAEVISGKQEGVYAWIGINFVLGRFEHIEDDDEAVVEVNIPGSESSEAIVRKRTAGILDMGGVSTQIAYEVPKTVSFASSQQEEVAKNLLAEFNLGCDVHQTEHVYRVYVATFLGFGGNAARQRYEDRIFANTIQKNRLLGKQTGLTPDMPYLDPCLPLDIKDEIQQNGQTIYLRGTGDFDLCRETIQPFMNKTNETQTSLNGVYQPPIHFQNSEFYGFSEFYYCTEDVLRMGGDYNAAKFTKAAKDYCATKWSILRERFDRGLYASHADLHRLKYQCFKSAWMFEVFHRGFSFPVNYKSLKTALQVYDKEVQWTLGAILYRTRFLPLRDIQQEAFRASHTHWRGVSFVYNHYLFSGCFLVVLLAILLYLLRLRRIHRRTPRSSSAAALWMEEGLPAQNAPGTL

SEQ ID NO: 150609 - DNA, 1851 bp, Artificial Sequence
  derived and/or modified sequence
atgggcagaatcggcatcagctgcctgttccccgccagctggcacttcagcatcagccccgtgggctgccccagaatcctgaacaccaacctgagacagatcatggtgatcagcgtgctggccgccgccgtgagcctgctgtacttcagcgtggtgatcatcagaaacaagtacggcagactgaccagagacaagaagttccagagatacctggccagagtgaccgacatcgaggccaccgacaccaacaaccccaacgtgaactacggcatcgtggtggactgcggcagcagcggcagcagagtgttcgtgtactgctggcccagacacaacggcaacccccacgacctgctggacatcagacagatgagagacaagaacagaaagcccgtggtgatgaagatcaagcccggcatcagcgagttcgccaccagccccgagaaggtgagcgactacatcagccccctgctgaacttcgccgccgagcacgtgcccagagccaagcacaaggagacccccctgtacatcctgtgcaccgccggcatgagaatcctgcccgagagccagcagaaggccatcctggaggacctgctgaccgacatccccgtgcacttcgacttcctgttcagcgacagccacgccgaggtgatcagcggcaagcaggagggcgtgtacgcctggatcggcatcaacttcgtgctgggcagattcgagcacatcgaggacgacgacgaggccgtggtggaggtgaacatccccggcagcgagagcagcgaggccatcgtgagaaagagaaccgccggcatcctggacatgggcggcgtgagcacccagatcgcctacgaggtgcccaagaccgtgagcttcgccagcagccagcaggaggaggtggccaagaacctgctggccgagttcaacctgggctgcgacgtgcaccagaccgagcacgtgtacagagtgtacgtggccaccttcctgggcttcggcggcaacgccgccagacagagatacgaggacagaatcttcgccaacaccatccagaagaacagactgctgggcaagcagaccggcctgacccccgacatgccctacctggacccctgcctgcccctggacatcaaggacgagatccagcagaacggccagaccatctacctgagaggcaccggcgacttcgacctgtgcagagagaccatccagcccttcatgaacaagaccaacgagacccagaccagcctgaacggcgtgtaccagccccccatccacttccagaacagcgagttctacggcttcagcgagttctactactgcaccgaggacgtgctgagaatgggcggcgactacaacgccgccaagttcaccaaggccgccaaggactactgcgccaccaagtggagcatcctgagagagagattcgacagaggcctgtacgccagccacgccgacctgcacagactgaagtaccagtgcttcaagagcgcctggatgttcgaggtgttccacagaggcttcagcttccccgtgaactacaagagcctgaagaccgccctgcaggtgtacgacaaggaggtgcagtggaccctgggcgccatcctgtacagaaccagattcctgcccctgagagacatccagcaggaggccttcagagccagccacacccactggagaggcgtgagcttcgtgtacaaccactacctgttcagcggctgcttcctggtggtgctgctggccatcctgctgtacctgctgagactgagaagaatccacagaagaacccccagaagcagcagcgccgccgccctgtggatggaggagggcctgcccgcccagaacgcccccggcaccctgtag

SEQ ID NO: 150610 - DNA, 5861 bp, Artificial Sequence
  derived and/or modified sequence
gcaggcggtgacgtgttgccggcgggggccgggcgggggtgcggctccaggaaaggagcgcggcctccaggaagccggctggccgtgatgctgcccactggtggtcccccgctcccggggtccccggccggccaagcaggagggctctaactccgtgaggaccccagcattatttctataattgtttgtgagaaggactgaatcccagagcattgccttgttgctgacctttcagtatggggaggattggcatctcctgtctttttcctgcttcttggcattttagcatatctccagtagggtgtcctcgaattctgaataccaatttacgccaaattatggtcattagtgtcctggctgctgctgtttcacttttatatttttctgttgtcataatccgaaataagtatgggcgactaaccagagacaagaaatttcaaaggtacctggcacgagttaccgacattgaagctacagacaccaataaccccaatgtgaactatgggatcgtggtggactgtggtagcagtgggtctcgagtatttgtttactgctggccaaggcataatggcaatccacatgatctgttggatatcaggcaaatgagggataaaaaccgaaagccagtggtcatgaagataaaaccgggcatttcagaatttgctacctctccagagaaagtcagtgattacatttctccacttttgaactttgctgcagagcatgtgccacgggcaaaacacaaagagacacctctctacattctctgcacggctggaatgagaatcctccccgaaagccagcagaaagctattctggaagaccttctgaccgatatccccgtgcactttgactttctgttttctgactctcatgcagaagtaatttctgggaaacaagaaggtgtgtatgcttggattggcattaattttgtccttggacgatttgagcatattgaagatgatgatgaggccgttgtggaagttaacattcctggaagtgaaagcagcgaagccattgtccgtaaaaggacagcgggcattctcgacatgggcggcgtgtcgactcagatagcgtacgaagtccccaaaactgtaagctttgcgtcctcacagcaggaagaagtagctaaaaacttgttagctgaatttaacttgggatgtgatgttcaccaaactgagcatgtgtatcgagtctatgtggccacgtttcttgggtttggtggcaatgctgctcgacagagatacgaagacagaatatttgccaacaccattcaaaagaacaggctcctgggtaaacagactggtctgactcctgatatgccgtacttggacccctgcctacccctagacattaaagatgaaatccagcaaaatggacaaaccatatacctacgagggactggagactttgacctgtgtcgagagactatccagcctttcatgaataaaacaaacgagacccagacttccctcaatggggtctaccagcccccaattcacttccagaacagtgaattctatggcttctccgaattctactactgcaccgaggatgtgttacgaatggggggagactacaatgctgctaaatttactaaagctgcaaaggattattgtgcaacaaagtggtccattttgcgggaacgctttgaccgaggactgtacgcctctcatgctgacctccacaggcttaagtatcagtgcttcaaatcggcctggatgtttgaggtgtttcataggggcttttcgtttcctgtcaactataaaagcttaaagactgccttgcaagtttacgacaaggaggttcagtggacccttggagccatcctctacaggacccgctttctaccattaagagacatccagcaggaggccttccgagccagtcacacccactggcggggcgtttcctttgtctacaaccactacctgttctctggctgcttcctggtggtgctgctggccatcctgctgtacctgctgcggctgcggcgcatccacaggcgcactccccggagcagctcggccgccgccctctggatggaggagggccttcccgcccagaatgccccggggaccttgtgatccagctcacagctccacgaagactcaaaaggaaaagccatttttgcctcagggtttctcctctttattttcctgtggttttgttttttctttcccttttttgttcctccaaacaaaaacaaaatgcaggccgagcgcggtggctcacgcctgtaatcccagcactttgggaggccgaggcgggcggatcatgaggtcaggagatcgagaccatcctggctaacacggtgaaaccccgtctctactaaaaatacaaaaaattagctgggtgtggtggcgggcgcccgtagtcccagctactcaggaggctgaggcaggagaatggcatgaacctgggaggcagagcttgcagtgagccgagatcacaccactgcactccagcctgggcgacagagtgagactccgtctcaaaaaaaaaaaatgcattgtttataagccctgctgtctagaagtattgcgtttagccattttgagtacagcattaaattgaggagtggggaagagggaaattcacttgatttttgctgcacaggatatctgccaaaaataaatgagatttctggggtttctctaaggaatgttaaatttaaacacatgcactttgatactggagggaggtggaaagatgcattctgtcagtggagaggggactgaatagtgatgctttcatagaaccaaaaaacttactgcctgaaatgataatcctcttttttctctatcttgaaagctctaacctgaagagggtgatttttttttttatttattgttcaggtctgttactgtatatgttttctttgcaaatttaaattttttaaaccatttatatccaaaacagagaaacatgggcaccaggagataaccatttataaaagtgatagtgaactatcgactacagctttgtgcgagtgtgtgaaaaatcccaagaaaccagcgtgaggggaggcaatgctggttctttaaaaacacacacttcagaatttactggtacattttatttagaaaaatcctcgttactgttatcttttcctgaccgcaggtaattacgctccttattccatatttcagtggcattagaacactgtggttttgaaagaattggaaattcctagtttcaccagtttcggttttattggaactagagcacatgcccacttcttgctcagtattcctcagtgtttctgcttaatcgtgcctcagtttcttccagcttccaattggtgtttcccccaccccccttaattaaaagtcatctcagcttttaatcgtactgggagaccccatgcacagcctgccgagtcctcttcctaaccgcattgactgaggctgttgctggcagcaccactgtaaatccagaagggaagagtctgcatccaatacaggaaataaattcacattttgaaggaaaaaattcgacaatttaagccaaaatctaaaaaggacaattggattggcatatgtgagattggtgttttttcacctatttatttagttgagaagtttggggaattctcgtacagtttttttaggtggagtttgttttgtgcgagtgtctgtgtgtgctgttccctaactccagaacagttaaattcctgtagttggtagcagattagtacccagaagtggggttgttgctataacagataactgaggatattataaaagtggctttggaactaggtactgggcagaggctgggagagtttggagaaacaggagagaaaaggcctgtattgccatgaactgagcattaggggcagttctgctgagggatcagaagagaagaccaagggaattctgtcccagttgtggctcaaactgcctcaggtgcagcttaacctgcgtctctggaaggtaaaatgcatctgatccttgaggcaagagctgtgggggcatggctccctcacctggatttcaaagcgtgttaccagcagcctggggacccaggctctgcctctggatttacctgcatcgtatttgcgcttcgtggtcaaagttgttaagaaaggggtgagcttctggctacctaataagttggtcttggccacctgcctgcgacacttcctggaggagccatggattattggtggaggctgcagggagctggcgatggagccactggtgtcagcagcagagagggaagaaaggaaaggaaggggccacaaatggttgaagtgggcaggtgggcacccagggagttaggggaccccgccttccagctctgggcatagaagagttagtcacatacctgaggatcctgaaacaagggctgagaaaacctcattgctccagctgagaggtagtagtggatttgccatttttaaacagttgcctaagaaaaaacgttgaagaatatgcagcagacactatatgtggcctgtaaagcctagaatatttactaaaatatttacagaaaaagtttgctggtccttgtgagaacaatgcagttcaaaaaaggatacagacagaagcatcctcttaaatcaggaatgtagtttccatttgtgggcacgaaaagatggacaagagaagtaaccaaacttcaatcttaaaatatttgttgcaccagaatttcacttcggatttttccgtctagattattttcaagatgagttttgaaacaaaccaagaaacctgcccctcacccaaaattgtttaaaaagagaccactcaagggagttcattatgccgtatggagatgtctgcagtcgcagcaaatcacattccagagaaggtctcgcgtaggtgaagacagccaggtgctttctctaagagatacagggtgggtgagagacaagccagggaggatcttaattcaagagaagaattcataccaagagctgaccaagaaggcagtaaattctgtgtacttgtagcagaagaaattggactaggaacttgcccaaagctttatcaaagaaaagcattgtgttcaatcttggtagaaacatgccagcaataagtgcttatgttccatagccatatcatgggcttctcacttttaaacctcctccaggggatgttctcagacatttcacaatccctctggggacattacagtagaagagaaacacatggaactgtaccagtgctttttgcccatgttcatcctaagctccggctttaggcagtgctttctgacctgggcggagtgaagacgctgctggtggctgaggccagtaacatggggcccctgcccagccaccctgaaggctgggtaggtccctcttttcaccaccagttttccacatctgtgtactctagattaacaaactctggataaacagatatttacattttaaactcaggcctacacagagtagttttccttataaggagcatgtatcacttagcaagaaactaaaaatggcaaatgagtttttcatcctttaagaaaaaaatcagctttagaattctctgcggtcagttgtgtgcaatgcaacaaaactacctttcagtaaattacttagttatttatttcagtgttttgtttcttttgatactaagtttccctttcaataatgaatgatgtgaccaaccaaggagaatttgtttgttctgtactaaaattatattttacagttaggaattataaaaagcaagggagcatctttaaatgttttttgtttaagcgatgtcttccatccaaagtaagaataatactctcggaaggtccttttggtgtcatgtcacttgctgtatgtggcagccttacagtgccacacttgggtactgaaaaatcaataaaacgaaagttcatcatcccatggcccgtag

SEQ ID NO: 150611 - DNA, 1851 bp, Artificial Sequence
  derived and/or modified sequence
atgggacggataggaatatcctgcttattcccagcctcgtggcacttcagcatcagccccgtgggctgtcctaggattctaaacactaatcttcgccaaatcatggtaatcagtgtattggctgcagccgtctccctgctctatttcagcgtggtgattatccgcaacaaatacggtagactcacccgggacaagaagtttcagcggtatcttgcacgggtgactgacatcgaggcaacagatacaaacaatcccaatgtaaactacgggatcgtagtcgattgtggatccagcgggtcaagggttttcgtgtactgctggccccggcataacggaaatccacatgacctcttagacattagacagatgagggacaagaatagaaaacccgtcgttatgaagatcaagcccggtatttctgaatttgcaacatcacctgagaaggtgtctgattatatttcgccgcttctgaactttgcagcggagcacgtgcctcgcgccaagcataaggagacaccactgtatatcctgtgcacagcaggaatgaggattctgcccgaatctcagcagaaagcgatcttggaagatctactgacggacatccccgttcactttgattttttattttctgattctcacgcagaggtgatctcaggaaaacaggagggcgtatacgcctggatcggcattaacttcgttctaggccgttttgagcacatcgaagatgatgacgaggccgtggtcgaagttaatatcccaggaagcgagagttcagaggccattgttcggaagcggacagccggaatactggacatgggcggcgtgtcaacccagatagcttatgaggtccctaagaccgtcagcttcgcttcaagccagcaggaggaggtggcaaagaacctgttggccgagttcaatcttggctgcgatgtccaccaaaccgaacatgtatatagggtttatgtggccaccttcctcggcttcggcgggaatgcagcccgccagcgatatgaagacagaatctttgctaacaccatccagaagaacagactcctagggaaacagactgggctgacaccagacatgccatatctggacccatgcttgccccttgatatcaaggacgaaatccaacaaaatgggcaaacaatatacctccgaggtactggggatttcgatctgtgtcgtgaaacgattcaaccctttatgaacaagacaaacgaaacccagacaagccttaatggcgtgtaccagccacctattcacttccaaaactccgagttctacggcttttctgagttctattattgtaccgaagatgtgctgcggatggggggggactacaacgctgcgaagtttactaaagcagctaaggactattgcgccacaaagtggtccatcctgagagaaaggtttgatcgagggttatatgcctcccatgctgacctgcacaggttgaaatatcagtgcttcaaaagcgcttggatgtttgaggtgttccacaggggcttttcctttccggtcaactataagagtctgaagacagctctgcaagtgtatgacaaagaggtccagtggaccttgggggctatcctgtatcgcacacggttccttccattacgagacattcagcaggaggccttcagagcaagccatacccactggcgcggggttagctttgtctataaccactacctgttctccggctgtttcctcgtggtcctcttggcaatattgctgtatttactgagactcagacgaattcatagaaggacccctcgatctagctccgccgctgccttgtggatggaagaaggactgcctgcccaaaatgccccaggcacgctgtag

SEQ ID NO: 150612 - DNA, 1851 bp, Artificial Sequence
  derived and/or modified sequence
atgggccgcatcggcatcagctgcctcttccctgcctcctggcacttcagcatcagccctgtgggctgcccccgcatcctgaacaccaacctgcggcagatcatggtgatctctgtgctggccgctgctgtgtccctgctgtacttctctgtggtgatcatccggaacaagtatggccgcctgacccgggacaagaagttccagcgctacctggcccgggtgacagacatcgaggccacagacaccaacaaccccaacgtgaactatggaattgtggtggactgtggcagcagcggcagccgggtgtttgtgtactgctggcccaggcacaatggaaacccccatgacctgctggacatccggcagatgagggacaagaacaggaagcctgtggtgatgaagatcaagccaggcatcagcgagtttgccaccagccctgagaaggtgtctgactacatcagccccctgctgaactttgctgctgagcacgtgccccgggccaagcacaaggagacccccctgtacatcctgtgcacagctggcatgaggatcctgcctgagagccagcagaaggccatcctggaggacctgctgacagacatccctgtgcactttgacttcctgttcagtgacagccacgccgaggtgatcagcggcaagcaggagggcgtgtatgcctggattggcatcaactttgtgctgggccgctttgagcacattgaagatgatgatgaggccgtggtggaggtgaacatccctggcagcgagagcagcgaggccatcgtgaggaagaggacagctggcatcctggacatgggcggcgtgtccacccagatcgcctatgaggtgcccaagacagtgtcctttgccagcagccagcaggaggaggtggccaagaacctgctggccgagttcaacctgggctgtgatgtgcaccagacagagcacgtgtacagagtgtatgtggccaccttcctgggctttggaggaaatgctgcccggcagagatatgaggaccgcatctttgccaacaccatccagaagaaccggctgctgggcaagcagacaggcctgaccccagacatgccctacctggacccctgcctgcccctggacatcaaggatgagatccagcagaatggccagaccatctacctgcggggcactggagactttgacctgtgccgggagaccatccagcccttcatgaacaagaccaatgagacccagaccagcctgaatggagtgtaccagccccccatccacttccagaacagcgagttctacggcttcagcgagttctactactgcacagaagatgtgctgaggatgggcggggactacaatgctgccaagttcaccaaggccgccaaggactactgtgccaccaagtggagcatcctgcgggagagatttgaccggggcctgtatgccagccatgctgacctgcaccggctgaagtaccagtgcttcaagagcgcctggatgtttgaggtgttccaccggggcttctccttccctgtgaactacaagagcctgaagacagccctgcaggtgtatgacaaggaggtgcagtggaccctgggcgccatcctgtaccgcacccgcttcctgcccctgcgggacatccagcaggaggccttccgggccagccacacccactggaggggcgtgtcctttgtgtacaaccactacctgttcagcggctgcttcctggtggtgctgctggccatcctgctgtacctgctgcggctgcggcgcatccacaggaggacccccaggagcagcagcgctgctgccctgtggatggaggagggcctgcctgcccagaatgcccctggcaccctgtag

SEQ ID NO: 150613 - DNA, 1851 bp, Artificial Sequence
  derived and/or modified sequence
atgggccggatcggcatcagctgcctgttccccgccagctggcacttttcaatctccccagtcgggtgcccccggatcctgaataccaatttacggcagatcatggtcattagtgtcctggcagccgctgtctctttattgtacttttctgtcgtcatcattcggaacaaatatgggaggctaacccgtgataaaaagtttcagagatatttggcaagagtcacagacattgaggctactgataccaataaccccaacgtcaactatggaatcgtggtggactgtggaagcagcgggtcacgcgtctttgtttattgctggccccggcataacggaaacccacatgacctgctggatatcagacagatgagggataagaaccgaaagccagtagttatgaaaattaaacccggcatatccgaattcgcaactagccctgaaaaggtctcggactatatatcaccgctcctgaattttgctgccgaacacgttccccgcgcgaagcacaaagaaacccccctctacatcctctgcacggcgggtatgcggatcttgccagagagccagcagaaggctatcttggaagacctgctcaccgatattccggtccacttcgactttctattttcagattcgcatgccgaagtgatcagcggaaaacaggaaggagtgtacgcttggattggcattaatttcgtattgggccgctttgaacacatcgaggatgacgatgaggccgtcgtggaggtgaacattcccggatccgaaagttcagaggctatcgttcggaagcggacagccggaattctcgatatgggcggagtttccacgcagattgcatatgaggttcctaagactgtttcattcgcatcctcgcagcaggaggaggttgccaaaaatctgctggccgaatttaacctaggctgcgacgtgcaccagacagaacacgtgtatagagtctatgtagctacattcctcgggttcggcggaaacgcagctcgccagagatacgaggaccggatcttcgcaaataccatccaaaagaaccgactcctgggaaagcagaccggtcttacgccagatatgccatacctggatccatgccttcccctggacatcaaagatgaaattcaacagaacgggcagacgatttatcttagaggcaccggcgacttcgatctgtgccgagaaaccattcagcccttcatgaataagaccaatgagactcagacttctttaaatggcgtgtatcaaccacccatccacttccagaatagcgagttttacggtttttctgagttttactattgtaccgaagacgttttacgcatgggcggggattataatgcagccaaattcaccaaggcagccaaagactattgcgcgacgaaatggtccattctgcgggaaagattcgatagagggctctatgcatctcacgccgacttgcacagacttaaataccagtgctttaagtccgcatggatgtttgaggtgttccatcgtgggttttccttccctgtgaattataagagcctcaaaacagctctgcaggtatatgacaaggaagtacagtggaccctaggcgcaatcctctataggaccagattcctgccactgcgtgacatacaacaagaggcttttagggcttctcacactcactggagaggcgtatcattcgtatacaatcattatctcttctcaggatgcttcctcgttgtcctgctggccattttgctctacctgctacggctccgtagaatacataggcggactccccgttcctcttctgcagcggccctttggatggaggagggactccctgctcagaacgccccaggaacgctgtag

SEQ ID NO: 150614 - DNA, 1851 bp, Artificial Sequence
  derived and/or modified sequence
atggggaggattggaatctcatgcctgtttccagccagctggcacttctctatctcaccagtgggttgccctaggatcctgaacaccaacctgcggcaaattatggtcatttctgtgttagctgctgccgtgtcacttttatattttagcgtggttattattcggaacaaatatggccgtctgacacgcgacaagaagtttcagcggtacttagcaagggtgacagatattgaggccacagacaccaacaaccctaatgtgaattacgggatcgtggtggactgtggcagcagtggctcgcgagttttcgtgtactgttggcctcgtcacaatggcaatccacacgatctcttggatattagacagatgcgagacaagaacagaaagcccgtagtcatgaagatcaagccagggatctccgagttcgccaccagccccgagaaagtttccgactatatctcgccactgttgaacttcgctgctgagcacgtgcccagagccaagcacaaagaaacaccattgtatatcctctgcacagcaggcatgcgcatcctgcccgaatctcagcaaaaggccatattggaggacctgttaactgatatcccggttcacttcgattttcttttttctgatagtcatgccgaggtcataagcggtaagcaggaaggagtgtatgcctggattggaatcaatttcgtgctgggacggtttgaacatatagaggacgatgatgaggcggttgtggaagtgaatatccccggatcagagtcctccgaggctatcgttcggaagcgaactgccggaattctggacatgggaggagtgtctacacaaatcgcctacgaggttccaaaaaccgtatcctttgcatccagccagcaggaggaggtcgcaaagaacctgcttgcggagtttaacctgggatgtgacgtacaccaaacggagcatgtgtaccgcgtttatgtagctacgttcctgggctttgggggtaatgcagccaggcagagatacgaggaccggattttcgcgaatacaattcagaagaaccgactgctaggcaaacagacagggctgacccctgacatgccatatctcgacccctgtctccccctcgatattaaggatgaaatccagcagaatggccagacaatatatctgcgcggtaccggagattttgacctgtgccgcgaaacgatccaaccctttatgaacaagacaaacgaaacccaaacatctttaaacggggtataccagccgcctatccactttcaaaactccgaattttatgggttctccgaattctattactgcacagaggacgtgttaagaatgggtggcgattacaacgcagcaaagttcacgaaagcagccaaggactactgcgccacaaagtggtcgattttaagggaacggtttgaccgcggattgtacgcctctcacgcagatctccatcgcctaaaataccagtgctttaagtccgcctggatgttcgaggtttttcaccgtggcttctcgttccctgtgaattataagtctcttaaaactgccctgcaagtttacgacaaggaagtccagtggaccctgggcgcaattctgtaccgcacacggtttttacctctgagagatatccaacaggaagctttccgagcctcacatacccattggcgtggggtaagttttgtgtataaccactacctattctcaggatgttttctcgtggtattattagctatcctgttgtacctgcttaggttgcgacgcatccaccgcaggacacccagatcatcaagtgcagccgctctatggatggaagagggccttcctgctcaaaacgctcccggtaccctctag

SEQ ID NO: 150615 - protein, 423 aa, Artificial Sequence
  derived and/or modified sequence
MADDIDIEAMLEAPYKKDENKLSSANGHEERSKKRKKSKSRSRSHERKRSKSKERKRSRDRERKKSKSRERKRSRSKERRRSRSRSRDRRFRGRYRSPYSGPKFNSAIRGKIGLPHSIKLSRRRSRSKSPFRKDKSPVREPIDNLTPEERDARTVFCMQLAARIRPRDLEEFFSTVGKVRDVRMISDRNSRRSKGIAYVEFVDVSSVPLAIGLTGQRVLGVPIIVQASQAEKNRAAAMANNLQKGSAGPMRLYVGSLHFNITEDMLRGIFEPFGRIESIQLMMDSETGRSKGYGFITFSDSECAKKALEQLNGFELAGRPMKVGHVTERTDASSASSFLDSDELERTGIDLGTTGRLQLMARLAEGTGLQIPPAAQQALQMSGSLAFGAVADLQTRLSQQTEALFVIMFWNEIWSDNMITLQL

SEQ ID NO: 150616 - protein, 524 aa, Artificial Sequence
  derived and/or modified sequence
MADDIDIEAMLEAPYKKDENKLSSANGHEERSKKRKKSKSRSRSHERKRSKSKERKRSRDRERKKSKSRERKRSRSKERRRSRSRSRDRRFRGRYRSPYSGPKFNSAIRGKIGLPHSIKLSRRRSRSKSPFRKDKSPVREPIDNLTPEERDARTVFCMQLAARIRPRDLEEFFSTVGKVRDVRMISDRNSRRSKGIAYVEFVDVSSVPLAIGLTGQRVLGVPIIVQASQAEKNRAAAMANNLQKGSAGPMRLYVGSLHFNITEDMLRGIFEPFGRIESIQLMMDSETGRSKGYGFITFSDSECAKKALEQLNGFELAGRPMKVGHVTERTDASSASSFLDSDELERTGIDLGTTGRLQLMARLAEGTGLQIPPAAQQALQMSGSLAFGAVADLQTRLSQQTEASALAAAASVQPLATQCFQLSNMFNPQTEEEVGWDTEIKDDVIEECNKHGGVIHIYVDKNSAQGNVYVKCPSIAAAIAAVNALHGRWFAGKMITAAYVPLPTYHNLFPDSMTATQLLVPSRR

SEQ ID NO: 150617 - protein, 231 aa, Artificial Sequence
  derived and/or modified sequence
MADDIDIEAMLEAPYKKDENKLSSANGHEERSKKRKKSKSRSRSHERKRSKSKERKRSRDRERKKSKSRERKRSRSKERRRSRSRSRDRRFRGRYRSPYSGPKFNSAIRGKIGLPHSIKLRRRSRSKSPFRKDKSPVREPIDNLTPEERDARTVFCMQLAARIRPRDLEEFFSTVGKVRDVRMISDRNSRRSKGIAYVEFVDVSSVPLAIGLTGQRVLGVPIIVQASQAEK

SEQ ID NO: 150618 - DNA, 1272 bp, Artificial Sequence
  derived and/or modified sequence
atggccgacgacatcgacatcgaggccatgctggaggccccctacaagaaggacgagaacaagctgagcagcgccaacggccacgaggagagaagcaagaagagaaagaagagcaagagcagaagcagaagccacgagagaaagagaagcaagagcaaggagagaaagagaagcagagacagagagagaaagaagagcaagagcagagagagaaagagaagcagaagcaaggagagaagaagaagcagaagcagaagcagagacagaagattcagaggcagatacagaagcccctacagcggccccaagttcaacagcgccatcagaggcaagatcggcctgccccacagcatcaagctgagcagaagaagaagcagaagcaagagccccttcagaaaggacaagagccccgtgagagagcccatcgacaacctgacccccgaggagagagacgccagaaccgtgttctgcatgcagctggccgccagaatcagacccagagacctggaggagttcttcagcaccgtgggcaaggtgagagacgtgagaatgatcagcgacagaaacagcagaagaagcaagggcatcgcctacgtggagttcgtggacgtgagcagcgtgcccctggccatcggcctgaccggccagagagtgctgggcgtgcccatcatcgtgcaggccagccaggccgagaagaacagagccgccgccatggccaacaacctgcagaagggcagcgccggccccatgagactgtacgtgggcagcctgcacttcaacatcaccgaggacatgctgagaggcatcttcgagcccttcggcagaatcgagagcatccagctgatgatggacagcgagaccggcagaagcaagggctacggcttcatcaccttcagcgacagcgagtgcgccaagaaggccctggagcagctgaacggcttcgagctggccggcagacccatgaaggtgggccacgtgaccgagagaaccgacgccagcagcgccagcagcttcctggacagcgacgagctggagagaaccggcatcgacctgggcaccaccggcagactgcagctgatggccagactggccgagggcaccggcctgcagatcccccccgccgcccagcaggccctgcagatgagcggcagcctggccttcggcgccgtggccgacctgcagaccagactgagccagcagaccgaggccctgttcgtgatcatgttctggaacgagatctggagcgacaacatgatcaccctgcagctgtag

SEQ ID NO: 150619 - DNA, 1575 bp, Artificial Sequence
  derived and/or modified sequence
atggccgacgacatcgacatcgaggccatgctggaggccccctacaagaaggacgagaacaagctgagcagcgccaacggccacgaggagagaagcaagaagagaaagaagagcaagagcagaagcagaagccacgagagaaagagaagcaagagcaaggagagaaagagaagcagagacagagagagaaagaagagcaagagcagagagagaaagagaagcagaagcaaggagagaagaagaagcagaagcagaagcagagacagaagattcagaggcagatacagaagcccctacagcggccccaagttcaacagcgccatcagaggcaagatcggcctgccccacagcatcaagctgagcagaagaagaagcagaagcaagagccccttcagaaaggacaagagccccgtgagagagcccatcgacaacctgacccccgaggagagagacgccagaaccgtgttctgcatgcagctggccgccagaatcagacccagagacctggaggagttcttcagcaccgtgggcaaggtgagagacgtgagaatgatcagcgacagaaacagcagaagaagcaagggcatcgcctacgtggagttcgtggacgtgagcagcgtgcccctggccatcggcctgaccggccagagagtgctgggcgtgcccatcatcgtgcaggccagccaggccgagaagaacagagccgccgccatggccaacaacctgcagaagggcagcgccggccccatgagactgtacgtgggcagcctgcacttcaacatcaccgaggacatgctgagaggcatcttcgagcccttcggcagaatcgagagcatccagctgatgatggacagcgagaccggcagaagcaagggctacggcttcatcaccttcagcgacagcgagtgcgccaagaaggccctggagcagctgaacggcttcgagctggccggcagacccatgaaggtgggccacgtgaccgagagaaccgacgccagcagcgccagcagcttcctggacagcgacgagctggagagaaccggcatcgacctgggcaccaccggcagactgcagctgatggccagactggccgagggcaccggcctgcagatcccccccgccgcccagcaggccctgcagatgagcggcagcctggccttcggcgccgtggccgacctgcagaccagactgagccagcagaccgaggccagcgccctggccgccgccgccagcgtgcagcccctggccacccagtgcttccagctgagcaacatgttcaacccccagaccgaggaggaggtgggctgggacaccgagatcaaggacgacgtgatcgaggagtgcaacaagcacggcggcgtgatccacatctacgtggacaagaacagcgcccagggcaacgtgtacgtgaagtgccccagcatcgccgccgccatcgccgccgtgaacgccctgcacggcagatggttcgccggcaagatgatcaccgccgcctacgtgcccctgcccacctaccacaacctgttccccgacagcatgaccgccacccagctgctggtgcccagcagaagatag

SEQ ID NO: 150620 - DNA, 1272 bp, Artificial Sequence
  derived and/or modified sequence
atggctgatgatatagacatcgaggccatgctggaagctccatacaagaaggacgaaaacaaactgtcatccgctaatgggcatgaggagaggtccaagaagcgcaaaaaaagcaagtcgcgctctagatcacacgaacggaagagaagcaaatctaaggaaaggaaaagaagtcgcgatagagaacggaagaagagcaaatcccgggaaaggaagcggagccggtccaaagagcgtagaagaagccgtagccgtagtagagaccgacgttttcgcggtcgctatagaagtccatatagcgggccaaagttcaattctgccattcgtggcaagatcggactccctcacagcatcaagctaagccgaagacgatctcgctccaagagcccatttcggaaagacaagagtccagtgcgggagccgattgacaacttaacgccagaggagcgcgatgctagaaccgtcttttgcatgcaactcgccgcccgcattcgaccgcgggatctagaggaatttttttcaactgtgggcaaggtgcgggatgtgaggatgatctccgaccgcaacagtcgccgaagcaagggtattgcctatgtggagttcgttgacgtatcatccgtgccactcgcgatcgggttaaccggccagagggtgctgggtgtgcctattattgtacaggcttctcaggccgaaaagaaccgcgcagcagccatggccaacaacctacagaaggggagtgcggggccgatgaggctctatgtggggtctctgcactttaacatcaccgaggacatgctcaggggcatattcgagccctttggccgcattgagtccattcagttgatgatggactcggagaccggtcgttcgaaggggtacgggtttattaccttttctgacagtgagtgcgctaaaaaggccctggaacagctgaacggcttcgaactggctgggcgccccatgaaagtgggccatgtcaccgagaggaccgacgccagtagcgcttcgagctttctggattccgacgagctggaacgaaccggaatcgacttggggacaacgggacgcctgcagctgatggcacgcctcgcggagggtacagggctccaaattccaccagctgcgcagcaggcgttgcagatgagcggctcgttagcgtttggagccgtcgccgacctgcagacacgacttagtcagcagaccgaggctttgttcgtgattatgttctggaacgaaatttggtctgacaacatgatcaccctgcaactctag

SEQ ID NO: 150621 - DNA, 1575 bp, Artificial Sequence
  derived and/or modified sequence
atggccgacgacatcgacattgaggccatgctggaggccccatataaaaaagacgaaaataaattgtccagcgctaatgggcatgaagagagatccaaaaagcggaagaagtccaaatcaagatcacggtcccacgaaagaaaaaggtccaagagtaaggaaaggaaacggtctcgggaccgggagaggaaaaagagcaaatcacgagaaagaaagagatcccgctcaaaagagcgtcggagatcccgctcccgcagcagagatcgacgatttcgggggaggtaccgaagcccttactcggggcccaagtttaacagcgcgattagggggaaaatcggactgcctcacagcattaagttgagtcgcaggcggagtcgctctaaatctccctttcggaaggacaagtctcccgttcgggagcccatcgataatctgacgcctgaggaaagagacgcaaggacagtgttctgcatgcagctcgctgctcgtattcgaccccgggatctggaggagtttttctccacggtcgggaaagtgagggatgtgcggatgatatcagaccgcaatagccggaggtccaagggcatagcctacgttgaatttgtggatgtgagtagtgtccccttagctatcggcttaacaggacaacgagtcctgggagtgcccataatcgtccaggcttcccaggccgaaaagaatagagctgctgcaatggcaaacaatctccagaagggctctgctggacccatgagactgtatgtgggaagcctgcatttcaacatcacagaggatatgctcagaggcatttttgaaccgttcgggcgaattgagagcattcagctcatgatggattcagaaaccggcaggagtaaggggtacggatttattacattcagcgacagcgaatgcgctaagaaagcactcgaacagttgaacgggttcgaactggctggacgacccatgaaagtgggtcacgtgaccgaacggacagacgccagctccgcttcatcattcttggactcagatgaacttgagaggacgggaatcgatctgggcaccaccggtagactgcagttgatggcccgcctggcagagggaaccgggctgcagattcccccggctgcccaacaggcgcttcagatgagcggcagcttagcattcggcgctgtagccgacctccagactcgcctgagccaacagaccgaagcttctgctttagccgcggcagcttccgttcagcctctggccacccagtgcttccagctgtctaatatgtttaatccacagactgaggaggaagtggggtgggatacagaaataaaggatgatgtgattgaggagtgtaacaagcacggaggcgttatacacatctatgtggataagaatagcgctcagggaaatgtttacgtgaaatgcccttctatcgcagcggcaatcgctgctgtgaatgccctgcacggcagatggttcgccggcaaaatgattacagccgcctacgtccctcttcctacttaccacaatcttttcccagactctatgacagcgacacaactcctggtgccgtcgaggaggtag

SEQ ID NO: 150622 - DNA, 1272 bp, Artificial Sequence
  derived and/or modified sequence
atggctgatgacattgatattgaggccatgctggaggccccctacaagaaggatgagaacaagctgagcagcgccaacggccacgaggagaggagcaagaagaggaagaagagcaagagccgcagccgcagccatgagaggaagaggagcaagagcaaggagaggaagaggagccgggaccgggagaggaagaagagcaagagccgggagaggaagaggagccgcagcaaggagcggcggcgcagccgcagccgcagccgggaccggcgcttccggggccgctaccgcagcccctacagcggccccaagttcaacagcgccatccggggcaagattggcctgccccacagcatcaagctgagcagaagaagaagccgcagcaagagccccttcaggaaggacaagagccctgtgcgggagcccatcgacaacctgaccccagaggagagagatgccaggacagtgttctgcatgcagctggccgcccgcatccggccccgggacctggaggagttcttcagcacagtgggcaaggtgagagatgtgaggatgatcagtgacaggaacagcagaagaagcaagggcatcgcctacgtggagtttgtggatgtgtcctctgtgcccctggccatcggcctgaccggccagagggtgctgggcgtgcccatcatcgtgcaggccagccaggccgagaagaacagagctgctgccatggccaacaacctgcagaagggcagcgctggccccatgaggctgtatgtgggcagcctgcacttcaacatcacagaggacatgctgcggggcatctttgagcccttcggccgcatcgagagcatccagctgatgatggattctgaaacaggccgcagcaagggctacggcttcatcaccttcagtgacagtgaatgtgccaagaaggccctggagcagctgaatggatttgagctggccggccggcccatgaaggtgggccacgtgacagagaggacagatgccagcagcgccagcagcttcctggacagtgatgagctggagaggactggaattgacctgggcaccaccggccgcctgcagctgatggcccggctggccgagggcaccggcctgcagatccccccagctgcccagcaggccctgcagatgagcggcagcctggcctttggagctgtggccgacctgcagacccggctgagccagcagacagaggccctgtttgtgatcatgttctggaatgagatctggagcgacaacatgatcaccctgcagctgtag

SEQ ID NO: 150623 - DNA, 1575 bp, Artificial Sequence
  derived and/or modified sequence
atggctgatgacattgatattgaggccatgctggaggccccctacaagaaggatgagaacaagctgagcagcgccaacggccacgaggagaggagcaagaagaggaagaagagcaagagccgcagccgcagccatgagaggaagaggagcaagagcaaggagaggaagaggagccgggaccgggagaggaagaagagcaagagccgggagaggaagaggagccgcagcaaggagcggcggcgcagccgcagccgcagccgggaccggcgcttccggggccgctaccgcagcccctacagcggccccaagttcaacagcgccatccggggcaagattggcctgccccacagcatcaagctgagcagaagaagaagccgcagcaagagccccttcaggaaggacaagagccctgtgcgggagcccatcgacaacctgaccccagaggagagagatgccaggacagtgttctgcatgcagctggccgcccgcatccggccccgggacctggaggagttcttcagcacagtgggcaaggtgagagatgtgaggatgatcagtgacaggaacagcagaagaagcaagggcatcgcctacgtggagtttgtggatgtgtcctctgtgcccctggccatcggcctgaccggccagagggtgctgggcgtgcccatcatcgtgcaggccagccaggccgagaagaacagagctgctgccatggccaacaacctgcagaagggcagcgctggccccatgaggctgtatgtgggcagcctgcacttcaacatcacagaggacatgctgcggggcatctttgagcccttcggccgcatcgagagcatccagctgatgatggattctgaaacaggccgcagcaagggctacggcttcatcaccttcagtgacagtgaatgtgccaagaaggccctggagcagctgaatggatttgagctggccggccggcccatgaaggtgggccacgtgacagagaggacagatgccagcagcgccagcagcttcctggacagtgatgagctggagaggactggaattgacctgggcaccaccggccgcctgcagctgatggcccggctggccgagggcaccggcctgcagatccccccagctgcccagcaggccctgcagatgagcggcagcctggcctttggagctgtggccgacctgcagacccggctgagccagcagacagaggccagcgccctggccgctgctgcctctgtgcagcccctggccacccagtgcttccagctgagcaacatgttcaacccccagacagaggaggaggtgggctgggacacagagatcaaggatgatgtgattgaggagtgcaacaagcatggaggagtcatccacatctacgtggacaagaacagcgcccagggcaatgtgtatgtgaagtgccccagcattgctgctgccatcgctgctgtgaatgccctgcacggccgctggtttgctgggaagatgatcacagctgcctacgtgcccctgcccacctaccacaacctcttcccagacagcatgacagccacccagctgctggtgcccagcagaagatag

SEQ ID NO: 150624 - DNA, 1272 bp, Artificial Sequence
  derived and/or modified sequence
atggccgacgacatcgacatcgaggccatgctggaggccccctacaaaaaggacgaaaacaagctgtcctcagctaacggacacgaagagcgctctaagaagcggaaaaagagtaaaagccgctcacggtcacatgaacgtaaacgcagcaagtccaaagaacggaaacgctccagagatcgcgagcgcaagaagtcaaaatctcgcgagcggaagcggagcagaagcaaggaaaggcggcgcagccgctctagatcgcgggatagaagatttagagggcgttacaggagtccatattctggaccaaaattcaatagcgccatccggggtaagattggccttccccacagcattaaactgagccgacgtcggtctaggagtaagagcccattcagaaaagataaatcacccgttcgggagccaattgataacctcacccccgaggaaagggacgcaaggaccgtgttctgtatgcagcttgctgcacgaattaggccaagggacctcgaagagttcttttccactgtcgggaaggtcagagatgtgcggatgattagtgatcgtaattctcgcagatccaaaggaattgcctatgtggagtttgtggacgtcagtagcgtacccctcgctatcggattgaccggacaaagagtcttaggcgtgcctatcatcgtgcaggccagccaggccgaaaagaatcgggcagcagcaatggctaataacctccagaaagggtccgcaggtccaatgagattatacgtaggctctctccactttaatattaccgaagatatgctgcgaggaatctttgagccatttggacgcatcgaatctattcagctgatgatggactccgagactgggagaagcaaaggctatggcttcatcacattttcagattccgagtgcgccaaaaaagccctagaacagctcaatggcttcgagctggcgggcagacccatgaaagtcggacatgtaaccgaacgcactgatgcatccagcgctagctctttcctggattccgatgagcttgagcggaccgggatcgatcttggcacgacgggcaggttgcaactgatggctcgcctggccgaagggacaggactccaaataccccccgcagctcagcaggcactacaaatgtccggctcacttgcctttggcgccgtcgcggatctccagactagattgtcccagcagactgaggcactgttcgtcattatgttttggaacgagatctggagcgataacatgattacgctccagctgtag

SEQ ID NO: 150625 - DNA, 1575 bp, Artificial Sequence
  derived and/or modified sequence
atggccgacgacatcgacatcgaggccatgctggaggccccctacaagaaagatgaaaacaaactatcttctgccaacgggcacgaggagagaagcaagaagcgcaagaagagcaaatcacggagccgatcacatgagcgaaagcggagcaagtccaaagaaagaaagcgcagcagagatcgcgagagaaagaaaagtaagagtcgggagaggaaaaggtctcggagtaaagagcgacggcgatcacgctccagaagtagagatcggcgctttcgcggaaggtataggtctccatacagcggtccaaaattcaactcagctatacggggcaagatcggcttgcctcactcaatcaaactatcaagacgccgaagcaggtccaagagtccatttcgaaaagacaagtctcccgtgcgggaaccaatcgataacctgaccccagaggaaagggatgcccggacagttttctgcatgcagttggcagcaagaattcgccctcgcgatttggaagaattcttttccactgtgggaaaagtgcgggatgtccgcatgatctccgaccggaactcacgcaggtctaagggaatcgcatatgtggaattcgtcgacgtgagctctgtgccactcgccatcgggctaaccggccagcgcgtgctaggtgttccgatcatcgtgcaagcctctcaagctgagaaaaaccgcgctgccgcgatggctaacaaccttcagaagggtagcgccgggcctatgagactgtatgttggatcgctacattttaatatcacagaagatatgctgcggggtattttcgagccatttggcagaatcgagagcattcagctgatgatggactctgagacggggagatccaaaggctacgggtttattaccttcagcgactctgagtgcgcaaaaaaggcactggaacagttgaatggcttcgaattggccggcaggcctatgaaagttggtcacgtgaccgaacgcacagacgcgtctagcgctagcagctttttggattccgatgagttagagagaacaggtattgatttgggcacgaccgggcgactccaactgatggccagactggcggagggcactggcctgcaaattccccctgcggcacagcaggccctccagatgagtggttctttagcctttggcgccgtggcggaccttcagacacggcttagccagcagactgaggcctcggcgttagcagcagcagcatcagtccaacctctcgccacgcagtgttttcaactgtctaacatgtttaatcctcagacagaagaagaggtggggtgggacacagaaattaaggatgatgtgatagaggagtgcaataaacacgggggtgtgatacacatttatgtcgacaaaaattctgcccagggcaatgtgtatgtaaaatgtccttctattgccgctgctatcgctgctgttaatgctctgcacggacggtggtttgcaggaaagatgattaccgccgcttatgtccctctgccaacatatcacaatctcttcccagattctatgaccgccacacaacttctggtaccctcgcgccggtag

SEQ ID NO: 150626 - DNA, 1272 bp, Artificial Sequence
  derived and/or modified sequence
atggcggacgacattgacattgaagccatgttagaggccccttataaaaaagatgaaaataagcttagttccgctaacggacacgaagagcggagcaagaagcgcaaaaagtctaaaagccgtagccggtcacatgagcgaaagagatccaaatctaaagaacgaaaacgcagcagagaccgcgagcgtaagaagagcaagagcagagagagaaaacgtagcaggtccaaggagcggagacggtccaggtctcgttcccgggaccgcaggtttagagggagataccgcagcccttatagcggccctaaattcaactctgcaattaggggaaagataggattgcctcacagtataaagttgagccgacggaggtcccgtagcaaaagccccttcaggaaggataaatctcctgtacgggaaccaatcgacaatctgactccggaggaacgggacgctcggacagtgttttgtatgcagctggccgctagaatacgcccacgggacctagaggagtttttctcaactgtgggaaaagtgagggatgttagaatgatctccgatcgtaattcccgaagatccaaaggcatcgcgtacgtggaatttgtcgacgtttcctccgtgccactggcgatcgggcttaccggccagagagtgttgggagtgcccatcattgtccaggcctcccaagcggaaaaaaatagggcggctgccatggctaataacctgcagaagggatcagccggacccatgagactatatgtggggtccctgcattttaacatcacggaggatatgttgagaggaatctttgagccatttggtcgtattgagagtatccagcttatgatggacagcgagaccggtcgatccaagggctatgggttcatcaccttctccgacagcgagtgcgcgaaaaaagcactcgagcagctcaacgggttcgaattagctggtcggccaatgaaagtgggacacgtgactgaaagaaccgacgcctcctcagcctccagcttcctcgatagtgacgagttggagcgtaccggaattgatctgggaacaacaggcagactgcaactcatggccagactcgcggaaggaaccgggctgcagattcctccagcagcgcagcaagccctacagatgagtggaagtctggcattcggcgcagtggccgacctccagactcgtctttcccagcaaacggaggcgctctttgttatcatgttttggaatgagatctggtccgacaacatgatcaccctgcagctgtag

SEQ ID NO: 150627 - DNA, 1575 bp, Artificial Sequence
  derived and/or modified sequence
atggctgacgacattgacatcgaggccatgctggaggccccatacaaaaaggatgaaaataagctgtccagcgccaatggacatgaggagaggagcaaaaagagaaaaaagagcaagagcagatctaggtcccacgaacggaaacggtctaaatccaaagagcgcaaaagaagcagggaccgagagaggaaaaagtcaaaatcaagggagagaaaaaggtcacgatctaaagagcgcaggcgatcccggtccagatctagggatcgtcgtttcagaggcaggtatagatctccatacagcggacctaagtttaactctgccattcgcggtaaaatcggcctaccccacagcatcaaactcagtagaaggaggtctcggtctaagtcccctttccgtaaagacaaatctccagtgcgagagcccatcgacaaccttactcctgaggagcgcgacgccaggaccgttttttgcatgcagttggccgctagaattcgcccaagggatctcgaggagttcttcagcaccgtgggcaaagtgcgtgacgtgaggatgatttctgaccgaaacagcaggaggtcaaagggcatagcctacgtcgaatttgtggatgtgtcatccgtgccacttgcgatcggattaactggccagagagtgctgggggtcccaatcattgtccaggcatcacaggctgagaaaaaccgtgcagccgctatggccaacaatcttcagaagggatccgctggtccaatgcgactgtatgtggggtcacttcattttaacatcacagaagacatgcttcgtggcatatttgaaccttttggacgcatcgagtcaattcagctcatgatggactcagaaacaggtcgctccaagggttacggctttattactttctccgacagtgagtgtgccaagaaggccctggagcagctgaatggctttgagcttgccggacgcccaatgaaggtgggtcatgtgaccgaaagaaccgatgctagcagcgcatcttcatttctcgatagtgacgagctcgaacgtaccgggatagatctggggacaacagggaggctgcaactcatggcccgactggcagagggcacagggctacagattccccctgccgctcagcaggcacttcagatgtcgggtagtcttgcattcggtgcagtggcagacctgcagacacgtctctcccagcaaacagaggcttccgcactggctgccgcagctagcgtccagccactcgcgactcagtgttttcagctcagtaatatgtttaatccacagaccgaagaggaggtgggctgggatacagagatcaaagacgatgtgattgaagagtgcaataagcatggtggggtcatacacatatacgtcgataaaaactcagctcaggggaacgtctacgttaagtgcccttcaattgctgctgctatcgcggcagtcaacgcccttcacgggaggtggtttgccggaaagatgatcacagcagcttacgtccctctgcctacatatcacaacctgtttccagactccatgactgccactcagctcttagtgccatctcggaggtag

SEQ ID NO: 150628 - DNA, 2792 bp, Artificial Sequence
  derived and/or modified sequence
gccatttcagggagcttgtcgacgctgtcgcaggggtggatcctgagctgccgaagccgccgtcctgctctcccgcgtgggcttctctaattccattgttttttttagattctctcgggcctagccgtccttggaacccgatattcgggctgggcggttccgcggcctgggcctaggggcttaacagtagcaacagaagcggcggcggcggcagcagcagcagcagcagcagcaatctcttcccgaacacgagcaccacaggcgcccgaaggccggaacaggcgtttagagaaaatggcagacgatattgatattgaagcaatgcttgaggctccttacaagaaggatgagaacaagttgagcagtgccaacggccatgaagaacgtagcaaaaagaggaaaaaaagcaagagcagaagtcgtagtcatgaacgaaagagaagcaaaagtaaggaacggaagcgaagtagagacagagaaaggaaaaagagcaaaagccgtgaaagaaagcgaagtagaagcaaagagaggcgacggagccgctcaagaagtcgagatcgaagatttagaggccgctacagaagtccttactccggaccaaaatttaacagtgccatccgaggaaagattgggttgcctcatagcatcaaattaagcagacgacgttcccgaagcaaaagtccattcagaaaagacaagagccctgtgagagaacctattgataatttaactcctgaggaaagagatgcaaggacagtcttctgtatgcagctggcggcaagaattcgaccaagggatttggaagagtttttctctacagtaggaaaggttcgagatgtgaggatgatttctgacagaaattcaagacgttccaaaggaattgcttatgtggagttcgtcgatgttagctcagtgcctctagcaataggattaactggccaacgagttttaggcgtgccaatcatagtacaggcatcacaggcagaaaaaaacagagctgcagcaatggcaaacaatttacaaaagggaagtgctggacctatgaggctttatgtgggctcattacacttcaacataactgaagatatgcttcgtgggatctttgagccttttggaagaattgaaagtatccagctgatgatggacagtgaaactggtcgatccaagggatatggatttattacattttctgactcagaatgtgccaaaaaggctttggaacaacttaatggatttgaactagcaggaagaccaatgaaagttggtcatgttactgaacgtactgatgcttcgagtgctagttcatttttggacagtgatgaactggaaaggactggaattgatttgggaacaactggtcgtcttcagttaatggcaagacttgcagagggtacaggtttgcagattccgccagcagcacagcaagctctacagatgagtggctctttggcatttggtgctgtggcagatttgcaaacaagactttcccagcagactgaagctttgtttgttattatgttttggaatgaaatttggtcagataatatgattacgcttcagctttagctgcagctgcctctgttcagccacttgcaacacaatgtttccaactctctaacatgtttaaccctcaaacagaagaagaagttggatgggataccgagattaaggatgatgtgattgaagaatgtaataaacatggaggagttattcatatttatgttgacaaaaattcagctcagggcaatgtgtatgtgaagtgcccatcaattgctgcagctattgctgctgtcaatgcattgcatggcaggtggtttgctggtaaaatgataacagcagcatatgtacctcttccaacttaccacaacctgtttcctgattctatgacagcaacacagctactggttccaagtagacgatgaaggaagatatagtcccttatgtatatagctttttttctttcttgagaattcatcttgagttatcttttatttagataaaaataaagaggcaaggatctactgtcatttgtatgcaatttcctgttaccttgaaaaaataaaaatgttaacaggaatgcagtgtgctcattctccctaaatagtaaatcccactgtatacaaaactgttctcttgttctgccttttaaaatgttcatgtagaaaattaatgaactataggaatagctctaggagaacaaatgtgctttctgtaaaaaggcagaccagggatgtaatgtttttaatgtttcagaagcctaactttttacacagtggttacatttcacatttcactaatgttgatatttggctgatggttgagcagtttctgaaatacacatttagtgtatggaaatacaagacagctaaagggctgtttggttagcatctcatcttgcattctgatcaattggcaagaaagggagatttcaaaattatatttcttgatggtatcttttcaattaatgtatctgtaaaagtttctttgtaaatactatgtgttctggtgtgtcttaaaattccaaacaaaatgatccctgcatttcctgaagatgtttaaacgtgagagtctggtaggcaaagcagtctgagaaagaaataggaaatgcagaaataggttttgtctggttgcatataatctttgctctttttaagctctgtgagctctgaaatatatttttgggttacttcagtgtgtttgacaagacagcttgatatttctatcaaacaaatgactttcatattgcaacaatctttgtaagaaccactcaaataaaagtctcttaaaaaggc

SEQ ID NO: 150629 - DNA, 2831 bp, Artificial Sequence
  derived and/or modified sequence
gcgagagcccgtgctgagggctctgtgaggccccgtgtgtttgtgtgtgtgtatgtgtgctggtgaatgtgagtacagggaagcagcggccgccatttcagggagcttgtcgacgctgtcgcaggggtggatcctgagctgccgaagccgccgtcctgctctcccgcgtgggcttctctaattccattgttttttttagattctctcgggcctagccgtccttggaacccgatattcgggctgggcggttccgcggcctgggcctaggggcttaacagtagcaacagaagcggcggcggcggcagcagcagcagcagcagcagcaatctcttcccgaacacgagcaccacaggcgcccgaaggccggaacaggcgtttagagaaaatggcagacgatattgatattgaagcaatgcttgaggctccttacaagaaggatgagaacaagttgagcagtgccaacggccatgaagaacgtagcaaaaagaggaaaaaaagcaagagcagaagtcgtagtcatgaacgaaagagaagcaaaagtaaggaacggaagcgaagtagagacagagaaaggaaaaagagcaaaagccgtgaaagaaagcgaagtagaagcaaagagaggcgacggagccgctcaagaagtcgagatcgaagatttagaggccgctacagaagtccttactccggaccaaaatttaacagtgccatccgaggaaagattgggttgcctcatagcatcaaattaagcagacgacgttcccgaagcaaaagtccattcagaaaagacaagagccctgtgagagaacctattgataatttaactcctgaggaaagagatgcaaggacagtcttctgtatgcagctggcggcaagaattcgaccaagggatttggaagagtttttctctacagtaggaaaggttcgagatgtgaggatgatttctgacagaaattcaagacgttccaaaggaattgcttatgtggagttcgtcgatgttagctcagtgcctctagcaataggattaactggccaacgagttttaggcgtgccaatcatagtacaggcatcacaggcagaaaaaaacagagctgcagcaatggcaaacaatttacaaaagggaagtgctggacctatgaggctttatgtgggctcattacacttcaacataactgaagatatgcttcgtgggatctttgagccttttggaagaattgaaagtatccagctgatgatggacagtgaaactggtcgatccaagggatatggatttattacattttctgactcagaatgtgccaaaaaggctttggaacaacttaatggatttgaactagcaggaagaccaatgaaagttggtcatgttactgaacgtactgatgcttcgagtgctagttcatttttggacagtgatgaactggaaaggactggaattgatttgggaacaactggtcgtcttcagttaatggcaagacttgcagagggtacaggtttgcagattccgccagcagcacagcaagctctacagatgagtggctctttggcatttggtgctgtggcagatttgcaaacaagactttcccagcagactgaagcttcagctttagctgcagctgcctctgttcagccacttgcaacacaatgtttccaactctctaacatgtttaaccctcaaacagaagaagaagttggatgggataccgagattaaggatgatgtgattgaagaatgtaataaacatggaggagttattcatatttatgttgacaaaaattcagctcagggcaatgtgtatgtgaagtgcccatcaattgctgcagctattgctgctgtcaatgcattgcatggcaggtggtttgctggtaaaatgataacagcagcatatgtacctcttccaacttaccacaacctgtttcctgattctatgacagcaacacagctactggttccaagtagacgatgaaggaagatatagtcccttatgtatatagctttttttctttcttgagaattcatcttgagttatcttttatttagataaaaataaagaggcaaggatctactgtcatttgtatgcaatttcctgttaccttgaaaaaataaaaatgttaacaggaatgcagtgtgctcattctccctaaatagtaaatcccactgtatacaaaactgttctcttgttctgccttttaaaatgttcatgtagaaaattaatgaactataggaatagctctaggagaacaaatgtgctttctgtaaaaaggcagaccagggatgtaatgtttttaatgtttcagaagcctaactttttacacagtggttacatttcacatttcactaatgttgatatttggctgatggttgagcagtttctgaaatacacatttagtgtatggaaatacaagacagctaaagggctgtttggttagcatctcatcttgcattctgatcaattggcaagaaagggagatttcaaaattatatttcttgatggtatcttttcaattaatgtatctgtaaaagtttctttgtaaatactatgtgttctggtgtgtcttaaaattccaaacaaaatgatccctgcatttcctgaagatgtttaaacgtgagagtctggtaggcaaagcagtctgagaaagaaataggaaatgcagaaataggttttgtctggttgcatataatctttgctctttttaagctctgtgagctctgaaatatatttttgggttacttcagtgtgtttgacaagacagcttgatatttctatcaaacaaatgactttcatattgcaacaatctttgtaagaaccactcaaataaaagtctcttaaaaaggcc

SEQ ID NO: 150630 - protein, 224 aa, Artificial Sequence
  derived and/or modified sequence
MPGGLLLGDVAPNFEANTTVGRIRFHDFLGDSWGILFSHPRDFTPVCTTELGRAAKLAPEFAKRNVKLIALSIDSVEDHLAWSKDINAYNCEEPTEKLPFPIIDDRNRELAILLGMLDPAEKDEKGMPVTARVVFVFGPDKKLKLSILYPATTGRNFDEILRVVISLQLTAEKRVATPVDWKDGDSVMVLPTIPEEEAKKLFPKGVFTKELPSGKKYLRYTPQP

SEQ ID NO: 150631 - DNA, 675 bp, Artificial Sequence
  derived and/or modified sequence
atgcctgggggcctattactaggggatgtggctcctaatttcgaagccaataccaccgtgggacgcataaggttccacgacttcttgggcgattcttgggggatcctgttctcacacccaagagattttacgcctgtttgtaccactgagcttggccgcgccgccaagctggcccccgagtttgcgaagcgaaacgtgaagcttatcgctctgtctatcgactccgtggaggatcatcttgcatggagtaaagatattaacgcctacaactgcgaggaacctactgagaagctgcccttccctatcatcgatgaccgcaaccgcgagctggcaatcctgctggggatgttggaccctgctgaaaaggacgaaaaagggatgcctgtaactgccagagtggtgttcgttttcggccctgataaaaaactcaaattatcgatattgtaccctgccaccacaggcagaaacttcgatgaaattttacgagtggtcataagtctgcagctcactgcagagaagagagtggctactcccgtcgattggaaagacggagactcggtgatggtgctgcctacaattccagaggaagaggcgaaaaaactgtttccaaaaggagtgtttaccaaggagcttcctagcggcaagaaatatctgaggtatactcctcagccctag

SEQ ID NO: 150632 - DNA, 675 bp, Artificial Sequence
  derived and/or modified sequence
atgcctgggggcctgctgctgggagatgtggcccccaactttgaggccaacaccaccgtgggccgcatccgcttccatgacttcctgggggacagctggggcatcctcttcagccacccccgggacttcacccctgtgtgcaccacagagctgggccgggccgccaagctggcccctgagtttgccaagagaaatgtgaagctgattgccctgagcattgattctgtggaggaccacctggcctggagcaaggacatcaatgcctacaactgtgaggagcccacagagaagctgcccttccccatcattgatgacaggaaccgggagctggccatcctgctgggcatgctggaccctgctgagaaggatgagaagggcatgcctgtgacagcccgggtggtgtttgtgtttggaccagacaagaagctgaagctgagcatcctgtacccagccaccactggaagaaactttgatgagatcctgcgggtggtgatcagcctgcagctgacagctgagaagagggtggccacccctgtggactggaaggatggagacagcgtgatggtgctgcccaccatccctgaggaggaggccaagaagctgttccccaagggcgtcttcaccaaggagctgcccagcggcaagaagtacctgcgctacaccccccagccctag

SEQ ID NO: 150633 - DNA, 675 bp, Artificial Sequence
  derived and/or modified sequence
atgcccggcggcctgctgctgggcgacgtggcccccaacttcgaggccaatacaacagtgggtagaattcgttttcatgacttccttggggactcctggggcatcctgttttcgcacccccgcgatttcactccagtgtgcacaactgaactgggtagggccgcaaagcttgcccctgagttcgccaagaggaatgtcaaactcatagcactgtccatcgactctgtagaggatcacctagcatggtccaaagacatcaatgcctacaactgtgaggaacccactgagaagcttcccttccctatcatcgacgatagaaacagggaactagcaatcctgctgggcatgctggaccccgccgagaaagatgaaaaggggatgcccgtgaccgcacgtgttgtgttcgtgttcgggcccgataaaaagctcaagctttcaatactctacccggcaaccactggacgcaattttgatgagatcctacgagtggtcatctcgctgcaactgaccgccgaaaaacgagtggctacacctgtagactggaaggacggtgactcagtgatggtccttccgacaatccccgaggaagaggccaagaaactgtttcctaagggcgtgttcactaaagaactgccaagtggcaaaaagtacctgcgatataccccacaaccttag

SEQ ID NO: 150634 - DNA, 1751 bp, Artificial Sequence
  derived and/or modified sequence
ccccgcccccgccgccccagtccccgcccctcgcgccttcgtttattcctccgcgcgctgggacaggctgcttcttcgccagaaccaaccggttgcttgctgtcccagcggcgccccctcatcaccgtcgccatgcccggaggtctgcttctcggggacgtggctcccaactttgaggccaataccaccgtcggccgcatccgtttccacgactttctgggagactcatggggcattctcttctcccaccctcgggactttaccccagtgtgcaccacagagcttggcagagctgcaaagctggcaccagaatttgccaagaggaatgttaagttgattgccctttcaatagacagtgttgaggaccatcttgcctggagcaaggatatcaatgcttacaattgtgaagagcccacagaaaagttaccttttcccatcatcgatgataggaatcgggagcttgccatcctgttgggcatgctggatccagcagagaaggatgaaaagggcatgcctgtgacagctcgtgtggtgtttgtttttggtcctgataagaagctgaagctgtctatcctctacccagctaccactggcaggaactttgatgagattctcagggtagtcatctctctccagctgacagcagaaaaaagggttgccaccccagttgattggaaggatggggatagtgtgatggtccttccaaccatccctgaagaagaagccaaaaaacttttcccgaaaggagtcttcaccaaagagctcccatctggcaagaaatacctccgctacacaccccagccttaagtctcttggagaagctggtgctgtgagccagaggatgtcagctgccaattgtgttttcctgcagcaattccataaacacatcctggtgtcatcacagccaaggtttttaggttgctataccaatggcttattaaatgaaaatggcactaaaagtttcttgagattctttatactctctgccttcagcaatcaattccattcatacatcagcactctgctggttctgtttgaaatatgttctgtatttaaaactcaaatcttgttggatctctgcagggcttgtgaccaatgaagtcatatttgttgatggttgacaaagcttgcttcactccatcagagaatgactatcaatttttttttaactgtcctatcacgtcctctcctgtcacccattttgaagagtggcagaacttgaagttcaacttcctctgtaaatatccaagtataaagcccaggaacttctagaataacccagatgcgctttaattttttttaatatgttttgatcacagaacttctagaataacccagatgctctttcatattcttttaatacatcttgatcacagctgggggaaaaaaagctttttaattctataccttcctagtagataagtgaagagcagggaaagagacctttaaatattttgctataaaaaaatttgtgataagtttctatcaaaatggggagattgcagaaaaggcttcccttggctcccaaggaggtgtagcaggtgtgagcaatattagtgccatgtgcctttcacacagggtttgcatttatcagtctgttttccgatgatgtgtacatgaaagagtacaccatgtgaagagaagagagaatgattgaaaatgttttagtatagaactcttcttgcagtgggttgctattttctagattttactttttagggaacaaaataaaatcctttgttaaaactggg

SEQ ID NO: 150635 - DNA, 675 bp, Artificial Sequence
  derived and/or modified sequence
atgcctgggggtctcctcctaggcgacgttgcacctaatttcgaggcaaatactacagtgggcaggattagatttcatgactttctgggagattcttgggggattctcttcagccacccaagagacttcacccccgtctgtactactgaactcggcagagccgcaaagttggctcccgaatttgccaaaaggaacgtgaaattgatcgcactcagtatcgatagtgtagaggaccatctggcctggagcaaagacatcaacgcctacaactgcgaagaacccactgaaaaactgccatttcccataatcgacgaccgcaacagggagctagcaattctgctggggatgttagatcctgctgagaaggatgagaagggaatgcccgttacggccagggtcgtgttcgtttttgggccagacaagaagctgaaactcagcatcctgtaccccgctactactggcaggaattttgacgagatcctgagagtagtcatttcactgcaactcacagctgaaaaaagagtcgctacccctgttgactggaaagatggcgatagtgtcatggttctgcccactatcccagaagaggaggcaaaaaaattattccctaagggcgtttttacaaaggagctgccctcaggaaaaaagtacctgcgctacactccccaaccatag

SEQ ID NO: 150636 - DNA, 675 bp, Artificial Sequence
  derived and/or modified sequence
atgcccggcggcctgctgctgggcgacgtggcccccaacttcgaggccaacaccaccgtgggcagaatcagattccacgacttcctgggcgacagctggggcatcctgttcagccaccccagagacttcacccccgtgtgcaccaccgagctgggcagagccgccaagctggcccccgagttcgccaagagaaacgtgaagctgatcgccctgagcatcgacagcgtggaggaccacctggcctggagcaaggacatcaacgcctacaactgcgaggagcccaccgagaagctgcccttccccatcatcgacgacagaaacagagagctggccatcctgctgggcatgctggaccccgccgagaaggacgagaagggcatgcccgtgaccgccagagtggtgttcgtgttcggccccgacaagaagctgaagctgagcatcctgtaccccgccaccaccggcagaaacttcgacgagatcctgagagtggtgatcagcctgcagctgaccgccgagaagagagtggccacccccgtggactggaaggacggcgacagcgtgatggtgctgcccaccatccccgaggaggaggccaagaagctgttccccaagggcgtgttcaccaaggagctgcccagcggcaagaagtacctgagatacaccccccagccctag

SEQ ID NO: 150637 - protein, 223 aa, Artificial Sequence
  derived and/or modified sequence
MEVQKEAQRIMTLSVWKMYHSRMQRGGLRLHRSLQLSLVMRSARELYLSAKVEALEPEVSLPAALPSDPRLHPPREAESTAETATPDGEHPFPEPMDTQEAPTAEETSACCAPRPAKVSRKRRSSSLSDGGDAGLVPSKKARLEEKEEEEGASSEVADRLQPPPAQAEGAFPNLARVLQRRFSGLLNCSPAAPPTAPPACEAKPACRPADSMLNVLVRAVVAF

SEQ ID NO: 150638 - DNA, 2088 bp, Artificial Sequence
  derived and/or modified sequence
ggtccgagttcggaatttcggttcaaggcccagttcctcggattgttcctgcgcaacttcagtttcccttccaggcacgggcaatgagtgtttggccgcgacgagttggaaagcccggatgcgtccttcggttgggcggggtgtctcagtgacgtcactgggggtataaaagggcctgggtggcgggcgcctgggcagagcgtcctagcagtgtcactgcgtgggttggtttgtgtagagaggcgtgagcgagcccgttgtccggagtgcacctgctgcctgttctgtccctcccgggagcccccgccgctgtcgccgtcgagtcgccatggaagtgcagaaagaggcacagcgcatcatgaccctgtcggtgtggaagatgtatcactcccgcatgcagcgcggtggcctgcggctgcaccggagtctgcagctgtcgctggtcatgcgcagcgcccgggagctctacctctcggccaaggtggaggccctcgagcccgaggtgtcgttgccggccgccctcccctctgaccctcgcctgcacccgccccgagaagccgagtccacggccgagacagcgacccccgacggtgagcacccgtttccggagccaatggacacgcaggaggcgccgacagccgaggagacctccgcctgctgtgccccgcgccccgccaaagtcagccgcaaacgacgcagcagcagcctgagcgacggcggggacgctggactggtcccgagcaagaaagcccgtctggaagaaaaggaagaagaggagggagcgtcatccgaagtcgccgatcgcctgcagccccctccggcgcaagcggagggcgcctttcccaacctggcccgcgtcctgcagaggcgcttctccggcctcctgaactgcagccccgcggcccctccgacggcgccgcccgcgtgcgaggcaaagcccgcttgccgcccggcggacagcatgctcaacgtgctcgtgcgggccgtggtggccttctgaggaccccgagcggcgctgccggagcccagagcgcgcgtcgaaccgtcggcccgagggcgcagacctgaggcgaggccacccccctccatcctgggggaagcgcccgcgaaaaccgtggagagaagccgccgcccgggctgctgagaggcccggagagggactctgtccccggggagccatcgccttcagtgtgcagggacggcaccgaggagtctgagccgggggcgcgggcgccttccgcagagacctgcgcccacaggtgctgtcttagtggactgggacgtgaacctttcgctctccttctggactgggagaagggaggcttgggtgttgtgttttttgttttgtttgtttgtttgtttttaaagatctcctcagggtcggacttcattttgtactgtgggctgtgctggccctttcaaggtttttcaagagttggttttgcgtttccaacctcggagaattccaggcactccccttccccctccgctgacatacttgtataagcggtcatcgttgcgtcatggggcaggcgtggggagcttcctgtcgccttgcgtgggtgtggggcctgggaggaggtcctggggcgtgcacccgccctgggcagtggggaggagagtggcctgagttacttcacccccgcgtgctgctggttaatgtcccgcgtctctgcaccttcgggtgggagcggggactgatctactttcacattctcaagtttttctcatctgcattagaggtgcccagtaggttcccaggttccagcgtgcccctccctcagacacacggacacaatcagccgagaagttcctggtctgaatcacgagaatgtggaggggtggggggtgtcagtggaaaggcataaggctgagctgagaccagttgctggtgaaactgggccaatctggggaggggaacatccttgccagggagtttctgagggtctgctttgtttacctttcgtgcggtggattctttttaactccgtctacctggcgttttgttagaaatgtcagataggaaaataaaaaccatttgagtaaaaaaaaaaaaaaaaaaaaaaaaaaaaaaaaaaaaaaaaaaaa

SEQ ID NO: 150639 - DNA, 672 bp, Artificial Sequence
  derived and/or modified sequence
atggaggtacagaaggaagcacagaggatcatgacactgagcgtgtggaaaatgtaccactcaaggatgcaaagggggggtctaagattgcataggtccctgcagctcagcctggtgatgcgctctgcaagagagctctatttgagcgctaaggtggaggcattagagcctgaagtgagcctgcccgccgctctgccatcggaccctagactacacccaccgagagaggccgaatcaacagcagagacagctacacccgacggagaacacccatttcctgagccaatggacactcaggaggctccaaccgcagaggaaacgtccgcctgttgtgccccacgtcccgcaaaggtttcccgtaagcgcagatccagctcattgtccgatggcggggacgctgggctggttccatcgaagaaagcacgcctggaggaaaaggaagaagaagagggggcatccagcgaggtggctgacaggcttcaaccccccccagctcaggctgagggcgcctttcctaacttggcaagggtgctacagcgcaggttctccggattactgaattgctccccagccgcgcctccaaccgcccctcccgcctgtgaagccaagccggcctgtaggccggcagacagtatgcttaatgttctggtacgcgccgtggtggccttctag

SEQ ID NO: 150640 - DNA, 672 bp, Artificial Sequence
  derived and/or modified sequence
atggaggtgcagaaggaggcccagaggatcatgaccctgtctgtgtggaagatgtaccacagcaggatgcagaggggcggcctgcggctgcacaggagcctgcagctgagcctggtgatgaggtctgcccgggagctgtacctgagcgccaaggtggaggccctggagcctgaggtgtccctgcctgctgccctgcccagcgacccccggctgcaccccccccgggaggccgagagcacagctgagacagccaccccagatggagagcaccccttccctgagcccatggacacccaggaggcccccacagctgaggagaccagcgcctgctgtgcccccaggcctgccaaggtgtccaggaagaggaggagcagcagcctgagtgatggaggagatgctggcctggtgcccagcaagaaggcccggctggaggagaaggaggaggaggagggcgccagcagcgaggtggccgaccggctgcagcccccaccagcccaggccgagggcgccttccccaacctggcccgggtgctgcagaggcgcttcagcggcctgctgaactgcagccctgctgccccacccacagcccccccagcctgtgaggccaagccagcctgcaggcctgctgacagcatgctgaatgtgctggtgcgggctgtggtggccttctag

SEQ ID NO: 150641 - DNA, 672 bp, Artificial Sequence
  derived and/or modified sequence
atggaggtgcagaaggaggcccagcggatcatgaccctgagcgtgtggaaaatgtatcactcaaggatgcaacggggggggctgagactgcatcgaagcttacagctgagcctggtgatgagatccgcgcgcgagctctacttatcggccaaagtggaggcgctggagccggaagtgtcactccctgctgctttgccgtcagaccctaggttacatccccctcgggaggccgaaagcactgcagagaccgccacccccgatggagaacacccattcccagaacctatggatactcaggaggctccaacagctgaagagacatccgcatgctgtgccccccgcccagcaaaagtatcccggaaacgtcggtcaagtagtctctctgatgggggagacgccggtcttgtaccatccaagaaagcgcgactggaggagaaggaagaggaggagggcgcttccagcgaagtggcagatcgcctgcaacctccaccagctcaagccgagggcgcgttccctaatttggcaagagtgcttcagcgccgcttcagcggactcttgaattgctcgcccgcagcgcctcctaccgcaccacccgcatgtgaagccaagcctgcctgcagaccagcagactctatgctcaacgtgctggtcagagcagtggtggcgttttag

SEQ ID NO: 150642 - DNA, 672 bp, Artificial Sequence
  derived and/or modified sequence
atggaggtgcaaaaagaagcacaacgtatcatgactttgtccgtctggaagatgtaccactcccgcatgcagcggggaggactgcgtctccacagatctcttcagctgagtctggtgatgcggtctgcccgtgaactttatctcagtgctaaagtggaagcactggaacccgaggtgtctctacccgcagccctgccctctgaccctagattgcacccccctcgggaggctgagtctaccgccgaaactgcaacccctgacggcgagcacccgttcccagaacccatggacactcaggaggcaccgactgcggaagagactagcgcctgttgcgcccctaggccagccaaggtcagcaggaaacgcaggtcttccagtcttagcgacggtggcgacgccggactcgtgccatcgaagaaagccaggcttgaggagaaggaggaagaagaaggtgcctcttccgaggtcgccgatagattgcaaccccctcccgcacaggctgagggcgctttccccaatctagcccgtgttttgcagcgtcgtttttccggtctccttaactgttctccagcggctccccctaccgctccacccgcttgtgaagctaaacccgcatgtcgcccagctgactctatgttgaacgtgcttgtcagggctgtggtggccttctag

SEQ ID NO: 150643 - DNA, 2044 bp, Artificial Sequence
  derived and/or modified sequence
ggtccgagttcggaatttcggttcaaggcccagttcctcggattgttcctgcgcaacttcagtttcccttccaggcacgggcaatgagtgtttggccgcgacgagttggaaagcccggatgcgtccttcggttgggcggggtgtctcagtgacgtcactgggggtataaaagggcctgggtggcgggcgcctgggcagagcgtcctagcagtgtcactgcgtgggttggtttgtgtagagaggcgtgagcgagcccgttgtccggagtgcacctgctgcctgttctgtccctcccgggagcccccgccgctgtcgccgtcgagtcgccatggaagtgcagaaagaggcacagcgcatcatgaccctgtcggtgtggaagatgtatcactcccgcatgcagcgcggtggcctgcggctgcaccggagtctgcagctgtcgctggtcatgcgcagcgcccgggagctctacctctcggccaaggtggaggccctcgagcccgaggtgtcgttgccggccgccctcccctctgaccctcgcctgcacccgccccgagaagccgagtccacggccgagacagcgacccccgacggtgagcacccgtttccggagccaatggacacgcaggaggcgccgacagccgaggagacctccgcctgctgtgccccgcgccccgccaaagtcagccgcaaacgacgcagcagcagcctgagcgacggcggggacgctggactggtcccgagcaagaaagcccgtctggaagaaaaggaagaagaggagggagcgtcatccgaagtcgccgatcgcctgcagccccctccggcgcaagcggagggcgcctttcccaacctggcccgcgtcctgcagaggcgcttctccggcctcctgaactgcagccccgcggcccctccgacggcgccgcccgcgtgcgaggcaaagcccgcttgccgcccggcggacagcatgctcaacgtgctcgtgcgggccgtggtggccttctgaggaccccgagcggcgctgccggagcccagagcgcgcgtcgaaccgtcggcccgagggcgcagacctgaggcgaggccacccccctccatcctgggggaagcgcccgcgaaaaccgtggagagaagccgccgcccgggctgctgagaggcccggagagggactctgtccccggggagccatcgccttcagtgtgcagggacggcaccgaggagtctgagccgggggcgcgggcgccttccgcagagacctgcgcccacaggtgctgtcttagtggactgggacgtgaacctttcgctctccttctggactgggagaagggaggcttgggtgttgtgttttttgttttgtttgtttgtttgtttttaaagatctcctcagggtcggacttcattttgtactgtgggctgtgctggccctttcaaggtttttcaagagttggttttgcgtttccaacctcggagaattccaggcactccccttccccctccgctgacatacttgtataagcggtcatcgttgcgtcatggggcaggcgtggggagcttcctgtcgccttgcgtgggtgtggggcctgggaggaggtcctggggcgtgcacccgccctgggcagtggggaggagagtggcctgagttacttcacccccgcgtgctgctggttaatgtcccgcgtctctgcaccttcgggtgggagcggggactgatctactttcacattctcaagtttttctcatctgcattagaggtgcccagtaggttcccaggttccagcgtgcccctccctcagacacacggacacaatcagccgagaagttcctggtctgaatcacgagaatgtggaggggtggggggtgtcagtggaaaggcataaggctgagctgagaccagttgctggtgaaactgggccaatctggggaggggaacatccttgccagggagtttctgagggtctgctttgtttacctttcgtgcggtggattctttttaactccgtctacctggcgttttgttagaaatgtcagataggaaaataaaaaccatttgagt

SEQ ID NO: 150644 - DNA, 672 bp, Artificial Sequence
  derived and/or modified sequence
atggaggtgcagaaggaggcccagagaatcatgaccctgagcgtgtggaagatgtaccacagcagaatgcagagaggcggcctgagactgcacagaagcctgcagctgagcctggtgatgagaagcgccagagagctgtacctgagcgccaaggtggaggccctggagcccgaggtgagcctgcccgccgccctgcccagcgaccccagactgcacccccccagagaggccgagagcaccgccgagaccgccacccccgacggcgagcaccccttccccgagcccatggacacccaggaggcccccaccgccgaggagaccagcgcctgctgcgcccccagacccgccaaggtgagcagaaagagaagaagcagcagcctgagcgacggcggcgacgccggcctggtgcccagcaagaaggccagactggaggagaaggaggaggaggagggcgccagcagcgaggtggccgacagactgcagcccccccccgcccaggccgagggcgccttccccaacctggccagagtgctgcagagaagattcagcggcctgctgaactgcagccccgccgccccccccaccgccccccccgcctgcgaggccaagcccgcctgcagacccgccgacagcatgctgaacgtgctggtgagagccgtggtggccttctag

SEQ ID NO: 150645 - protein, 1244 aa, Artificial Sequence
  derived and/or modified sequence
MLIKEYHILLPMSLDEYQVAQLYMIQKKSREESSGEGSGVEILANRPYTDGPGGSGQYTHKVYHVGSHIPGWFRALLPKAALQVEEESWNAYPYTRTRYTCPFVEKFSIEIETYYLPDGGQQPNVFNLSGAERRQRILDTIDIVRDAVAPGEYKAEEDPRLYHSVKTGRGPLSDDWARTAAQTGPLMCAYKLCKVEFRYWGMQAKIEQFIHDVGLRRVMLRAHRQAWCWQDEWTELSMADIRALEEETARMLAQRMAKCNTGSEGSEAQPPGKPSTEARSAASNTGTPDGPEAPPGPDASPDASFGKQWSSSSRSSYSSQHGGAVSPQSLSEWRMQNIARDSENSSEEEFFDAHEGFSDSEEVFPKEMTKWNSNDFIDAFASPVEAEGTPEPGAEAAKGIEDGAQAPRDSEGLDGAGELGAEACAVHALFLILHSGNILDSGPGDANSKQADVQTLSSAFEAVTRIHFPEALGHVALRLVPCPPICAAAYALVSNLSPYSHDGDSLSRSQDHIPLAALPLLATSSSRYQGAVATVIARTNQAYSAFLRSPEGAGFCGQVALIGDGVGGILGFDALCHSANAGTGSRGSSRRGSMNNELLSPEFGPVRDPLADGVEGLGRGSPEPSALPPQRIPSDMASPEPEGSQNSLQAAPATTSSWEPRRASTAFCPPAASSEAPDGPSSTARLDFKVSGFFLFGSPLGLVLALRKTVMPALEAAQMRPACEQIYNLFHAADPCASRLEPLLAPKFQAIAPLTVPRYQKFPLGDGSSLLLADTLQTHSSLFLEELEMLVPSTPTSTSGAFWKGSELATDPPAQPAAPSTTSEVVKILERWWGTKRIDYSLYCPEALTAFPTVTLPHLFHASYWESADVVAFILRQVIEKERPQLAECEEPSIYSPAFPREKWQRKRTQVKIRNVTSNHRASDTVVCEGRPQVLSGRFMYGPLDVVTLTGEKVDVYIMTQPLSGKWIHFGTEVTNSSGRLTFPVPPERALGIGVYPVRMVVRGDHTYAECCLTVVARGTEAVVFSIDGSFTASVSIMGSDPKVRAGAVDVVRHWQDSGYLIVYVTGRPDMQKHRVVAWLSQHNFPHGVVSFCDGLTHDPLRQKAMFLQSLVQEVELNIVAGYGSPKDVAVYAALGLSPSQTYIVGRAVRKLQAQCQFLSDGYVAHLGQLEAGSHSHASSGPPRAALGKSSYGVAAPVDFLRKQSQLLRSRGPSQAEREGPGTPPTTLARGKARSISLKLDSEE

SEQ ID NO: 150646 - DNA, 3735 bp, Artificial Sequence
  derived and/or modified sequence
atgctgatcaaggagtaccacatcctgctgcccatgagcctggacgagtaccaggtggcccagctgtacatgatccagaagaagagcagagaggagagcagcggcgagggcagcggcgtggagatcctggccaacagaccctacaccgacggccccggcggcagcggccagtacacccacaaggtgtaccacgtgggcagccacatccccggctggttcagagccctgctgcccaaggccgccctgcaggtggaggaggagagctggaacgcctacccctacaccagaaccagatacacctgccccttcgtggagaagttcagcatcgagatcgagacctactacctgcccgacggcggccagcagcccaacgtgttcaacctgagcggcgccgagagaagacagagaatcctggacaccatcgacatcgtgagagacgccgtggcccccggcgagtacaaggccgaggaggaccccagactgtaccacagcgtgaagaccggcagaggccccctgagcgacgactgggccagaaccgccgcccagaccggccccctgatgtgcgcctacaagctgtgcaaggtggagttcagatactggggcatgcaggccaagatcgagcagttcatccacgacgtgggcctgagaagagtgatgctgagagcccacagacaggcctggtgctggcaggacgagtggaccgagctgagcatggccgacatcagagccctggaggaggagaccgccagaatgctggcccagagaatggccaagtgcaacaccggcagcgagggcagcgaggcccagccccccggcaagcccagcaccgaggccagaagcgccgccagcaacaccggcacccccgacggccccgaggccccccccggccccgacgccagccccgacgccagcttcggcaagcagtggagcagcagcagcagaagcagctacagcagccagcacggcggcgccgtgagcccccagagcctgagcgagtggagaatgcagaacatcgccagagacagcgagaacagcagcgaggaggagttcttcgacgcccacgagggcttcagcgacagcgaggaggtgttccccaaggagatgaccaagtggaacagcaacgacttcatcgacgccttcgccagccccgtggaggccgagggcacccccgagcccggcgccgaggccgccaagggcatcgaggacggcgcccaggcccccagagacagcgagggcctggacggcgccggcgagctgggcgccgaggcctgcgccgtgcacgccctgttcctgatcctgcacagcggcaacatcctggacagcggccccggcgacgccaacagcaagcaggccgacgtgcagaccctgagcagcgccttcgaggccgtgaccagaatccacttccccgaggccctgggccacgtggccctgagactggtgccctgcccccccatctgcgccgccgcctacgccctggtgagcaacctgagcccctacagccacgacggcgacagcctgagcagaagccaggaccacatccccctggccgccctgcccctgctggccaccagcagcagcagataccagggcgccgtggccaccgtgatcgccagaaccaaccaggcctacagcgccttcctgagaagccccgagggcgccggcttctgcggccaggtggccctgatcggcgacggcgtgggcggcatcctgggcttcgacgccctgtgccacagcgccaacgccggcaccggcagcagaggcagcagcagaagaggcagcatgaacaacgagctgctgagccccgagttcggccccgtgagagaccccctggccgacggcgtggagggcctgggcagaggcagccccgagcccagcgccctgcccccccagagaatccccagcgacatggccagccccgagcccgagggcagccagaacagcctgcaggccgcccccgccaccaccagcagctgggagcccagaagagccagcaccgccttctgcccccccgccgccagcagcgaggcccccgacggccccagcagcaccgccagactggacttcaaggtgagcggcttcttcctgttcggcagccccctgggcctggtgctggccctgagaaagaccgtgatgcccgccctggaggccgcccagatgagacccgcctgcgagcagatctacaacctgttccacgccgccgacccctgcgccagcagactggagcccctgctggcccccaagttccaggccatcgcccccctgaccgtgcccagataccagaagttccccctgggcgacggcagcagcctgctgctggccgacaccctgcagacccacagcagcctgttcctggaggagctggagatgctggtgcccagcacccccaccagcaccagcggcgccttctggaagggcagcgagctggccaccgacccccccgcccagcccgccgcccccagcaccaccagcgaggtggtgaagatcctggagagatggtggggcaccaagagaatcgactacagcctgtactgccccgaggccctgaccgccttccccaccgtgaccctgccccacctgttccacgccagctactgggagagcgccgacgtggtggccttcatcctgagacaggtgatcgagaaggagagaccccagctggccgagtgcgaggagcccagcatctacagccccgccttccccagagagaagtggcagagaaagagaacccaggtgaagatcagaaacgtgaccagcaaccacagagccagcgacaccgtggtgtgcgagggcagaccccaggtgctgagcggcagattcatgtacggccccctggacgtggtgaccctgaccggcgagaaggtggacgtgtacatcatgacccagcccctgagcggcaagtggatccacttcggcaccgaggtgaccaacagcagcggcagactgaccttccccgtgccccccgagagagccctgggcatcggcgtgtaccccgtgagaatggtggtgagaggcgaccacacctacgccgagtgctgcctgaccgtggtggccagaggcaccgaggccgtggtgttcagcatcgacggcagcttcaccgccagcgtgagcatcatgggcagcgaccccaaggtgagagccggcgccgtggacgtggtgagacactggcaggacagcggctacctgatcgtgtacgtgaccggcagacccgacatgcagaagcacagagtggtggcctggctgagccagcacaacttcccccacggcgtggtgagcttctgcgacggcctgacccacgaccccctgagacagaaggccatgttcctgcagagcctggtgcaggaggtggagctgaacatcgtggccggctacggcagccccaaggacgtggccgtgtacgccgccctgggcctgagccccagccagacctacatcgtgggcagagccgtgagaaagctgcaggcccagtgccagttcctgagcgacggctacgtggcccacctgggccagctggaggccggcagccacagccacgccagcagcggcccccccagagccgccctgggcaagagcagctacggcgtggccgcccccgtggacttcctgagaaagcagagccagctgctgagaagcagaggccccagccaggccgagagagagggccccggcaccccccccaccaccctggccagaggcaaggccagaagcatcagcctgaagctggacagcgaggagtag

SEQ ID NO: 150647 - DNA, 4225 bp, Artificial Sequence
  derived and/or modified sequence
agggactgcaggggcgccggcgggcggatcgagaggaaggtcggggccatgggccggcactgcgcctcgggagggtccggccaccgctggaacccgaggccggggctgggggcgctccgggctccgacccacgggccggccggccctgcccgggctgggtgaggggcgcccgcctcaagctagaggaggagcggaggccgcgcgcggcccgccgagcgccttcaggatgctcatcaaggaataccacattctgctgcccatgagcctggacgagtaccaggtggcccagctctacatgatccagaaaaagagccgggaggagtctagtggtgagggcagcggcgtggagatcctggccaaccggccctacacggatgggcccgggggcagcgggcaatacacacacaaggtgtaccacgtgggctcccacatcccaggctggttccgggcactgctgcccaaggctgccctgcaggtagaagaggaatcctggaatgcctacccctacacccgaacccggtacacctgccctttcgtggagaaattctccattgaaattgagacctattacctgcctgatggggggcagcagccaaacgtcttcaacctgagcggggccgagaggagacagcgcatcctggacaccatcgacatcgtgcgggatgcagtggccccaggcgagtacaaagcagaagaggacccccggctttatcactcggtcaagacgggccgagggccactgtctgatgactgggcacggacggcggcacagacggggccccttatgtgtgcctataagctgtgcaaggttgagttccgctactggggcatgcaagccaagatcgagcagttcatccatgatgtaggtctgcgtcgggtgatgctgcgggcccaccgccaggcctggtgctggcaggatgagtggacagagctgagcatggctgacatccgggcactggaagaggagactgctcgcatgctggcccagcgcatggccaagtgcaacacaggcagtgaggggtccgaggcccagccccccgggaaaccgagcaccgaggcccggtctgcggccagcaacactggcacccccgatgggcctgaggcccccccaggcccagatgcctcccccgatgccagctttgggaagcagtggtcctcatcctcccgttcctcctactcatcccaacatggaggggctgtgtctccccagagcttgtctgagtggcgcatgcagaacattgcccgagactctgagaacagctccgaggaagagttctttgatgcccacgaaggcttctcggacagtgaggaggtcttccccaaggagatgaccaagtggaactccaatgacttcattgatgcctttgcctccccagtggaggcagagggaacgccagagcctggagccgaggcagctaaaggcattgaggatggggcccaagcacccagggactcagagggcctggatggagccggggagctgggggctgaggcatgcgcagtccacgccctcttccttatcctgcacagcggcaacatcctggactcaggccctggagacgccaactccaagcaggcggatgtgcagacgctgagctccgccttcgaggccgtcacccgcatccacttccctgaggccttgggccacgtggcgctgcgactggtgccctgtccacccatctgcgccgccgcctatgcccttgtctccaacctgagcccttacagccacgatggggacagcctgtctcgctcccaagaccacattccactggctgccctgccactgctggccacctcatcctcccgctaccagggcgccgtggccaccgtcattgcccgcaccaaccaggcctactcagccttcctgcgctcacctgagggtgccggcttctgtgggcaggtcgcactgattggagatggtgttggtggcatcctgggctttgatgcactctgccacagtgctaacgcgggcaccgggagtcggggcagcagccgccgtgggagcatgaacaatgagctgctctctccggagtttggcccagtgcgggaccccctggcagatggtgtggaaggcctgggtcggggcagcccagaaccctcggccttgcctccccagcgcatccccagcgacatggccagtcctgagcccgagggctctcagaacagccttcaggcagcccccgcaaccacctcctcctgggagccccggcgggcaagcacggccttctgcccacccgctgccagttccgaggcacctgacggccccagcagcactgcccgccttgacttcaaggtctctggcttcttcctcttcggctccccactgggcctggtgctggctctgcgcaaaactgtgatgcccgccctggaggcagcccagatgcgcccagcctgtgaacagatctacaacctcttccacgcggctgacccctgcgcctcacgcctcgagcccctgctggccccgaagttccaggccatcgccccactgaccgtgccccgctaccagaagttccccctgggagatggctcatccctgctgctggccgacactctgcagacgcactccagcctctttctggaggagctggagatgctggtgccctcaacacccacctctactagcggtgccttctggaagggcagtgagttggccactgaccccccggcccagccagccgcccccagcaccaccagtgaggtggttaagatcctggagcgctggtgggggaccaagcggatcgactactcgctgtactgccccgaggcgctcaccgcctttcccaccgtcacgctgccccacctcttccacgccagctactgggagtccgccgacgtggtggcgttcatcctgcgccaggtgatcgagaaggagcggccacagctggcggaatgcgaggagccgtccatctacagcccggccttccccagggagaagtggcagcgaaaacgcacgcaggtcaagatccggaacgtcacttccaaccaccgggcgagcgacacggtggtgtgcgagggccgcccccaggtgctaagcgggcgcttcatgtacgggcccctggacgtcgtcacgctcactggagagaaggtggatgtctacatcatgacgcagccgctgtcgggcaagtggatccactttggcaccgaagtcaccaatagctcgggccgcctcaccttcccagttcccccagaacgcgcgctgggcattggtgtctaccccgtgcgcatggtggtcaggggcgaccacacctatgccgaatgctgcctgactgtggtggcccgcggcacggaggctgtggtcttcagcatcgacggctccttcaccgccagcgtctccatcatgggcagcgaccccaaggtgcgagctggcgccgtggacgtggtcaggcactggcaggactccggctacctgatcgtgtatgtcacaggccggccggatatgcagaagcaccgcgtggtggcatggctgtcgcagcacaacttcccccacggcgtcgtctccttctgcgacggcctcacccacgacccactacgccagaaggcaatgtttctgcagagcctggtgcaggaggtagaactgaacatcgtggccggttatgggtctcccaaagatgtggctgtatacgcggcgctggggctgtccccgagccagacctacatcgtgggccgtgccgtgcggaagctacaggcgcagtgccagttcctgtcagacggctatgtggcccacctgggccagctggaagcgggctcgcactcgcatgcctcctcgggacccccgagagctgccttgggcaagagcagctatggtgtggctgcccccgtggacttcctgcgcaaacagagccagctgcttcgctcgaggggccccagccaggcggagcgtgagggcccgggaacaccacccaccaccctggcacggggcaaagcacggagcatcagcctgaagctggacagcgaggagtgaggcccacaccagcctggacctgggttatttattgacacacccaaggggcccgaggggctgcgtgtgggaggctggggacccagacttttggccccagcgctggcccccccagccccacaccctatatctccgtgtgctcctcggtgttacttccctttcatatgaggggacccagcgccggggggagggaggagggcgtgggcatgggcgcagaggcttttccagtgtgtataaatccatgaaaataaacgccacctgcacccc

SEQ ID NO: 150648 - DNA, 3735 bp, Artificial Sequence
  derived and/or modified sequence
atgctgattaaggagtatcacatcctcctgcctatgagtctcgatgaataccaagtggcccagttgtatatgatacaaaagaagagccgggaagagagcagcggggaagggtcaggagttgagattctggctaatagaccctacacagacggacctggcggttcaggtcagtacactcataaagtgtaccatgtgggtagccacatcccagggtggtttcgcgctcttttaccaaaggccgccttgcaggtggaagaagagtcatggaacgcatacccttatactaggacacgttacacttgccccttcgttgagaagttttcgatagagatcgagacctactatttgccggacggtggacagcagcccaatgtgttcaatctgagcggagccgaacggcgacagaggatcctggatactattgacatagttcgcgacgcagtggcacctggcgaatataaagctgaggaggaccccaggctctaccatagcgttaaaactggaaggggccctcttagtgacgactgggcacgcaccgcggcccagaccgggcctctcatgtgtgcctataagttatgcaaggtagagttcaggtattggggaatgcaagccaagattgagcagttcatccatgatgtgggcctgagacgggttatgctgcgcgcacacagacaggcctggtgctggcaagatgagtggacagagctatcaatggcagacattcgggcgctggaggaggagactgcgagaatgctggcgcagcgcatggctaagtgtaacaccggctccgagggatcggaggctcaaccacctgggaaaccctccacagaagcgcgctctgccgcatctaatacaggaactcctgatggacccgaagcaccccctggaccagatgcatctccggacgcttcctttgggaaacaatggtcttcctcatcccgttcctcatactcaagtcagcatggtggtgcagtcagccctcagtctctctcggaatggaggatgcaaaacatcgcccgggactccgagaattcctctgaagaggaattcttcgacgcccacgaaggattcagtgactcagaagaggtattccctaaggagatgactaaatggaattccaatgactttattgatgcctttgccagccccgtagaagcagaggggacccctgaaccaggcgcagaagctgccaagggtattgaggacggggctcaggcaccacgggattcagagggcctcgatggagcgggcgagctcggcgctgaggcctgtgccgttcatgctctgttcctgatcctccatagcggtaatatactggattctggacccggggatgccaattctaagcaggctgatgtgcagacattgagttctgccttcgaagccgtgacacggatacatttccccgaggccttgggccatgtggctctgaggctggtgccctgtccgcccatttgcgccgccgcttacgccctggtgtcaaacctcagcccttacagccacgacggcgatagcctgtcacggagccaggaccacattccattagctgccctgcctctgttggccacatcttcatcccggtaccaaggagccgtcgctaccgtgatagcacggacaaatcaggcctattctgcctttctcaggtccccggaaggcgctgggttctgtggccaggtggcactgattggggatggggtgggcggcatcttgggatttgacgcactgtgtcattccgccaacgcaggcacaggctccagaggatcttcccggcgcggtagcatgaacaacgagctccttagtcccgagttcgggccggtaagagatccactagctgatggagtcgaaggcctcggccgagggtctcccgaacctagcgcccttccccctcagagaatcccttcagatatggccagccctgaaccagagggttcccagaactcgctgcaggctgctccggccaccacatcctcctgggagccccgccgagcaagcaccgcgttttgtccaccggccgccagttctgaagccccggacggcccctccagtactgcgcgactagatttcaaggtgtcaggcttctttctatttggaagtcccctcggcctggtgctggcacttaggaagactgtgatgcccgctctggaggcagcgcagatgcgtcctgcatgtgagcaaatatacaatctgttccacgccgctgacccatgcgccagccgtctggagccattgcttgctcccaagttccaagcaatcgcacccctgacagttccgagataccagaagttccctcttggcgatggctcctccctcttgcttgcagatacactacagactcatagcagtctctttttggaggaattggagatgctagtaccatccacccctacctctacctccggagcattctggaagggctcagagctagccacagacccccccgcgcaaccagcggccccctccacaacaagcgaggtggtgaagatactagagcggtggtggggcaccaaacgtatcgattatagcctttactgtccagaggcactgacagcctttcctactgtgacccttccccatctgtttcatgccagctactgggagagtgctgacgtggtggcattcatcctcagacaggttatcgaaaaagagcgaccacagctggccgagtgtgaggaaccaagtatttatagtcccgcgttccctagggagaagtggcagcgcaagaggacccaggtaaagattagaaatgtgacatctaaccacagagctagcgatacagtggtatgtgagggtcgaccccaggttctctccggtcgatttatgtacggacctctggatgtagtaaccctgaccggtgaaaaagtggatgtttatattatgacacagccactttcagggaaatggatccacttcggaacggaggttactaactcaagtggcagactcactttccccgtacctcccgagcgggcgttgggaattggggtgtacccagtgcgcatggttgttcgaggcgaccacacatacgctgagtgttgtctgacagtggtcgcaagagggaccgaggcggttgtgttttccatagacgggtcctttaccgcctcagtatctataatgggatccgatcccaaagtgcgcgcaggagccgtcgacgtggtgaggcactggcaagattccggatatctcattgtgtacgtaacggggagaccggacatgcagaagcatcgcgtagtggcctggctttcccagcacaactttccccacggcgtggtctccttttgcgacggactgacccatgacccactgcgccagaaagccatgttcctgcagtcactagttcaggaagttgagctgaatatagtagccggttacggctcaccaaaggacgtggccgtgtatgccgcactcggactgagcccctcccagacctatattgtaggtcgggccgtgagaaaattacaggcccagtgccagttcctaagcgacggttacgtggcccacttaggccaactagaggcaggcagtcactcccacgcatcaagcgggcccccaagggctgcgttgggaaagtcatcctatggcgtggcagcacctgtggacttcttacgtaagcagagccagctgttgaggagtcgtggaccaagccaggcagagcgcgaaggccctgggacacctcctaccactctcgctcggggaaaagccagatccatatctttgaaattagatagcgaagagtag

SEQ ID NO: 150649 - DNA, 3735 bp, Artificial Sequence
  derived and/or modified sequence
atgctgatcaaagagtaccacatcctactgccaatgtctcttgatgaataccaggtggctcagctgtacatgatccaaaaaaagagccgagaggaatcgagcggtgaagggagcggcgtagagatcctcgcaaaccgtccctatacagacggccccggtgggagcggacaatacacccacaaggtatatcacgtgggaagccatattcccggttggtttagagcacttctgcccaaggctgctttgcaggtggaggaagagtcttggaatgcctacccttacactaggacacgatatacgtgcccctttgtcgagaaattcagcattgagatagagacttactacctccctgacggcgggcaacagcctaatgtgtttaatctatccggggctgaacgcagacaacggattctggacactatcgacattgttcgagatgccgtggcacccggggagtataaggctgaagaagacccaaggctgtatcactctgtcaagacgggccgtggacccctctcggacgattgggctaggactgccgcgcagaccggtcctctcatgtgcgcttacaagctctgcaaagtggagttcaggtattggggaatgcaggcaaagattgagcaatttatccatgatgtgggactgaggagagtaatgttgagggcgcataggcaggcatggtgttggcaggacgagtggacagagctgtcaatggccgacatccgggctttagaagaggaaaccgccaggatgctcgcgcagcgtatggcaaagtgcaataccggctctgaggggtcagaggcccagcccccagggaagccttccacagaggcacgctccgccgcgagtaatacggggacccccgacggaccggaagctccacccggcccagacgcgtccccagatgccagttttggaaaacagtggtcgtcaagtagcaggtctagctatagctcccagcacggaggggctgtgagcccacaatccttatccgagtggcggatgcagaacattgctagggatagcgagaactcgtccgaggaagagttcttcgacgcccatgaaggctttagcgatagtgaggaggtgtttcccaaggagatgacaaaatggaactcaaacgatttcatcgatgcctttgctagccctgtagaagccgagggtacaccagagcctggcgctgaggccgccaaaggtatagaggacggcgcccaggccccacgcgatagtgagggactggatggagccggggaacttggggccgaagcctgtgccgtacatgccctgttccttatcctccactccggaaatatcctagactcgggccccggagatgctaactcaaagcaggcagatgtgcagaccctgagcagcgcttttgaagctgttacacgtatccatttcccagaagcgcttggccacgtggcactcaggctcgtgccttgccctcctatttgtgctgcggcctacgctctggtctcaaacctatccccttatagccatgatggagactcgttatctaggagccaggaccatatcccattagcggccctgcctctcctggctacctctagctccagataccaaggggccgtagcgacagtcatcgctcgcacaaaccaggcctacagcgcctttctgagatcccctgagggcgctggcttttgcggccaagtcgcactcattggggatggggtgggggggattctggggtttgatgcactctgtcactccgccaacgctgggacgggaagcagaggcagcagtaggcgtgggtccatgaataacgagttactgtccccagaatttggacctgtgcgcgatcctctggcagatggggtggagggcctgggtcgggggtctccagagccaagcgctctccctcctcaacggatcccttcagacatggcaagccccgagccggagggctcacagaactccttacaagccgcaccagccactacgagtagctgggagcctcgtcgcgcgtcaacagctttctgccctccagccgcttcatcagaggccccagacggtccttcctctaccgctagactcgacttcaaggtatccggattcttcctcttcggcagtccactcggcctggtgctggctctgcggaaaactgtcatgcccgcactcgaggccgctcagatgagacctgcctgcgagcaaatctacaacttgtttcacgctgccgatccctgcgccagccggctggagcccttgctggctcccaagtttcaggcgatcgcgcctctgacggttcccaggtatcagaaatttccacttggtgacggctcttccttgcttctggctgatacactccagactcattcgagcctgttcttggaggaattggaaatgttggtcccctccacccccactagcacttcaggagcgttctggaagggttccgaactggccactgacccccctgcccagccggcggctccgtccaccacttccgaagtggttaagattttggagcgctggtggggcacaaagcgaattgactattcactgtattgcccagaggccctgaccgctttcccaactgtgactcttccacacctgttccatgcatcgtactgggaatcggcagacgtagtggctttcatacttcgccaggtcatagagaaggaaagaccacaactagcagagtgcgaagaacccagcatttactcacccgcattcccgagggaaaagtggcagaggaaacggacccaggtaaagatccggaatgtaacctctaaccaccgggctagcgatactgtcgtgtgcgaggggaggccccaggtccttagcggcaggtttatgtacggtcctctggatgtggtaacactgactggagaaaaggtcgacgtttatatcatgacacagcctctctctggcaaatggatccactttggtaccgaagtcactaacagctccgggcgactgacttttccggtgccccccgaacgggctctcggaatcggagtgtaccctgtgcgtatggtcgtgcggggcgatcatacatatgctgagtgctgcctgacagtggtggcacgcggcacagaagcagtcgttttcagcatcgacgggagttttactgcatctgtttccataatgggcagcgatccaaaggttcgagcaggggccgttgacgtcgtgagacactggcaggacagtggctacctgattgtgtatgtgacgggcagacctgatatgcagaagcaccgcgtagtggcttggctaagccaacataatttccctcatggcgtggttagcttctgcgacgggcttacgcacgatcccctgaggcaaaaagccatgttcctccagtccctggttcaggaggttgaactgaatattgtggcaggctatggctcaccaaaggatgtggctgtatacgcagcactgggtctgtctccgtctcagacctacattgtcgggcgggccgtgaggaaactgcaggcccagtgtcagttcctgtcagacgggtacgtggctcatctgggccagctggaagccgggtctcatagccacgccagttctggcccaccgagggcggcactaggcaagtcgagttacggagtggccgcacccgtggactttctcaggaaacagagccaactgctcagatctcggggtccttcccaggctgaaagagaaggacccggaactccacctacaacgctggctcgcggcaaggcaagatcaatctccctgaagctggatagtgaggaatag

SEQ ID NO: 150650 - DNA, 3735 bp, Artificial Sequence
  derived and/or modified sequence
atgctgatcaaggagtaccacatcctgctgcccatgagcctggatgagtaccaggtggcccagctgtacatgatccagaagaagagccgggaggagagcagcggggagggcagcggcgtggagatcctggccaaccggccctacacagatggccctgggggcagcggccagtacacccacaaggtgtaccacgtgggcagccacatccctggctggttccgggccctgctgcccaaggccgccctgcaggtggaggaggagagctggaatgcctacccctacaccaggacccgctacacctgcccctttgtggagaagttcagcattgaaattgagacctactacctgcctgatggcggccagcagcccaacgtgttcaacctgtctggagctgagcggcggcagaggatcctggacaccattgatattgtgagagatgctgtggcccctggagagtacaaggccgaggaggacccccggctgtaccacagcgtgaagacaggccggggccccctgagtgatgactgggccaggacagctgcccagacaggccccctgatgtgtgcctacaagctgtgcaaggtggagttccgctactggggcatgcaggccaagattgagcagttcatccatgatgtgggcctgcggcgggtgatgctgcgggcccaccggcaggcctggtgctggcaggatgagtggacagagctgtccatggctgacatccgggccctggaggaggagacagccaggatgctggcccagaggatggccaagtgcaacacaggcagcgagggcagcgaggcccagcccccaggcaagcccagcacagaggcccggtctgctgccagcaacacaggcaccccagatggccctgaggcccctcctggcccagatgccagcccagatgccagctttgggaagcagtggagcagcagcagccgcagcagctacagcagccagcacggcggcgctgtgagcccccagagcctgtctgagtggaggatgcagaacatcgcccgggacagcgagaacagcagcgaggaggagttctttgatgcccacgagggcttcagtgacagcgaggaggtgttccccaaggagatgaccaagtggaacagcaatgacttcattgatgcctttgccagccctgtggaggccgagggcaccccagagcccggggctgaggccgccaagggcattgaagatggagcccaggccccccgggacagcgagggcctggatggagctggggagctgggcgctgaggcctgtgctgtgcacgccctcttcctgatcctgcacagcggcaacatcctggacagcggccctggagatgccaacagcaagcaggctgatgtgcagaccctgagcagcgcctttgaggccgtgacccgcatccacttccctgaggccctgggccacgtggccctgcggctggtgccctgcccccccatctgtgccgccgcctatgccctggtgagcaacctgagcccctacagccatgatggagacagcctgagccgcagccaggaccacatccccctggccgccctgcccctgctggccaccagcagcagccgctaccagggcgctgtggccaccgtcatcgcccggaccaaccaggcctacagcgccttcctgcggagccctgagggcgccggcttctgtggccaggtggccctgattggagatggagtgggcggcatcctgggctttgatgccctgtgccacagcgccaatgccggcaccggcagccggggcagcagccggcggggctccatgaacaatgagctgctgagccctgagtttggacctgtgcgggaccccctggctgatggagtggagggcctgggccggggcagccctgagcccagcgccctgcccccccagaggatccccagcgacatggccagccctgagcctgagggcagccagaacagcctgcaggccgccccagccaccaccagctcctgggagccccggcgggccagcacagccttctgccccccagctgccagcagcgaggccccagatggccccagcagcacagcccggctggacttcaaggtgtctggcttcttcctgtttggcagccccctgggcctggtgctggccctgaggaagacagtgatgcctgccctggaggccgcccagatgaggcctgcctgtgagcagatctacaacctcttccacgccgctgacccctgtgccagccggctggagcccctgctggcccccaagttccaggccatcgcccccctgactgtgccccgctaccagaagttccccctgggagatggcagcagcctgctgctggccgacaccctgcagacccacagcagcctcttcctggaggagctggagatgctggtgcccagcacccccaccagcaccagcggggccttctggaagggcagcgagctggccacagaccccccagcccagcctgctgcccccagcaccaccagcgaggtggtgaagatcctggagcgctggtggggcaccaagagaattgactacagcctgtactgcccagaggccctgacagccttccccaccgtgaccctgccccacctgttccacgccagctactgggagagcgcagatgtggtggccttcatcctgcggcaggtgattgagaaggagcggccccagctggccgagtgtgaggagcccagcatctacagccctgccttcccccgggagaagtggcagaggaagaggacccaggtgaagatcagaaatgtgaccagcaaccaccgggccagtgacacagtggtgtgtgagggccggccccaggtgctgagcggccgcttcatgtatggccccctggatgtggtgaccctgaccggggagaaggtggatgtgtacatcatgacccagcccctgagcggcaagtggatccacttcggcacagaggtgaccaacagcagcggccgcctgaccttccctgtgcccccagagcgggccctgggcattggagtgtaccctgtgaggatggtggtgcggggggaccacacctatgcagagtgctgcctgactgtggtggcccggggcacagaggccgtggtgttcagcattgatggcagcttcaccgcctctgtgtccatcatgggcagtgaccccaaggtgcgggccggggctgtggatgtggtgcgccactggcaggacagcggctacctgattgtgtatgtgacaggccgcccagacatgcagaagcaccgggtggtggcctggctgagccagcacaacttcccccatggagtggtgtccttctgtgatggcctgacccatgaccccctgcggcagaaggccatgttcctgcagagcctggtgcaggaggtggagctgaacatcgtggccggctacggcagccccaaggatgtggccgtgtatgctgccctgggcctgagccccagccagacctacatcgtgggccgggctgtgaggaagctgcaggcccagtgccagttcctgagtgatggctacgtggcccacctgggccagctggaggccggcagccacagccacgccagcagcggcccccccagggctgccctgggcaagagcagctatggagtggccgcccctgtggacttcctgaggaagcagagccagctgctgcggagccggggccccagccaggccgagcgggagggccctggcaccccacccaccaccctggcccggggcaaggcccggagcatcagcctgaagctggacagcgaggagtag

SEQ ID NO: 150651 - DNA, 3735 bp, Artificial Sequence
  derived and/or modified sequence
atgctgatcaaggagtaccacatcctgctgcccatgagcctggacgaataccaggtggcccagctatacatgattcaaaaaaagtcaagagaggagagtagcggcgagggatctggcgtggaaattctggcaaacaggccttacaccgatggccctggcggaagcggccagtacacccataaagtgtatcacgtgggaagtcatatccccggttggttccgagccctactgcctaaggcggcactgcaggtagaagaagagagctggaatgcctacccctacacacggaccagatatacatgccccttcgtggaaaagttttccattgaaattgagacctactacctccccgacggaggccagcagccaaacgtgtttaacctgagcggagctgaacgccgacagcggatccttgataccatcgacattgtacgtgacgctgtggctccgggagagtataaagccgaagaggacccccggctttaccattccgtcaagaccggaaggggaccactgagcgacgactgggctcgcaccgccgcccaaaccgggccactcatgtgcgcctacaaactatgcaaagtggagtttcgttactggggcatgcaggccaagatcgaacagtttatacacgacgtgggcttaagaagagtaatgctgagggcacatcggcaggcctggtgttggcaggacgaatggacggagctttcaatggccgacatcagagctctcgaagaagaaaccgcgcgaatgcttgcacagcgaatggcaaaatgcaacacaggctcggaaggatctgaggcacagccacctggcaagcccagtacagaggctcggtctgccgcaagcaatacaggtacccccgacggccccgaagctccccctggtcctgatgcctcccccgatgccagctttggaaagcagtggtcatcctcctcgcggtcttcctacagttctcagcacggaggagcagtaagccctcagtcactttcagaatggcggatgcagaatattgcccgggactccgagaattccagcgaagaggagttctttgatgcccatgaaggcttctccgacagcgaagaggtctttcccaaggagatgaccaagtggaacagcaacgatttcatagacgcattcgcatctcccgtcgaggccgaaggcacacctgagccgggggccgaggccgccaaagggatcgaagatggagctcaagcccctcgcgattcagagggcctggacggtgccggagaactcggggccgaagcatgcgctgtccatgcccttttcctgatcctgcattcagggaacattctcgatagtggacctggcgatgctaactcgaagcaggctgatgtgcagaccttaagttctgccttcgaagcggtcacaaggatccacttcccagaggcactgggccacgtggcattaaggctcgtgccttgcccaccaatctgtgccgccgcctacgccctggtgtccaacctaagtccctactcccacgacggagactctctcagccgatctcaggaccacattccactggccgcgctgcctctgctcgcaaccagcagctcgcgttaccagggcgcagtggcaactgtgatcgcacgaaccaatcaggcttatagcgctttcctgagatcccccgaaggtgccgggttttgtggccaggtcgccttaatcggagacggcgtaggcggaatcctgggatttgacgccctctgccatagtgccaacgctggtaccggctcgcggggctcctccaggcggggctcgatgaacaatgagctcttgagccctgaattcggacccgttcgcgacccgctggccgatggggttgaagggctggggcgcgggtctcccgagccctctgccttgccaccccagagaatcccatcggacatggctagtccggaacccgagggatctcagaatagtctacaggcggcacccgctactacatcctcatgggaacctcggcgggcgagtaccgccttttgtccccccgccgcgagcagtgaggccccagatgggccctcctccactgccaggctagactttaaggtaagcggtttttttcttttcggtagcccgctaggtctggtgctcgcactgcgtaagactgtgatgcctgctctcgaagccgcacagatgcggcccgcatgtgagcaaatttacaatttatttcatgcagctgatccatgtgcatcacgcctcgagcccctgttggcccccaaatttcaggccattgcaccattgacggttcctcgataccagaaattcccacttggagacggctcatccctcctcctcgctgatacactgcagacccactccagcctgtttttggaggaactagaaatgctcgttccgagcacccccacaagtacctccggagctttttggaaggggagtgaactggctaccgacccacctgcacagccagcggcccccagtactacctcagaggttgtgaaaattctcgaacgatggtggggaacgaagcggattgactattctttatattgccctgaggcactgacggccttccctacggtgactctgcctcaccttttccacgcctcctactgggagtctgcggatgtggtggccttcattctgcggcaagtgatcgaaaaagagcggcctcaactggccgaatgtgaagaaccctccatctactctcccgcctttccccgggaaaagtggcagcgaaagagaacacaggtgaaaattcgtaacgtgacctccaaccatagagcatccgacaccgttgtctgcgaagggcgcccacaagtgctgtccggtcggttcatgtatgggcccttagatgtagtcaccctgacaggcgagaaagttgatgtgtacattatgactcagcctctgtctggcaagtggattcacttcggaacagaagtcaccaactcatcaggtaggctgacctttcccgtcccacctgaaagggcacttgggattggggtgtaccctgtgcgaatggttgtccggggcgatcatacctacgctgagtgttgtctcaccgtggtggctcgcgggaccgaggcagtagtcttttcaattgacggtagcttcacggcctctgttagtataatgggaagcgatccaaaagtgcgtgctggcgcagttgatgttgtgagacactggcaggattcagggtatttaatcgtgtacgttactggacgccccgacatgcaaaagcatagggttgtagcctggctttcacaacataattttccgcacggagtggtgagcttctgtgatggcctcacgcacgatccgctccggcagaaggcaatgtttctccagtcgctcgttcaggaggtggaacttaatatagtggcgggatatggctcaccaaaggatgtggccgtttatgccgctctcggactcagtccttcacagacgtacattgtgggacgcgctgtgcgcaaactgcaggcgcagtgtcaattcctgtccgacggctatgttgctcacctggggcagctggaagcggggtctcattcacacgctagctctggaccaccacgggcagcgttgggtaaaagcagctatggcgtggcagctcctgttgatttcttgcgtaagcagtcccaattattgaggtccaggggcccttctcaggccgagcgcgagggtcccggaactcctcccaccactctggcgcgggggaaagcccgttcgattagtcttaagctggatagtgaggaatag

SEQ ID NO: 150652 - DNA, 3735 bp, Artificial Sequence
  derived and/or modified sequence
atgctgatcaaggagtaccacatcctgctgcccatgagcctggacgagtatcaggtcgctcagctgtatatgatacagaaaaagagccgcgaagaatcttccggcgaggggtcaggtgtggagatcctggccaacaggccgtatacagacggccccggtggctctggtcagtatactcataaagtctaccatgtcggctcacacatccctggctggtttcgcgccctgctcccaaaggcagccttgcaagtagaagaggagagttggaatgcgtacccatatacccggacgcgttacacatgcccctttgtggagaagttcagtatcgaaattgagacatactatctgcccgacggcggccaacagcctaatgttttcaatctgagcggggcagaaagaaggcaacgtatactggacacaatcgacattgtaagagatgccgtcgctccaggggagtataaggcagaggaggatcctcggctctatcactccgtcaaaacagggcgcggtccgctctcagatgattgggctaggactgccgcccagacagggcccctgatgtgtgcctataaactctgtaaagtcgaattccggtactggggaatgcaggccaaaatcgagcagtttattcatgacgtgggcctgcgcagagtgatgctgcgcgcacaccggcaggcttggtgctggcaggacgagtggaccgagctcagtatggcggatatacgcgcgttggaggaagagaccgcacggatgctcgcacaaaggatggctaaatgtaacaccggcagcgaaggcagcgaggctcagcccccgggtaagccttccacagaggcccggtcagcagcaagcaacaccggcacccccgacggacctgaagcaccgcccggacccgatgcttctccggacgcctccttcggcaaacagtggtccagttcgtcgcggtcatcctacagctcccagcatgggggagctgtctctcctcagtccctgagcgagtggcgcatgcagaatatcgcaagggactctgagaattcctctgaagaagaattttttgacgctcacgagggcttctccgactcagaggaagtcttccctaaggaaatgaccaagtggaactcgaacgactttattgatgccttcgcttcgcctgtagaggccgagggaacccctgagcctggcgccgaggccgccaagggcatcgaggacggtgcccaggctccccgggattcagaaggactggacggagccggggaacttggggccgaggcatgcgccgttcacgcactgttcctgatcctgcatagcggcaatatcctagatagcgggcctggggatgccaacagtaagcaagccgacgtccagaccctgtcatcagcattcgaggctgtgacaaggatccacttccccgaggcactcggccatgttgctctgcgtctcgtcccctgccccccaatttgcgcggccgcctacgcactggtgagcaatctgtctccgtactcacacgatggcgactcccttagtcgctcgcaggatcatataccactcgctgcactcccactgcttgccacaagcagctcgcgatatcagggcgcagtcgcgacagtgattgcgcggacaaatcaggcctactctgcatttctgcgttccccagagggagccggcttctgcggccaggttgctttgataggggacggcgtgggaggaatccttggcttcgacgctctgtgccatagcgctaacgcaggtaccgggtccaggggtagcagtaggcggggttctatgaacaacgaattactctctcctgagttcgggcctgtgagggatccccttgccgatggagtcgagggtctcggccggggaagccctgagccaagcgccctccctccccagaggattccttcagacatggcaagtcccgaaccggagggatctcagaactcccttcaggcagccccagccaccacttcctcttgggagccccgtagggcgtcaactgcattttgccccccagctgccagttctgaggcccccgatgggccttcctccaccgcacgtctggatttcaaagtttccggcttcttcctcttcggcagcccattaggactcgtgctggcactgcggaagaccgtgatgcctgccctggaagcggcccagatgaggcctgcatgtgagcaaatttacaacctgtttcacgctgcagatccatgcgcaagccgactggaacccctccttgcacctaagtttcaggccatagcccctctgacagtcccccgataccaaaagttccctctgggcgatgggtccagcctccttctggcggacacactgcaaacccatagcagcctcttcctggaggaactagagatgttagtacctagcactccgacttctacgtccggggcattctggaaaggttctgagctggctacagaccctccggcccagccggccgcgccgtctactacttccgaggtagtcaaaatcctggagcgatggtgggggacaaagcgaattgattattctctgtattgtccagaagcactgactgccttccccaccgtcaccctcccccatctcttccacgcaagctactgggagagcgccgatgtggtcgctttcatcctgcgccaggtgattgagaaagaacgccctcaactggccgaatgtgaggaaccaagcatatattcacccgcctttccccgggaaaaatggcagaggaaaaggacacaggtgaagatccgcaacgtgacctcaaaccatagggcttccgacaccgttgtgtgcgagggccgacctcaggtgctcagcgggcggttcatgtacggtccccttgacgtcgtaacgcttacaggcgagaaagtagatgtgtatatcatgacacagcccctttctgggaaatggatccactttggaactgaggtgacgaacagcagcgggcggcttacgttccccgtaccaccagagagagctctgggcatcggagtatatccagtgaggatggtggttaggggagatcatacatatgcagaatgctgcctgacagtggtggcccgaggtacggaggctgttgttttctctattgatggctcgttcacggcatccgtctctattatggggtcagatcctaaagtaagggccggcgctgtcgacgtggttaggcattggcaggattccggatatttaatagtatacgtcaccgggcgacccgatatgcagaagcacagggtggtcgcatggctgtcacagcataacttccctcatggcgttgtgtcgttttgcgacggcctaactcatgaccctttgcggcagaaagctatgtttttgcaatcgctggtgcaagaagtcgagcttaacattgtggctggctacggctcccctaaagatgtggccgtgtatgccgcgctgggcctgtctccaagccagacctatattgtaggccgtgctgtcagaaagttgcaagcacagtgtcagttcctgtccgatggctatgtagctcacttgggccagctggaagcaggatcacatagtcacgcatccagtggtcctcccagagccgcacttggaaagtcctcgtacggagtagcagccccagtggactttctgagaaagcaaagccagctgctgagatctagaggtccttcccaagctgagagagaaggacccggcacaccacctaccaccctcgctaggggaaaagctcggtccataagcctgaagctggactcggaggaatag

SEQ ID NO: 150653 - DNA, 3735 bp, Artificial Sequence
  derived and/or modified sequence
atgctaatcaaggagtatcatatcctgctgcccatgtcacttgacgagtatcaagtcgcacagctgtacatgattcaaaagaagtctagggaagaatcgagcggggaaggttcgggagttgagattctggctaatcggccatatacggatgggccaggtggatcagggcagtatacgcataaagtgtatcacgtgggcagtcacatcccagggtggttccgcgcactcctaccgaaagccgctctccaggtcgaagaggaatcctggaatgcatacccatacactaggacgcgctacacttgcccattcgttgagaaattcagtatcgagatagagacctactatttgcctgacggaggtcagcaaccgaacgtgtttaacctgtcgggagcagagaggcgccaaaggattcttgacactattgatattgtccgcgatgctgtcgccccaggtgaatacaaggcagaggaagatcccagattgtaccatagcgtgaaaactgggaggggaccattgagtgatgactgggcgcgtaccgccgcacagacaggacctctcatgtgcgcctataagctgtgcaaagttgagttcagatattggggaatgcaggcgaagatcgagcagtttatacacgacgtgggattgcgacgggttatgctcagggcccaccggcaggcttggtgttggcaggacgagtggaccgaactcagtatggccgacatcagggccctggaggaggaaacagcgcgtatgttggcgcagcgcatggccaaatgtaacactggcagcgagggttccgaggctcagccgccaggtaagcctagcactgaggcacggagcgccgcttctaatacaggaactcccgacggcccagaggccccaccgggtccagacgctagccccgacgccagctttggtaagcagtggagctcttcgtctcgaagcagctacagctcgcagcacgggggagccgtgtccccccaatccctgagtgaatggagaatgcagaatattgctcgagacagtgaaaacagcagcgaggaggaatttttcgatgctcacgaagggtttagtgactctgaggaggtgtttcccaaggagatgactaagtggaacagcaacgactttattgacgcatttgcgagccctgttgaggcagaagggaccccagaacccggagcggaagctgcgaaaggaattgaggacggggcacaggccccacgcgacagcgaaggcctggatggtgcgggagagctgggggcagaggcctgcgcagtccatgctctatttctgattcttcattcgggcaacatcttggactctggacctggggatgcgaactcgaagcaagcagacgtccagacactgagcagcgccttcgaagcggtcaccagaattcactttccagaggccttagggcacgtagcactgcggctcgtcccctgtcccccaatttgcgctgccgcatacgccctggtctcaaatctctctccttacagtcatgacggagatagcctctcccgctcacaggatcacatccccttagcagctctgccactgttggccacatcaagctctcggtaccagggcgctgtcgccactgttatcgctcgcactaatcaagcctactcagccttcctgagatcccccgaaggtgcaggcttctgtggacaggtagccctgatcggtgacggtgtgggagggatcctggggtttgatgctctctgccatagcgccaacgcaggaactgggagtcgcggaagttccagaagggggagcatgaacaatgaactcctgtcacctgaattcggtccagtccgcgatcctctcgccgacggtgtggaaggtctgggccgaggcagcccagaaccttccgccctccccccacaacgcataccctctgatatggctagccccgagcctgagggaagtcagaattcattacaggccgctcccgcaacaacttcatcctgggaaccaaggagagcaagcactgcattctgtccccctgcggcttctagcgaggcaccagatggaccctcctcgactgctagactcgactttaaggtatcaggcttctttctgttcggatctcctctaggcttggtcctcgcccttagaaagaccgtaatgcctgctcttgaggcagcgcaaatgcgcccagcttgcgagcaaatctataatttgttccatgcggcagacccctgtgcttcccggctagaaccactgttagccccaaagttccaggccatagcaccactcactgttcccagataccagaagttcccactgggcgacggctcttccctactcttggccgacaccttgcagacccactcttcactgttcttagaggagctggagatgctagttcccagcacccctactagcacgagcggggctttttggaagggatctgaactggctacagaccctccggcacagccagccgctcctagcactactagtgaagtcgttaaaatactggagagatggtggggaactaaacggatcgattacagcctttactgtcccgaagctcttactgcctttcccactgtgacattgccgcatctgttccacgcttcttactgggagtccgctgatgtcgtggcgttcattctgagacaggttatcgagaaagagcgcccacagctcgccgaatgcgaggaaccatcaatttattcacccgcttttccacgagaaaaatggcagcgcaaacggacccaggtcaaaattcgcaacgtcacgagcaatcatagagcttctgatactgtggtctgcgagggtaggccacaggtgctctctggcagattcatgtatggcccattggacgtggtcactctgaccggggaaaaagttgacgtgtacattatgactcagccattaagtggcaaatggatacatttcggcactgaggtgaccaattcctcagggcgacttacattccctgtgccccctgaacgcgcactaggaataggtgtgtatcctgtccggatggtcgtgcgcggagatcacacatacgcggagtgttgtctcactgtcgtggctcggggaaccgaagccgttgtattctctattgacggcagctttacagcctctgtctccataatggggagtgatccaaaagtgcgggctggtgccgttgacgtcgtgcgccattggcaggattctgggtatctaattgtgtacgttactggtcgccctgatatgcagaagcatcgtgtggtggcatggttgtcacagcacaatttcccgcacggggtcgtcagcttctgtgatgggctcacgcacgaccctttgcgtcagaaggctatgttcctacagtctttggtacaggaggtggaactgaatattgtggcagggtacggatcacctaaagacgtcgccgtgtatgccgctttagggctgagtccctctcaaacctatatcgtggggagagcagttaggaagctgcaggcccagtgccagtttctttcagatggatatgtcgctcacttaggtcagctggaggcaggttcccattcacacgcgtcctccgggcctccgcgagcagcactgggtaagagcagttatggggttgcggctcctgttgactttctgcggaaacagtctcagctcttgagatccaggggaccttcacaagccgaaagggagggaccgggaacaccgccaaccaccctggctcgcggaaaggctcggtctatttcactgaagcttgactcagaggagtag

SEQ ID NO: 150654 - DNA, 3735 bp, Artificial Sequence
  derived and/or modified sequence
atgctcatcaaggaatatcacatactgctgcccatgagtttggatgaataccaggtcgcacaactttatatgatccagaagaagagcagagaagagtcatctggcgaaggaagcggtgtggaaatcttagccaacagaccgtacactgacggtcctggtggcagcgggcagtatacccacaaagtgtatcacgttggatcacacatccccggatggtttcgtgctttgttgcccaaagcagcattgcaggtagaggaggaaagctggaatgcttacccgtacacacggactcgctacacatgcccatttgtcgaaaagttctcgatcgagattgagacatactaccttcccgacgggggtcagcagcccaatgtttttaacctctccggggctgaacggcgtcagagaatcctcgacacgattgacatcgtgagggacgctgttgcgccaggcgagtacaaggccgaggaagatccaaggctgtatcattcggtgaagaccggtcgaggtcccctctctgacgactgggccagaactgccgcacagaccggcccactgatgtgcgcgtacaaattatgtaaggttgaattccggtactggggaatgcaggccaagatagaacagttcatacacgacgtgggcctaaggagggtaatgttaagagctcataggcaggcatggtgctggcaagacgagtggaccgagctcagcatggctgatattagggctctggaagaggagactgccagaatgttggcccagaggatggctaaatgcaacaccggttctgaaggatccgaggctcaacccccagggaaaccctctacggaggcccgttccgccgcttcaaatacgggaacaccagatgggccagaggcgcctcctgggccagatgcatcgcccgacgcatcctttggcaagcagtggagctcttcatctagatcttcttactccagtcaacacggcggtgcggtttccccacagagtctttccgagtggagaatgcagaacatcgcacgcgatagcgagaacagtagtgaagaagagtttttcgatgctcacgagggattcagcgacagcgaggaggtgttcccaaaggagatgacgaaatggaatagcaatgatttcatcgacgcatttgctagtcctgtcgaggctgaaggtactccagagccgggtgcagaggcagcgaagggaatagaagatggtgcacaggcccctagagacagtgaagggctcgatggagccggtgagctgggagccgaggcttgtgccgtccatgctctctttctgattctccattcggggaatatcctagactcaggtcccggtgacgctaactccaaacaggcagacgtgcaaaccttgagctcagcctttgaggccgtcactagaattcacttccccgaggccttgggccacgtggccctcaggttagttccatgtcccccaatctgtgctgcagcttatgccttggtgagcaacctgtctccgtactcccacgacggagacagccttagtcgcagccaggatcacatccctctggctgctcttcccctgctggctacttctagtagtcggtatcagggcgcagtcgctacggtcattgcgcgtactaatcaagcatattctgcgttcttacgctccccagagggcgctgggttctgcggtcaggttgccctcataggcgacggcgttggcggtattctaggcttcgacgctctgtgtcacagcgccaacgccggaacaggctctagaggttcctcccggaggggctccatgaataacgaactactatcacccgaatttggtcccgtgcgcgatcccctggccgacggggtcgaaggcttggggagggggagcccggaaccaagcgctttgccaccacagagaattcccagtgacatggcctcccctgaaccagaaggatcacagaattccctgcaggccgctccggcaaccacaagctcatgggaacccaggagagcctcaacggccttttgtccaccagcagccagtagcgaggccccagacgggccttctagcactgctcgcctcgatttcaaagtttccggctttttcctttttggctctcctctaggattagtcctcgcattaaggaaaaccgtgatgcccgcactcgaggccgcacaaatgcggcctgcctgcgagcaaatttacaatctttttcacgcggctgacccgtgcgcttctagactggagcccctgctagctcctaagtttcaggcaatcgcgccactgactgtgcctagatatcagaaattcccacttggtgacgggtcttctctgctacttgcagatacactgcagacacactcttcgctcttcttggaggagctagaaatgctggtccccagtacgcctactagcaccagtggggcattctggaaaggaagtgagctcgccaccgacccaccagcccagcctgctgccccaagcaccaccagcgaagtcgtgaaaatactggaacggtggtggggcaccaaacgaatcgattattccctgtattgccccgaagccctcacggctttccctaccgtgacccttccacacttattccacgcatcttattgggagagcgccgatgtggttgcattcatcctgcgtcaggtcattgagaaagagaggcctcaattggccgagtgcgaggagccctcaatctacagccctgccttccccagggagaagtggcaacgtaagcgcacccaggtcaagattcgcaacgttaccagcaatcatcgggcttcagataccgtggtttgcgagggcaggccacaggttctgagcggcaggtttatgtacggacccttggatgtcgtgacactgaccggtgagaaggtggacgtatatatcatgactcagcccctatccggaaaatggatccacttcggcactgaggtcaccaacagctccggtaggctgaccttccccgttcccccagagagggcactgggaatcggcgtctacccagtgcgcatggttgtcagaggtgatcatacctacgcagaatgctgtcttacagtcgtcgccaggggcactgaggccgtggttttctcaatcgacggctcttttaccgctagcgtgtccatcatgggatcagacccaaaagttcgggctggagctgtggacgtggtgcggcactggcaggactcaggatatttgatcgtgtacgtcactggcaggccggacatgcagaagcatcgggtggttgcttggctgtcgcagcataactttccacacggcgtggtaagcttctgtgacgggctgactcacgacccactccgccagaaggctatgtttctgcaatccttagtgcaggaggtggaactaaatattgtagccggatacgggtcaccaaaagacgtggccgtatatgcagccctgggcctgtccccttctcagacctacatcgtggggcgagccgttagaaaactgcaggcacagtgtcaattcctctccgacggctatgttgcccatctgggccagctggaagcgggaagccactcccatgcgtcctctggaccaccgcgagccgcattgggtaagagcagctatggagtggccgctcccgtagactttctccggaagcagtcccagctgctaaggagccgaggacctagccaggccgagagggagggccctggtaccccaccgaccactctagcaaggggaaaggcgaggtccatatcccttaaactggatagtgaagagtag

SEQ ID NO: 150655 - DNA, 4189 bp, Artificial Sequence
  derived and/or modified sequence
cgcgggcggcggtgctaggctcgcctctgcctccctcgtggcgggcccggacatggggtcccgtggcctgagtccctcggccggcgcgcagggctcggggccgcgcgcagcctccccgcactgactgtcgcgccgtgccctgcgccaggaggagcggaggccgcgcgcggcccgccgagcgccttcaggatgctcatcaaggaataccacattctgctgcccatgagcctggacgagtaccaggtggcccagctctacatgatccagaaaaagagccgggaggagtctagtggtgagggcagcggcgtggagatcctggccaaccggccctacacggatgggcccgggggcagcgggcaatacacacacaaggtgtaccacgtgggctcccacatcccaggctggttccgggcactgctgcccaaggctgccctgcaggtagaagaggaatcctggaatgcctacccctacacccgaacccggtacacctgccctttcgtggagaaattctccattgaaattgagacctattacctgcctgatggggggcagcagccaaacgtcttcaacctgagcggggccgagaggagacagcgcatcctggacaccatcgacatcgtgcgggatgcagtggccccaggcgagtacaaagcagaagaggacccccggctttatcactcggtcaagacgggccgagggccactgtctgatgactgggcacggacggcggcacagacggggccccttatgtgtgcctataagctgtgcaaggttgagttccgctactggggcatgcaagccaagatcgagcagttcatccatgatgtaggtctgcgtcgggtgatgctgcgggcccaccgccaggcctggtgctggcaggatgagtggacagagctgagcatggctgacatccgggcactggaagaggagactgctcgcatgctggcccagcgcatggccaagtgcaacacaggcagtgaggggtccgaggcccagccccccgggaaaccgagcaccgaggcccggtctgcggccagcaacactggcacccccgatgggcctgaggcccccccaggcccagatgcctcccccgatgccagctttgggaagcagtggtcctcatcctcccgttcctcctactcatcccaacatggaggggctgtgtctccccagagcttgtctgagtggcgcatgcagaacattgcccgagactctgagaacagctccgaggaagagttctttgatgcccacgaaggcttctcggacagtgaggaggtcttccccaaggagatgaccaagtggaactccaatgacttcattgatgcctttgcctccccagtggaggcagagggaacgccagagcctggagccgaggcagctaaaggcattgaggatggggcccaagcacccagggactcagagggcctggatggagccggggagctgggggctgaggcatgcgcagtccacgccctcttccttatcctgcacagcggcaacatcctggactcaggccctggagacgccaactccaagcaggcggatgtgcagacgctgagctccgccttcgaggccgtcacccgcatccacttccctgaggccttgggccacgtggcgctgcgactggtgccctgtccacccatctgcgccgccgcctatgcccttgtctccaacctgagcccttacagccacgatggggacagcctgtctcgctcccaagaccacattccactggctgccctgccactgctggccacctcatcctcccgctaccagggcgccgtggccaccgtcattgcccgcaccaaccaggcctactcagccttcctgcgctcacctgagggtgccggcttctgtgggcaggtcgcactgattggagatggtgttggtggcatcctgggctttgatgcactctgccacagtgctaacgcgggcaccgggagtcggggcagcagccgccgtgggagcatgaacaatgagctgctctctccggagtttggcccagtgcgggaccccctggcagatggtgtggaaggcctgggtcggggcagcccagaaccctcggccttgcctccccagcgcatccccagcgacatggccagtcctgagcccgagggctctcagaacagccttcaggcagcccccgcaaccacctcctcctgggagccccggcgggcaagcacggccttctgcccacccgctgccagttccgaggcacctgacggccccagcagcactgcccgccttgacttcaaggtctctggcttcttcctcttcggctccccactgggcctggtgctggctctgcgcaaaactgtgatgcccgccctggaggcagcccagatgcgcccagcctgtgaacagatctacaacctcttccacgcggctgacccctgcgcctcacgcctcgagcccctgctggccccgaagttccaggccatcgccccactgaccgtgccccgctaccagaagttccccctgggagatggctcatccctgctgctggccgacactctgcagacgcactccagcctctttctggaggagctggagatgctggtgccctcaacacccacctctactagcggtgccttctggaagggcagtgagttggccactgaccccccggcccagccagccgcccccagcaccaccagtgaggtggttaagatcctggagcgctggtgggggaccaagcggatcgactactcgctgtactgccccgaggcgctcaccgcctttcccaccgtcacgctgccccacctcttccacgccagctactgggagtccgccgacgtggtggcgttcatcctgcgccaggtgatcgagaaggagcggccacagctggcggaatgcgaggagccgtccatctacagcccggccttccccagggagaagtggcagcgaaaacgcacgcaggtcaagatccggaacgtcacttccaaccaccgggcgagcgacacggtggtgtgcgagggccgcccccaggtgctaagcgggcgcttcatgtacgggcccctggacgtcgtcacgctcactggagagaaggtggatgtctacatcatgacgcagccgctgtcgggcaagtggatccactttggcaccgaagtcaccaatagctcgggccgcctcaccttcccagttcccccagaacgcgcgctgggcattggtgtctaccccgtgcgcatggtggtcaggggcgaccacacctatgccgaatgctgcctgactgtggtggcccgcggcacggaggctgtggtcttcagcatcgacggctccttcaccgccagcgtctccatcatgggcagcgaccccaaggtgcgagctggcgccgtggacgtggtcaggcactggcaggactccggctacctgatcgtgtatgtcacaggccggccggatatgcagaagcaccgcgtggtggcatggctgtcgcagcacaacttcccccacggcgtcgtctccttctgcgacggcctcacccacgacccactacgccagaaggcaatgtttctgcagagcctggtgcaggaggtagaactgaacatcgtggccggttatgggtctcccaaagatgtggctgtatacgcggcgctggggctgtccccgagccagacctacatcgtgggccgtgccgtgcggaagctacaggcgcagtgccagttcctgtcagacggctatgtggcccacctgggccagctggaagcgggctcgcactcgcatgcctcctcgggacccccgagagctgccttgggcaagagcagctatggtgtggctgcccccgtggacttcctgcgcaaacagagccagctgcttcgctcgaggggccccagccaggcggagcgtgagggcccgggaacaccacccaccaccctggcacggggcaaagcacggagcatcagcctgaagctggacagcgaggagtgaggcccacaccagcctggacctgggttatttattgacacacccaaggggcccgaggggctgcgtgtgggaggctggggacccagacttttggccccagcgctggcccccccagccccacaccctatatctccgtgtgctcctcggtgttacttccctttcatatgaggggacccagcgccggggggagggaggagggcgtgggcatgggcgcagaggcttttccagtgtgtataaatccatgaaaataaacgccacctgcacccca

SEQ ID NO: 150656 - protein, 645 aa, Artificial Sequence
  derived and/or modified sequence
MRPRKAFLLLLLLGLVQLLAVAGAEGPDEDSSNRENAIEDEEEEEEEDDDEEEDDLEVKEENGVLVLNDANFDNFVADKDTVLLEFYAPWCGHCKQFAPEYEKIANILKDKDPPIPVAKIDATSASVLASRFDVSGYPTIKILKKGQAVDYEGSRTQEEIVAKVREVSQPDWTPPPEVTLVLTKENFDEVVNDADIILVEFYAPWCGHCKKLAPEYEKAAKELSKRSPPIPLAKVDATAETDLAKRFDVSGYPTLKIFRKGRPYDYNGPREKYGIVDYMIEQSGPPSKEILTLKQVQEFLKDGDDVIIIGVFKGESDPAYQQYQDAANNLREDYKFHHTFSTEIAKFLKVSQGQLVVMQPEKFQSKYEPRSHMMDVQGSTQDSAIKDFVLKYALPLVGHRKVSNDAKRYTRRPLVVVYYSVDFSFDYRAATQFWRSKVLEVAKDFPEYTFAIADEEDYAGEVKDLGLSESGEDVNAAILDESGKKFAMEPEEFDSDTLREFVTAFKKGKLKPVIKSQPVPKNNKGPVKVVVGKTFDSIVMDPKKDVLIEFYAPWCGHCKQLEPVYNSLAKKYKGQKGLVIAKMDATANDVPSDRYKVEGFPTIYFAPSGDKKNPVKFEGGDRDLEHLSKFIEEHATKLSRTKEEL

SEQ ID NO: 150657 - DNA, 1938 bp, Artificial Sequence
  derived and/or modified sequence
atgaggccacggaaagctttcttgctattattgctgcttggcttagtccaactgttggctgtggctggggcggaggggccagatgaagattcctctaatagagaaaatgcaatagaagacgaagaggaggaagaggaggaggacgacgacgaggaagaagatgatttggaggtaaaagaagagaacggtgttctggtcctcaacgatgcaaatttcgacaattttgtggccgacaaagacacagtcttactggagttctacgctccttggtgcgggcactgcaaacagtttgctcctgaatacgagaaaatcgcgaatattctgaaagacaaggatccccccataccggtcgctaagattgatgcaacgtccgcaagcgtattggcttctagatttgatgtctctggatatccaacgatcaagatactgaaaaaagggcaagcggtggattacgagggttcacgcacccaggaggagatcgtggctaaggtccgggaggtaagccaacctgactggacacctcccccagaagtgaccctggtcctgactaaagagaacttcgacgaagtggtgaatgacgccgacattatcctcgtagagttctatgctccctggtgcggacactgtaagaagctcgcccctgagtacgaaaaagcggcgaaggagctcagcaaaaggtcaccgccaattcctctggctaaagtggacgcaaccgccgagaccgatttggccaaacggttcgacgtatctggataccctacgctgaagatattccggaagggcaggccctatgactacaatggccccagggagaaatacggtatcgtagattacatgattgagcaatccggacctccttctaaagaaattctgacgcttaagcaggtacaagagtttctgaaggatggggatgacgttatcataatcggagtctttaagggagagtcggatcctgcctaccagcagtatcaagatgcggctaacaatttgagggaggattataagttccatcatactttttctaccgaaatagccaagttcctgaaggtatctcagggccaactagtggtgatgcagccagagaaattccagtctaagtatgagccacgctcccacatgatggacgttcaggggagcactcaagattctgctataaaggactttgtgctgaagtatgccctgcccctggttggacaccgcaaggtttccaacgacgccaagcgatacactcggagaccactagtggttgtgtactactctgtggatttttcctttgattatcgggcagccacccagttctggcgatcaaaggtgttagaggttgcaaaggatttcccagaatatactttcgcaatcgccgatgaggaggactacgccggggaagtgaaggacctgggtctgagcgaatctggggaagacgtgaatgcagcgattctcgatgagtctgggaagaaattcgcgatggagccggaagaatttgattccgacacgctcagggagtttgtgaccgccttcaaaaaaggcaaactgaaacctgtcatcaaatcacagccggtccccaagaacaacaagggccccgtgaaggtggtggttggaaaaacctttgattcgatcgttatggatcccaaaaaagatgtgctcattgaattttatgctccctggtgcggtcactgtaagcagcttgagccagtgtacaactctctggccaaaaagtataaagggcagaagggacttgtgattgcaaagatggacgcgacagcgaacgacgtgccgagcgatagatataaagtcgaaggatttcccactatctacttcgcgccaagtggggacaaaaagaaccccgtgaagttcgaagggggagatagagatctcgagcacttatctaaattcatagaggaacacgccaccaagctgtcaagaactaaagaggagctatag

SEQ ID NO: 150658 - DNA, 1938 bp, Artificial Sequence
  derived and/or modified sequence
atgaggcccaggaaggccttcctgctgctgctgctgctgggcctggtgcagctgctggccgtggccggggctgagggcccagatgaggacagcagcaacagagaaaatgccattgaagatgaggaggaggaggaggaggaggatgatgatgaggaggaggatgacctggaggtgaaggaggagaatggagtgctggtgctgaatgatgccaactttgacaactttgtggccgacaaggacacagtgctgctggagttctacgccccctggtgtggccactgcaagcagtttgccccagaatatgagaagatcgccaacatcctgaaggacaaggacccccccatccctgtggccaagattgatgccaccagcgcctctgtgctggccagcagatttgatgtgtctggctaccccaccatcaagatcctgaagaagggccaggccgtggactatgagggcagcaggacccaggaggagatcgtggccaaggtgcgggaggtgtcccagcctgactggaccccacctcctgaggtgaccctggtgctgaccaaggaaaattttgatgaggtggtgaatgatgctgacatcatcctggtggagttctacgccccctggtgtggccactgcaagaagctggccccagaatatgagaaggccgccaaggagctgagcaagaggagcccccccatccccctggccaaggtggatgccacagctgagacagacctggccaagagatttgatgtgtctggctaccccaccctgaagatcttcaggaagggccggccctatgactacaacggcccccgggagaagtatggaattgtggactacatgattgagcagagcggcccccccagcaaggagatcctgaccctgaagcaggtgcaggagttcctgaaggatggagatgatgtgatcatcattggagtcttcaagggggagagtgaccctgcctaccagcagtaccaggatgctgccaacaacctgcgggaggactacaagttccaccacaccttcagcacagagatcgccaagttcctgaaggtgtcccagggccagctggtggtgatgcagcctgagaagttccagagcaaatatgagcccaggagccacatgatggatgtgcagggcagcacccaggacagcgccatcaaggactttgtgctgaagtatgccctgcccctggtgggccacaggaaggtgtccaatgatgccaagcgctacacccggcggcccctggtggtggtgtactacagcgtggacttctcctttgactacagagctgccacccagttctggaggagcaaggtgctggaggtggccaaggacttccctgagtacacctttgccatcgcagatgaggaggactatgctggggaggtgaaggacctgggcctgtctgagagcggggaggatgtgaatgctgccatcctggatgagagcggcaagaagtttgccatggagcctgaggagtttgacagcgacaccctgcgggagtttgtgacagccttcaagaagggcaagctgaagcctgtgatcaagagccagcctgtgcccaagaacaacaagggccctgtgaaggtggtggtgggcaagacctttgacagcatcgtgatggaccccaagaaggatgtgctgattgagttctacgccccctggtgtggccactgcaagcagctggagcctgtgtacaacagcctggccaagaagtacaagggccagaagggcctggtgattgccaagatggatgccacagccaatgatgtgcccagcgaccgctacaaggtggagggcttccccaccatctactttgcccccagcggggacaagaagaaccctgtgaagtttgaaggaggagaccgggacctggagcacctgagcaagttcatcgaggagcacgccaccaagctgagcaggaccaaggaggagctgtag

SEQ ID NO: 150659 - DNA, 1938 bp, Artificial Sequence
  derived and/or modified sequence
atgcggccccggaaggccttcctgctgctgctgctgctgggcctggttcagctgctggccgttgccggagctgagggcccggatgaggattcatctaaccgtgaaaatgccatagaggatgaggaagaggaggaagaggaagacgacgacgaggaagaagatgacctagaggttaaggaagaaaacggtgtgctagtcctcaacgacgcaaattttgataactttgtggcggacaaggacacagtgctgctcgagttttacgccccctggtgcggccactgcaaacagtttgcccccgagtacgaaaaaatagcgaacattctgaaggacaaggaccctcctatacccgtagctaagatcgatgccacctcggcatctgtgctagccagcagatttgacgtgtctggctacccaactattaagatcctgaaaaaggggcaggccgttgactacgaaggatcaaggactcaggaggagattgtggccaaggtccgcgaggtttcgcaacccgattggactccgccccctgaggtgacgctggtacttacaaaggagaactttgatgaagtcgtgaacgatgccgatattattctggtcgaattctatgctccatggtgcggccattgcaaaaaactggcacctgaatacgagaaggctgcgaaagagttaagtaagagatcccctcctattcccttggcaaaggtagacgctacagcagagactgatctcgccaaacgtttcgacgtcagtgggtacccgaccctgaagatatttcgaaaaggaagaccttatgactacaacggcccacgcgagaagtatggcatcgtagactacatgatcgagcagtccggaccgcccagcaaggagatcctgacactcaaacaggtacaggagttcttaaaggatggcgatgacgtgataattattggcgtgtttaagggcgaatctgatcccgcttatcaacagtaccaggatgccgctaacaatctgcgtgaagactacaagttccaccataccttcagtaccgaaattgcaaagttcctgaaggtcagtcagggccagctggtcgtaatgcaaccagagaaattccagtcgaagtacgaaccaagatcccatatgatggacgtccagggaagcactcaggactccgcaatcaaggattttgtcctgaaatatgctctgccactggtggggcaccggaaggtgtccaacgacgctaaacggtacacccgccggccactcgtcgtggtctactacagcgtggacttcagtttcgattatcgtgccgcaacacagttctggaggtccaaggtgctagaggtcgccaaggacttcccggaatatacgttcgctatagcagacgaggaagattacgccggggaggtcaaagacttgggccttagcgaatccggagaggacgtaaacgctgccattcttgatgaaagtggtaagaaattcgcaatggagccagaagagttcgactcagatacactccgggagttcgtgactgcctttaagaaaggcaagctaaaacctgtcattaaatctcagcccgtgcccaagaataacaagggccccgtcaaggtggtggtgggcaagacgttcgattctattgtcatggaccctaagaaggatgtgttaatcgaattttatgccccctggtgtggccactgcaagcagttagagcctgtgtataacagtttggccaagaagtacaagggccagaaggggttagtaatcgcgaaaatggatgccacagccaacgacgtgccctctgaccgatacaaggtggagggcttccccaccatatactttgcccccagcggggataagaaaaatccagtaaagtttgaaggaggtgatagggatctggagcacttgtccaagttcatcgaggagcacgcgacaaaactctcaaggacgaaagaagagctctag

SEQ ID NO: 150660 - DNA, 1938 bp, Artificial Sequence
  derived and/or modified sequence
atgaggcccagaaaggcattcctcctgctcctgttgcttggactcgtgcagctcctagccgttgccggtgccgagggccctgacgaagattcctccaatcgggagaacgctatcgaggatgaagaagaggaggaagaagaggacgatgatgaggaggaagacgacctggaggtgaaagaggagaatggagtgctcgtgctgaacgacgccaatttcgacaactttgtagctgacaaagacacagtgctcctcgagttctatgctccgtggtgcggtcattgcaaacagttcgctcccgagtacgagaagatcgctaatattctcaaggataaggatccacccatccctgttgcgaagattgatgctacatcagccagcgtgttggcatctaggtttgatgtttccgggtatccaacaattaagatcctcaagaaagggcaagccgttgactatgagggcagccggacccaggaggagatcgtcgcaaaagtccgcgaagtgtctcagccagattggacacccccacccgaagtcactctggtgctcactaaagagaattttgatgaggtcgtgaacgacgccgacatcatcctcgtggaattctatgccccttggtgcgggcactgcaagaaactggcgcctgaatacgaaaaggccgctaaggagctctctaagagatccccgccaattcctctcgccaaagttgatgccactgcagagaccgacctagccaagcgttttgacgtctcaggataccccaccctgaagatcttcaggaaaggacgcccttacgattataatggcccacgagaaaagtatggcatcgtggactatatgatcgagcagtccggcccaccctccaaggaaatcctcacactgaaacaggttcaggaatttttaaaggatggtgatgatgtgatcattattggcgtgttcaagggcgagtcagatccagcgtaccaacagtaccaggatgctgccaataatctccgcgaggattataagttccatcacaccttttccactgagatcgccaaatttttaaaagtctcccaaggacagctggttgtgatgcagcctgagaaatttcagagtaagtacgaacccaggtcccatatgatggatgtgcagggtagtacgcaggacagcgcgattaaggactttgttctcaaatatgccctaccactggtggggcatcggaaggtgagcaacgacgccaagagatatacaaggcgcccactggtggtggtgtactatagcgttgatttctccttcgattatcgtgccgcaacccagttttggcgctcaaaagtgctggaggtcgctaaagatttcccagagtatacctttgcaattgctgacgaagaagactacgctggcgaggtgaaagatctgggcctttctgagtctggggaagacgtgaacgccgctatcttagacgagtctggaaagaaattcgctatggaacccgaggagttcgactccgacactctccgcgaatttgttacagcttttaagaagggtaaattgaaacccgttatcaagtctcagcccgtgccaaagaacaataaagggccagtcaaggtggtggtgggcaagaccttcgattctattgtgatggaccctaagaaggatgtacttatcgagttctacgccccttggtgcggccattgcaagcaactcgagccagtgtataactccctggccaagaagtacaagggccagaaggggttggtgatcgccaagatggacgctaccgctaatgacgtgccctcagacagatacaaagtagagggtttcccaacgatatatttcgcgccatcaggggacaagaagaaccccgtaaaattcgaagggggtgatagagatctcgaacatttgagtaagtttatagaagagcatgccaccaagctcagtcgaaccaaagaagagctctag

SEQ ID NO: 150661 - DNA, 2903 bp, Artificial Sequence
  derived and/or modified sequence
ggcggcggagccgactcgtcgcggccgaggcgcgcgcggtccgtgccggcgtcagtctgggattggccggcccgcgacttcctccgccccctgccaatcgccggggacgacttccgtgggtttttccggctcccccgcgtcgctaaggagcgacgggctgtcggccagaccccgagttctcggtgcgctcagcggccgccgacgctaggaggccgcgctccgcccccgctaccatgaggccccggaaagccttcctgctcctgctgctcttggggctggtgcagctgctggccgtggcgggtgccgagggcccggacgaggattcttctaacagagaaaatgccattgaggatgaagaggaggaggaggaggaagatgatgatgaggaagaagacgacttggaagttaaggaagaaaatggagtcttggtcctaaatgatgcaaactttgataattttgtggctgacaaagacacagtgctgctggagttttatgctccatggtgtggacattgcaagcagtttgctccggaatatgaaaaaattgccaacatattaaaggataaagatcctcccattcctgttgccaagatcgatgcaacctcagcgtctgtgctggccagcaggtttgatgtgagtggctaccccaccatcaagatccttaagaaggggcaggctgtagactacgagggctccagaacccaggaagaaattgttgccaaggtcagagaagtctcccagcccgactggacgcctccaccagaagtcacgcttgtgttgaccaaagagaactttgatgaagttgtgaatgatgcagatatcattctggtggagttttatgccccatggtgtggacactgcaagaaacttgcccccgagtatgagaaggccgccaaggagctcagcaagcgttctcctccaattcccctggcaaaggtcgacgccaccgcagaaacagacctggccaagaggtttgatgtctctggctatcccaccctgaaaattttccgcaaaggaaggccttatgactacaacggcccacgagaaaaatatggaatcgttgattacatgatcgagcagtccgggcctccctccaaggagattctgaccctgaagcaggtccaggagttcctgaaggatggagacgatgtcatcatcatcggggtctttaagggggagagtgacccagcctaccagcaataccaggatgccgctaacaacctgagagaagattacaaatttcaccacactttcagcacagaaatagcaaagttcttgaaagtctcccaggggcagttggttgtaatgcagcctgagaaattccagtccaagtatgagccccggagccacatgatggacgtccagggctccacccaggactcggccatcaaggacttcgtgctgaagtacgccctgcccctggttggccaccgcaaggtgtcaaacgatgctaagcgctacaccaggcgccccctggtggtcgtctactacagtgtggacttcagctttgattacagagctgcaactcagttttggcggagcaaagtcctagaggtggccaaggacttccctgagtacacctttgccattgcggacgaagaggactatgctggggaggtgaaggacctggggctcagcgagagtggggaggatgtcaatgccgccatcctggacgagagtgggaagaagttcgccatggagccagaggagtttgactctgacaccctccgcgagtttgtcactgctttcaaaaaaggaaaactgaagccagtcatcaaatcccagccagtgcccaagaacaacaagggacccgtcaaggtcgtggtgggaaagacctttgactccattgtgatggaccccaagaaggacgtcctcatcgagttctacgcgccatggtgcgggcactgcaagcagctagagcccgtgtacaacagcctggccaagaagtacaagggccaaaagggcctggtcatcgccaagatggacgccactgccaacgacgtccccagcgaccgctataaggtggagggcttccccaccatctacttcgcccccagtggggacaaaaagaacccagttaaatttgagggtggagacagagatctggagcatttgagcaagtttatagaagaacatgccacaaaactgagcaggaccaaggaagagctttgaaggcctgaggtctgcggaaggtgggaggaggcagacgccctgcgtggcccatggtcggggcgtccacgccgaggccggcaacaaacgacagtatctcggattcctttttttttttttttaattttttatactttggtgtttcacttcatgctctgaatactgaataaccatgaatgactgaatagtttagtccagatttttacagaggatacatctatttttatcattatttggggtttgaaaaatttttttttacaccttctaatttctttatttctcaaagcagataattcttctgtgtgaaaatgttttctttttttaatttaaggtttaaaattccttttccaaatcatgttgattttgctctttgctttttcgttgtctgagaaattgttggcgtagatttggcttctggtatgtgtttctgattgcttcctgttgagcacaaagtgagagctgccactgagcagccctgccaggggtgctgtttcaggctgggcatcgccaggcggcctccctgcaaaccaagggctgggggcaaaggggcatgatccagggtcccccagggtgggctcagctccagggagaggccacccacgtggcagccccacctcttgagagcccccagtgccggagcagaaaggaccctggacccagaggcagatactgcggggtggtagaaaaggtagagtaggctgtggcaatggaataaaacacgattaaaaacgttaa

SEQ ID NO: 150662 - DNA, 1938 bp, Artificial Sequence
  derived and/or modified sequence
atgagacccagaaaggccttcctgctgctgctgctgctgggcctggtgcagctgctggccgtggccggcgccgagggccccgacgaggacagcagcaacagagagaacgccatcgaggacgaggaggaggaggaggaggaggacgacgacgaggaggaggacgacctggaggtgaaggaggagaacggcgtgctggtgctgaacgacgccaacttcgacaacttcgtggccgacaaggacaccgtgctgctggagttctacgccccctggtgcggccactgcaagcagttcgcccccgagtacgagaagatcgccaacatcctgaaggacaaggacccccccatccccgtggccaagatcgacgccaccagcgccagcgtgctggccagcagattcgacgtgagcggctaccccaccatcaagatcctgaagaagggccaggccgtggactacgagggcagcagaacccaggaggagatcgtggccaaggtgagagaggtgagccagcccgactggacccccccccccgaggtgaccctggtgctgaccaaggagaacttcgacgaggtggtgaacgacgccgacatcatcctggtggagttctacgccccctggtgcggccactgcaagaagctggcccccgagtacgagaaggccgccaaggagctgagcaagagaagcccccccatccccctggccaaggtggacgccaccgccgagaccgacctggccaagagattcgacgtgagcggctaccccaccctgaagatcttcagaaagggcagaccctacgactacaacggccccagagagaagtacggcatcgtggactacatgatcgagcagagcggcccccccagcaaggagatcctgaccctgaagcaggtgcaggagttcctgaaggacggcgacgacgtgatcatcatcggcgtgttcaagggcgagagcgaccccgcctaccagcagtaccaggacgccgccaacaacctgagagaggactacaagttccaccacaccttcagcaccgagatcgccaagttcctgaaggtgagccagggccagctggtggtgatgcagcccgagaagttccagagcaagtacgagcccagaagccacatgatggacgtgcagggcagcacccaggacagcgccatcaaggacttcgtgctgaagtacgccctgcccctggtgggccacagaaaggtgagcaacgacgccaagagatacaccagaagacccctggtggtggtgtactacagcgtggacttcagcttcgactacagagccgccacccagttctggagaagcaaggtgctggaggtggccaaggacttccccgagtacaccttcgccatcgccgacgaggaggactacgccggcgaggtgaaggacctgggcctgagcgagagcggcgaggacgtgaacgccgccatcctggacgagagcggcaagaagttcgccatggagcccgaggagttcgacagcgacaccctgagagagttcgtgaccgccttcaagaagggcaagctgaagcccgtgatcaagagccagcccgtgcccaagaacaacaagggccccgtgaaggtggtggtgggcaagaccttcgacagcatcgtgatggaccccaagaaggacgtgctgatcgagttctacgccccctggtgcggccactgcaagcagctggagcccgtgtacaacagcctggccaagaagtacaagggccagaagggcctggtgatcgccaagatggacgccaccgccaacgacgtgcccagcgacagatacaaggtggagggcttccccaccatctacttcgcccccagcggcgacaagaagaaccccgtgaagttcgagggcggcgacagagacctggagcacctgagcaagttcatcgaggagcacgccaccaagctgagcagaaccaaggaggagctgtag

SEQ ID NO: 150663 - protein, 333 aa, Artificial Sequence
  derived and/or modified sequence
MVIAGASWMLGRAAASPTQTPPTTSTIRVARRSRVALVAMVIAAAGSGGPGRAEPQLSQPSLDCGRMRSSLTPLGPPVSRDRVIASFPKWYTPEACLQLREHFHGQVSAACQRRNTGTVGLKLSKVVVVGDLYVGKTSLIHRFCKNVFDRDYKATIGVDFEIERFEIAGIPYSLQIWDTAGQEKFKCIASAYYRGAQVIITAFDLTDVQTLEHTRQWLEDALRENEAGSCFIFLVGTKKDLLSGAACEQAEADAVHLAREMQAEYWSVSAKTGENVKAFFSRVAALAFEQSVLQDLERQSSARLQVGNGDLIQMEGSPPETQESKRPSSLGCC

SEQ ID NO: 150664 - protein, 311 aa, Artificial Sequence
  derived and/or modified sequence
MVIAGASWMLGRAAASPTQTPPTTSTIRVARRSRVALVAMVIAAAGSGGPGRAEPQLSQPSLDCGRMRSSLTPLGPPVSRDRVIASFPKWYTPEACLQLREHFHGQVSAACQRRNTGTVGFCKNVFDRDYKATIGVDFEIERFEIAGIPYSLQIWDTAGQEKFKCIASAYYRGAQVIITAFDLTDVQTLEHTRQWLEDALRENEAGSCFIFLVGTKKDLLSGAACEQAEADAVHLAREMQAEYWSVSAKTGENVKAFFSRVAALAFEQSVLQDLERQSSARLQVGNGDLIQMEGSPPETQESKRPSSLGCC

SEQ ID NO: 150665 - protein, 165 aa, Artificial Sequence
  derived and/or modified sequence
MVIAAAGSGGPGRAEPQLSQPSLDCGRMRSSLTPLGPPVSRDRVIASFPKWYTPEACLQLREHFHGQVSAACQRRNTGTVGLKLSKVVVVGDLYVGKTSLSAQYAHPQGFLTAMNQPHSPRPLSPGYAHSSHPSRAVASRRWRAPCRQPSDQYCSPRAWHTAAAL

SEQ ID NO: 150666 - DNA, 1002 bp, Artificial Sequence
  derived and/or modified sequence
atggtaattgcaggggcatcctggatgctgggaagggcagctgcttctccgactcagacgcctcctactaccagcactattcgagtggccagaaggtcacgcgtagctcttgtagctatggtgattgctgcagccggttccgggggtcctggcagggcagaaccccagcttagccaaccatccctggactgcggcagaatgcgaagcagcctcacccccctcggtccgcccgtatctcgagatagagtgatcgcctcatttccgaagtggtatacaccagaagcgtgtttgcagctgcgggaacacttccatggccaggtcagcgccgcctgccagagacgcaacaccggtaccgtgggtctgaaactgagtaaggtcgtcgtcgttggagatctctatgtgggaaagacttccctgatccaccgcttctgcaagaacgtctttgaccgggattacaaagccaccatcggggtggactttgaaatcgagcgtttcgaaatcgcgggcatcccctatagcctacaaatttgggacacagcaggacaggaaaaattcaagtgcatcgcatctgcctactacagaggcgcccaagtgattatcacagcttttgacctgactgatgtacaaacacttgaacatacccggcaatggttggaggatgcacttagggagaacgaagctggatcatgcttcatcttccttgttgggacaaaaaaggacctgttatccggggcggcctgtgaacaggcagaggctgacgcagtacatctggctcgcgagatgcaggccgaatactggtccgtgtctgctaaaactggagaaaatgttaaggcattctttagccgtgtggctgcgctggcgttcgagcagtcagtgctccaagacttggaacggcagagcagcgccaggttgcaagttggaaacggggacctgatccaaatggaggggtcgcccccagagactcaggaatctaaacggccatcctccttgggttgttgttag

SEQ ID NO: 150667 - DNA, 936 bp, Artificial Sequence
  derived and/or modified sequence
atggtcattgctggcgcctcatggatgctcgggcgtgctgctgcctccccgacgcagacgcctccgactacctcaacaattagagtggctcgtcggtccagagtggcactcgtcgccatggtgattgcagcagctggttctgggggaccaggtcgtgccgagccccaactgagccaaccgtcactggactgcggtcgcatgcggagtagtctcacgcccctggggccaccagtcagtcgggacagagtgattgcaagtttccccaaatggtatacccccgaggcatgtctgcagttaagagagcactttcatggccaggtgagtgccgcctgtcaacggcgaaataccgggactgtcggtttctgcaagaatgtcttcgatcgcgactataaagccacaatcggagtcgatttcgagattgagcgattcgagattgctggcatcccttattctttgcagatttgggacactgccggccaggaaaaattcaagtgcattgcctcggcatactaccgcggagcccaagtgattattacagcttttgaccttaccgacgtacagacattagaacacactagacagtggcttgaagatgcactccgagaaaatgaggccggcagttgctttattttcctggttggcaccaagaaggacctgttgtcaggggctgcgtgcgaacaggcagaagccgatgccgttcacctggccagagagatgcaggccgaatattggagtgtcagtgccaagactggagaaaacgtgaaggcctttttttctagagttgcagcgctcgctttcgaacaatctgttttacaggatcttgaacgacagtccagtgctaggctgcaagtgggcaacggggatctcatccagatggaagggagccctcctgaaacgcaggaatctaaaaggccatcatccctaggatgctgctag

SEQ ID NO: 150668 - DNA, 498 bp, Artificial Sequence
  derived and/or modified sequence
atggtgatcgccgccgcaggaagcggcggccctgggcgcgcggaaccccagctgtcccaaccttctctggactgtggccgtatgaggtccagtctcacccccctcggtcccccagtctctcgggacagagttattgctagttttccaaagtggtatactccagaggcttgcctgcagctccgtgagcattttcatgggcaggtctccgctgcatgccagcggagaaatactggcaccgttgggctgaagctttccaaggtcgtggtggttggggatctctatgtgggcaagacaagcctcagtgcacagtatgctcacccgcagggctttctgaccgctatgaatcagccgcacagtcctcgtcccctgagcccgggctacgctcacagctcccacccctccagggccgttgcaagtagacgctggcgggcaccctgcaggcagcctagcgatcaatattgttctccgcgggcctggcatacggccgcagccctctag

SEQ ID NO: 150669 - DNA, 1002 bp, Artificial Sequence
  derived and/or modified sequence
atggtgattgctggggcctcctggatgctgggccgggccgccgccagccccacccagaccccacccaccaccagcaccatccgggtggcccggcgcagccgggtggccctggtggccatggtgattgctgctgctggcagcggcggccctggccgggcagagccccagctgagccagcccagcctggactgtggccgcatgaggagcagcctgacccccctgggcccccctgtgtcccgggacagagtcatcgccagcttccccaagtggtacaccccagaggcctgcctgcagctgcgggagcacttccacggccaggtgtctgctgcctgccagaggaggaacacaggcaccgtgggcctgaagctgagcaaggtggtggtggtgggggacctgtatgtgggcaagaccagcctcatccaccgcttctgcaagaatgtgtttgaccgggactacaaggccaccatcggcgtggactttgaaattgaaagatttgaaattgctggcatcccctacagcctgcagatctgggacacagctggccaggagaagttcaagtgcatcgccagcgcctactacagaggagcccaggtgatcatcacagcctttgacctgacagatgtgcagaccctggagcacacccggcagtggctggaggatgccctgcgggagaatgaagctggcagctgcttcatcttcctggtgggcaccaagaaggacctgctgtctggagctgcctgtgagcaggccgaggctgatgctgtgcacctggcccgggagatgcaggccgagtactggagcgtgtctgccaagacaggagaaaatgtgaaggccttcttcagccgggtggccgccctggcctttgagcagagcgtgctgcaggacctggagcggcagagcagcgcccggctgcaggtgggcaatggagacctgatccagatggagggcagccccccagagacccaggagagcaagaggcccagcagcctgggctgctgctag

SEQ ID NO: 150670 - DNA, 936 bp, Artificial Sequence
  derived and/or modified sequence
atggtgattgctggggcctcctggatgctgggccgggccgccgccagccccacccagaccccacccaccaccagcaccatccgggtggcccggcgcagccgggtggccctggtggccatggtgattgctgctgctggcagcggcggccctggccgggcagagccccagctgagccagcccagcctggactgtggccgcatgaggagcagcctgacccccctgggcccccctgtgtcccgggacagagtcatcgccagcttccccaagtggtacaccccagaggcctgcctgcagctgcgggagcacttccacggccaggtgtctgctgcctgccagaggaggaacacaggcaccgtgggcttctgcaagaatgtgtttgaccgggactacaaggccaccatcggcgtggactttgaaattgaaagatttgaaattgctggcatcccctacagcctgcagatctgggacacagctggccaggagaagttcaagtgcatcgccagcgcctactacagaggagcccaggtgatcatcacagcctttgacctgacagatgtgcagaccctggagcacacccggcagtggctggaggatgccctgcgggagaatgaagctggcagctgcttcatcttcctggtgggcaccaagaaggacctgctgtctggagctgcctgtgagcaggccgaggctgatgctgtgcacctggcccgggagatgcaggccgagtactggagcgtgtctgccaagacaggagaaaatgtgaaggccttcttcagccgggtggccgccctggcctttgagcagagcgtgctgcaggacctggagcggcagagcagcgcccggctgcaggtgggcaatggagacctgatccagatggagggcagccccccagagacccaggagagcaagaggcccagcagcctgggctgctgctag

SEQ ID NO: 150671 - DNA, 498 bp, Artificial Sequence
  derived and/or modified sequence
atggtgattgctgctgctggcagcggcggccctggccgggcagagccccagctgagccagcccagcctggactgtggccgcatgaggagcagcctgacccccctgggcccccctgtgtcccgggacagagtgattgccagcttccccaagtggtacaccccagaggcctgcctgcagctgcgggagcacttccacggccaggtgtctgctgcctgccagaggagaaatactggaacagtgggcctgaagctgagcaaggtggtggtggtgggggacctgtatgtgggcaagaccagcctgagcgcccagtatgcccacccccagggcttcctgacagccatgaaccagccccacagcccccggcccctgagccctggctacgcccacagcagccaccccagcagagctgtggccagccgccgctggagggccccctgccggcagcccagcgaccagtactgcagcccccgggcctggcacacagctgctgccctgtag

SEQ ID NO: 150672 - DNA, 1002 bp, Artificial Sequence
  derived and/or modified sequence
atggtgatcgccggcgccagctggatgctgggccgggccgccgccagccctacccaaacaccaccaactacgagcactattagggtcgctaggaggagcagagttgccctcgtggctatggttattgccgctgcagggtcagggggaccaggcagagccgagccacagctgtcccagcctagtctggattgcggacgaatgcggagtagtctcaccccactcgggcctccggtgtcaagagaccgtgtgatcgccagctttccaaagtggtatacaccagaagcctgcttgcaactgcgcgaacatttccatggacaagtctccgctgcctgtcagaggcggaatacgggcactgtcggcttaaagttgtcaaaagtggtcgtcgttggggatctgtacgtgggcaagacttccctcatccataggttctgcaagaacgtcttcgaccgtgactacaaagccaccatcggagtcgacttcgaaattgaacggtttgaaattgccgggatcccctactctctgcagatttgggataccgccgggcaggaaaagttcaagtgcatagctagcgcctactaccggggagcacaggttattatcactgcctttgatctgactgatgtgcagacactggagcacacccgccagtggttggaagatgccctaagggagaatgaagcaggctcctgcttcatttttcttgtgggaacaaagaaggacctgctttccggagctgcttgtgagcaggcagaagccgatgctgtccaccttgcacgagagatgcaggctgaatattggtctgtgagcgctaagacgggtgagaatgtgaaggcgtttttcagtagggtggccgccctcgccttcgagcagtccgtcttgcaggacctggaacgacagtcttctgcgcgactgcaggtcggaaatggtgacttgatacaaatggaaggtagcccccctgaaacccaggaatctaagagacccagttctctgggctgctgctag

SEQ ID NO: 150673 - DNA, 936 bp, Artificial Sequence
  derived and/or modified sequence
atggtgatcgccggcgccagctggatgctgggccgggccgccgccagtcccacgcagacccctcccacaactagcacgatccgggtggcccgacggtcccgtgtggccctggtcgccatggtgatcgcagccgccggctctgggggcccggggcgggccgagccgcagctttcccagccctcattggattgtggccggatgcggagtagcctgaccccacttgggcctcccgtgagccgggatcgggtcattgccagtttcccaaagtggtatacccccgaggcatgcctgcagctgcgcgagcactttcacggtcaagtgagcgcagcctgccagaggaggaatactggcaccgtgggattctgcaagaacgtgtttgatcgggattataaggccaccattggagtagattttgaaatcgagaggttcgagattgccggaatcccttacagcctacagatttgggacacagccgggcaagagaaattcaagtgcattgcctctgcctactatcgcggcgctcaggtgatcataaccgcatttgacttaacagatgtgcaaacattggagcatactcggcagtggttggaagacgcgttgcgggagaatgaggctggctcttgttttattttcctggtaggtacaaagaaggatttgttgtccggggctgcatgcgaacaggctgaagctgacgccgtgcacctggccagggaaatgcaagcagaatattggagcgtgtcagctaagacaggggaaaacgtcaaggccttttttagcagggtggccgccctggcattcgagcagtctgtcctccaagacctggaacgacagtctagcgctagactccaagttggcaatggcgatctgattcaaatggaaggtagcccgccggagacgcaggagtctaagagaccctccagcctgggatgttgttag

SEQ ID NO: 150674 - DNA, 498 bp, Artificial Sequence
  derived and/or modified sequence
atggtgatcgccgccgccggcagcggcggccccggccgggccgagccgcagctctcccagccgtccctcgattgcggacgcatgaggtcctcactcaccccgctcggccctcctgtgagccgtgacagagtcatcgcctccttccctaagtggtacacccccgaggcttgcttgcagcttagagagcatttccatggtcaggtgtctgctgcatgccagcggaggaatactgggactgttggactgaagctgtccaaagtggtagtcgtaggagatctttacgttggtaagacctccttgagtgcacaatatgcccatcctcagggctttctcacagctatgaaccagccacactctccacgccccctaagtccgggctatgcccattccagccacccttctagagcggtcgctagtaggaggtggagagctccctgcagacaaccgagcgatcagtactgtagcccccgagcatggcacacagcggccgccctgtag

SEQ ID NO: 150675 - DNA, 1002 bp, Artificial Sequence
  derived and/or modified sequence
atggtcatcgccggagcttcatggatgctgggcagggccgcagctagccccacccagacccctcctaccaccagcacaatcagggtcgccagaagatctagagtggcgctggtggcaatggttatcgcagcggctgggtccgggggtcccggtcgcgctgagcctcagctgtcgcagccttcgttggactgcgggcgtatgcgatcctcattgacccccttgggccctccagtgtcccgtgacagggtgatcgcatcattcccaaagtggtacacacctgaggcatgcttgcagttgcgggaacattttcatggccaggttagcgcagcatgtcagagacgcaatacgggaactgttgggctgaagttaagcaaggtagtggttgtgggagacctgtatgtgggaaagaccagcctcattcaccgtttttgtaaaaatgtcttcgacagggattataaagccaccattggagtcgattttgaaatcgaacgattcgagattgcaggcattccatactctctgcaaatctgggacaccgccggacaggagaaattcaagtgtattgcatctgcctattacagaggggctcaggtcatcatcacagcctttgacctgacagatgtgcaaaccctggagcatacacgccagtggttagaagacgcactccgggaaaatgaggcgggaagctgcttcatcttcctggtgggaaccaaaaaggacttactgtctggcgcagcctgcgagcaggccgaggctgacgcagtccacctggccagggaaatgcaggccgagtactggtcggtatccgctaaaacaggggaaaacgttaaggccttcttctcaagagtcgctgcgctcgccttcgagcagagtgtactacaggatttggagcgccagtcaagtgctaggctgcaggtaggtaatggtgatctcattcaaatggagggcagtcctcctgaaacccaggaaagtaaacgcccaagcagcctcggatgttgttag

SEQ ID NO: 150676 - DNA, 936 bp, Artificial Sequence
  derived and/or modified sequence
atggtcatcgctggcgctagttggatgttgggacgcgctgccgcttctcccacgcaaactcccccaaccacatccacgattcgggtcgctcgccgtagccgcgtggccctcgttgctatggtgatagcagccgctgggagcgggggtcctggcagagctgaaccccaactgagccagccgtccctggattgcggtagaatgagatcttctttaaccccgctgggtccacccgtgtcaagagatcgcgtcattgcgtctttccccaagtggtacacaccggaagcatgtctccagcttcgagagcacttccatggccaagtcagcgccgcttgccagcgaaggaacaccggcaccgtgggtttctgtaagaacgtgtttgaccgcgattataaagccacaatcggagtggattttgaaatcgaaagatttgaaattgcgggaatcccctactcactgcagatctgggacactgctggccaagaaaaattcaaatgtattgcctcagcatattaccgcggagcacaagttataattactgccttcgaccttaccgacgttcagacattagaacatacaagacaatggcttgaagacgccctccgggagaatgaagccggaagctgttttatcttcctcgtcggaaccaaaaaagatctactttctggggctgcctgtgagcaggctgaggcagacgctgtccatctggctcgggagatgcaagccgaatactggtccgtgagtgctaaaaccggtgagaacgttaaggccttcttcagccgggttgctgcactcgctttcgaacagagtgtcctccaggatttggaaaggcagagcagtgcacgattacaggttggaaatggcgacctgatccaaatggagggatccccccctgagacgcaagagagtaagcgcccatcttcactcggctgctgctag

SEQ ID NO: 150677 - DNA, 498 bp, Artificial Sequence
  derived and/or modified sequence
atggttatcgcagctgccggttctggtggacctggaagggcagagccacagctcagccagccaagcctcgactgtgggcgtatgcggtccagtctgacccctctcggacccccagtgtctcgcgacagagtgatcgcgtcctttcccaagtggtatacaccagaggcctgtttgcagctccgcgaacacttccatggccaggtgtcagctgcctgtcagcggagaaataccggcacagtgggcctgaagctttctaaagtagtcgtggttggagatctgtatgtcggcaagacgtctctatcagcgcagtatgcacatcctcagggatttctcaccgccatgaaccaaccacatagccctaggccgttgtcacccggatatgcccatagcagtcacccatcacgcgctgtcgcttctaggaggtggagggccccatgcaggcagccgtccgaccagtattgcagtccaagggcctggcacacagccgctgcgctctag

SEQ ID NO: 150678 - DNA, 3828 bp, Artificial Sequence
  derived and/or modified sequence
ctgccagccccgcccagactccaggcaggttctcgttgctatggtgatcgccggtgcaagctggatgcttggacgcgccgctgccagtccaacgcagaccccgcccacgacgtcgacgattcgtgtagcccgcaggtcccgcgtggctctcgttgccatggtgatcgccgccgctggctcaggcggaccaggccgcgcggagccccagctttcacagccatcgctggactgtggaagaatgaggtcctccctgacacctttggggccccctgtgagccgcgaccgtgtcatcgccagcttccctaagtggtacacgccggaagcctgtttgcagctcagggagcacttccacgggcaggtcagcgctgcctgccaacgcaggaacacggggactgtcgggctcaaactctccaaggtggtggtggttggcgatctctacgtggggaagaccagcctcatccacaggttttgcaagaatgtttttgatcgagactacaaggccaccattggggtggactttgaaattgagcgctttgagattgctgggattccctatagcctccagatctgggacacagctgggcaggagaagttcaagtgcatcgcatctgcctactaccggggtgcccaggtgatcatcacggcctttgacctcactgacgtgcagaccctggagcataccaggcagtggttggaggatgctctgagggagaacgaggcaggctcctgcttcatcttcctcgtgggaaccaagaaggaccttctgtcaggggccgcatgtgagcaggccgaagcagacgctgtgcacctggccagggagatgcaggccgagtactggtcagtgtcggccaagactggcgagaacgtgaaggcattcttcagccgcgtagccgccctggcattcgagcagtcggtgctgcaggacctggagaggcagagcagtgcccggctccaggtcggcaatggagacctaatccaaatggaagggagtccgcccgagacccaggagagcaagaggccctccagcctgggctgctgctaactggggcctgcgtggaaggcctccgctccctgcacacacacggacaggaatttccgtgactgtggtgtggagactggagcccaagctctgcagcgtgtcgccctcaagctgtaggcccatgttccagtccctccacccacccaccgggctcagctccagggcacagtcacttgtccgttgcaggttgggcactagaaaaggcccccactggctgcctgggagccccacaccaccgggccagtgcaggcactgtggtgatcccataaaaggccagtccatttgcagggtcatcagacagtcacctttggcctcaagaggcctcagaactgcaaactcctgcgtcggtctatactactcggccatggcccacatcagcagtcaaccctgcactctttcccagcgatcttggatgtgtccccaggatccgtcacagtgttccaggcaacctggacttgtcaaagtcagcacctgaaggagaggccacctgccattccccctgggagttttctgttgtcagcaggacttatggttctgggtctcagagcttcaggcctcactgtccttctgccacggatgctcaaggttcctgggcagaccagcacctctggaggacaatggacaaaatgtctcttagacctgttctggctgaagggctatctctggcacctctgagatccctaggtcctgccctcctggtccgtgggccaggatgtgcagaacaaccactcaggcctttctggcccacctggacagtgcatttacctgtgtgctgcgggaggcagactgcacagctgtcctagggtaactcactctgcagcccttgaacatggcactgccctcctctggcactcatgctgggcctgtgcccactgctgcctctccatccctctctcattggcctatacatctcttaggacctttgtaatggtgtccatgcacctttagaggacttcagaggccctgccaagtctagcatgttcctgtctccaacaccgcctcctgcacatgcagagcagacagaaataccccacacattccccagcctctctgcccagtatgctcatccacagggttttctcactgctatgaaccagccccacagccccaggcccctgtcacctggctatgcccactcatcccacccgtctcgtgctgttgcttcccgtagatggcgagcaccttgcaggcagccttctgatcagtactgctctcctagggcctggcacactgcagctgccctgtaaatgttcagctcagcgattgccaaataccagttagggaagaacactggcatctttttctattcattcccccttcaacatattttttgtagttttttatataaatgacttttttttttttttgagatggagtttcacccttgttgcccaggctggagtgcaatggcgtaatctcggctcagtgcaacctctgcctcccaggttgaagcgattctcctgcctcagcctcccaagtagctgggattacaggcatgcaccaccatgcctggctaattttgtatttttagtagagatggggtttctccatgttggtcaggctgctctcggactcctgatctcaggtgacctgcccacctcggcctcccgaagtgctgggattacaagggtgagccaccatgcccggccataaatgattttattcatttttatgttttcttttgggcggcgggatggagtctctgtcacccaggctggcgtgcaatggcacgatcttggctcactgcaagcttccccttccgggttcatgccattctcctgcctcagcctcccgagtagctgggactacaggcacgtgtgaccatgccgggctaattttttatatttttagtagagagaggtttcaccgtgttagccaggatggtctcgatgatctgacctcgtgatctgcccgcctcggcctcccaaagtgctgggattacaggcctgagccaccgcgtccggcctccataaatgacttttaaaggggttgtatgtttagtgtgaacaaagacagtacaaagcatataaaatacaaggtgaaagccccccccccgccacattagctgcgcccctgaagtgtctccagcagaagagatggatgaatggaaggacacacagatggacagagagcaggaaagactgttagctctgctaacagtcaggactattccttctggactctgtgcctttgcctgcacagctagtgttgatggcttgtttgttgttttcaccagagtgagctccttctggacatactgcctggcagcctgccttcctagggagctggcgccaaggcctctccctgatggcacacaaggagcctccttcctgtagcagcgcccagttttcatgtggatggattgtagttcatttgaccctccccatccgcgggccatccggcttgtgtccagcttttagctcttgccaatggtgctgcagtggccattcttgtagttatagctttgcgtactcaggaaggcccttctcccgactgcggcccccagcctggtccactaaatgcagcctgtggtcgggcagacagcattggggtccattaggaagaccaggtttgctgggcataagcttcacaggacgggagaacctgcccatggtggactgtcgttctccacagctcccttcccttgccccttcgggcctccaggatatgtttgcgggggtgggtgtggtgtccagctgttaccagcttctgagctagagctgtactgcctcacgtacacccccacctctgtaaatggtccttgattaaatcgtcctcatattacctcc

SEQ ID NO: 150679 - DNA, 936 bp, Artificial Sequence
  derived and/or modified sequence
atggtgatcgccggtgcaagctggatgcttggacgcgccgctgccagtccaacgcagaccccgcccacgacgtcgacgattcgtgtagcccgcaggtcccgcgtggctctcgttgccatggtgatcgccgccgctggctcaggcggaccaggccgcgcggagccccagctttcacagccatcgctggactgtggaagaatgaggtcctccctgacacctttggggccccctgtgagccgcgaccgtgtcatcgccagcttccctaagtggtacacgccggaagcctgtttgcagctcagggagcacttccacgggcaggtcagcgctgcctgccaacgcaggaacacggggactgtcgggttttgcaagaatgtttttgatcgagactacaaggccaccattggggtggactttgaaattgagcgctttgagattgctgggattccctatagcctccagatctgggacacagctgggcaggagaagttcaagtgcatcgcatctgcctactaccggggtgcccaggtgatcatcacggcctttgacctcactgacgtgcagaccctggagcataccaggcagtggttggaggatgctctgagggagaacgaggcaggctcctgcttcatcttcctcgtgggaaccaagaaggaccttctgtcaggggccgcatgtgagcaggccgaagcagacgctgtgcacctggccagggagatgcaggccgagtactggtcagtgtcggccaagactggcgagaacgtgaaggcattcttcagccgcgtagccgccctggcattcgagcagtcggtgctgcaggacctggagaggcagagcagtgcccggctccaggtcggcaatggagacctaatccaaatggaagggagtccgcccgagacccaggagagcaagaggccctccagcctgggctgctgctaa

SEQ ID NO: 150680 - DNA, 1317 bp, Artificial Sequence
  derived and/or modified sequence
gttgccatggtgatcgccgccgctggctcaggcggaccaggccgcgcggagccccagctttcacagccatcgctggactgtggaagaatgaggtcctccctgacacctttggggccccctgtgagccgcgaccgtgtcatcgccagcttccctaagtggtacacgccggaagcctgtttgcagctcagggagcacttccacgggcaggtcagcgctgcctgccaacgcaggaacacggggactgtcgggctcaaactctccaaggtggtggtggttggcgatctctacgtggggaagaccagcctctctgcccagtatgctcatccacagggttttctcactgctatgaaccagccccacagccccaggcccctgtcacctggctatgcccactcatcccacccgtctcgtgctgttgcttcccgtagatggcgagcaccttgcaggcagccttctgatcagtactgctctcctagggcctggcacactgcagctgccctgtaaatgttcagctcagcgattgccaaataccagttagggaagaacactggcatctttttctattcattcccccttcaacatattttttgtagttttttatataaatgacttttttttttttttgagatggagtttcacccttgttgcccaggctggagtgcaatggcgtaatctcggctcagtgcaacctctgcctcccaggttgaagcgattctcctgcctcagcctcccaagtagctgggattacaggcatgcaccaccatgcctggctaattttgtatttttagtagagatggggtttctccatgttggtcaggctgctctcggactcctgatctcaggtgacctgcccacctcggcctcccgaagtgctgggattacaagggtgagccaccatgcccggccataaatgattttattcatttttatgttttcttttgggcggcgggatggagtctctgtcacccaggctggcgtgcaatggcacgatcttggctcactgcaagcttccccttccgggttcatgccattctcctgcctccataaatgacttttaaaggggttgtatgtttagtgtgaacaaagacagtacaaagcatataaaatacaaggtgaaagccccccccccgccacattagctgcgcccctgaagtgtctccagcagaagagatggatgaatggaaggacacacagatggacagagagcaggaaagactgttagctctgctaacagtcaggactattccttctggactctgtgcctttgcctgcacagctagtgttgatggcttgtttgttgttttcaccagagtgagc

SEQ ID NO: 150681 - DNA, 1002 bp, Artificial Sequence
  derived and/or modified sequence
atggtgatcgccggcgccagctggatgctgggcagagccgccgccagccccacccagaccccccccaccaccagcaccatcagagtggccagaagaagcagagtggccctggtggccatggtgatcgccgccgccggcagcggcggccccggcagagccgagccccagctgagccagcccagcctggactgcggcagaatgagaagcagcctgacccccctgggcccccccgtgagcagagacagagtgatcgccagcttccccaagtggtacacccccgaggcctgcctgcagctgagagagcacttccacggccaggtgagcgccgcctgccagagaagaaacaccggcaccgtgggcctgaagctgagcaaggtggtggtggtgggcgacctgtacgtgggcaagaccagcctgatccacagattctgcaagaacgtgttcgacagagactacaaggccaccatcggcgtggacttcgagatcgagagattcgagatcgccggcatcccctacagcctgcagatctgggacaccgccggccaggagaagttcaagtgcatcgccagcgcctactacagaggcgcccaggtgatcatcaccgccttcgacctgaccgacgtgcagaccctggagcacaccagacagtggctggaggacgccctgagagagaacgaggccggcagctgcttcatcttcctggtgggcaccaagaaggacctgctgagcggcgccgcctgcgagcaggccgaggccgacgccgtgcacctggccagagagatgcaggccgagtactggagcgtgagcgccaagaccggcgagaacgtgaaggccttcttcagcagagtggccgccctggccttcgagcagagcgtgctgcaggacctggagagacagagcagcgccagactgcaggtgggcaacggcgacctgatccagatggagggcagcccccccgagacccaggagagcaagagacccagcagcctgggctgctgctag

SEQ ID NO: 150682 - DNA, 936 bp, Artificial Sequence
  derived and/or modified sequence
atggtgatcgccggcgccagctggatgctgggcagagccgccgccagccccacccagaccccccccaccaccagcaccatcagagtggccagaagaagcagagtggccctggtggccatggtgatcgccgccgccggcagcggcggccccggcagagccgagccccagctgagccagcccagcctggactgcggcagaatgagaagcagcctgacccccctgggcccccccgtgagcagagacagagtgatcgccagcttccccaagtggtacacccccgaggcctgcctgcagctgagagagcacttccacggccaggtgagcgccgcctgccagagaagaaacaccggcaccgtgggcttctgcaagaacgtgttcgacagagactacaaggccaccatcggcgtggacttcgagatcgagagattcgagatcgccggcatcccctacagcctgcagatctgggacaccgccggccaggagaagttcaagtgcatcgccagcgcctactacagaggcgcccaggtgatcatcaccgccttcgacctgaccgacgtgcagaccctggagcacaccagacagtggctggaggacgccctgagagagaacgaggccggcagctgcttcatcttcctggtgggcaccaagaaggacctgctgagcggcgccgcctgcgagcaggccgaggccgacgccgtgcacctggccagagagatgcaggccgagtactggagcgtgagcgccaagaccggcgagaacgtgaaggccttcttcagcagagtggccgccctggccttcgagcagagcgtgctgcaggacctggagagacagagcagcgccagactgcaggtgggcaacggcgacctgatccagatggagggcagcccccccgagacccaggagagcaagagacccagcagcctgggctgctgctag

SEQ ID NO: 150683 - DNA, 498 bp, Artificial Sequence
  derived and/or modified sequence
atggtgatcgccgccgccggcagcggcggccccggcagagccgagccccagctgagccagcccagcctggactgcggcagaatgagaagcagcctgacccccctgggcccccccgtgagcagagacagagtgatcgccagcttccccaagtggtacacccccgaggcctgcctgcagctgagagagcacttccacggccaggtgagcgccgcctgccagagaagaaacaccggcaccgtgggcctgaagctgagcaaggtggtggtggtgggcgacctgtacgtgggcaagaccagcctgagcgcccagtacgcccacccccagggcttcctgaccgccatgaaccagccccacagccccagacccctgagccccggctacgcccacagcagccaccccagcagagccgtggccagcagaagatggagagccccctgcagacagcccagcgaccagtactgcagccccagagcctggcacaccgccgccgccctgtag

SEQ ID NO: 150684 - protein, 786 aa, Artificial Sequence
  derived and/or modified sequence
MVRRGWSVCTAILLARLWCLVPTHTFLSEYPEAAEYPHPGWVYWLQMAVAPGHLRAWVMRNNVTTNIPSAFSGTLTHEEKAVLTVFTGTATAVHVQVAALASAKLESSVFVTDCVSCKIENVCDSALQGKRVPMSGLQGSSIVIMPPSNRPLKASAASCTWSVQVQGGPHHLGVVAISGKVLSAAHGAGRAYGWGFPGDPMEEGYKTLLKGISGKFNSGELVAIMGPSGAGKSTLMNILAGYRETGMKGAVLINGLPRDLRCFRKVSCYIMQDDMLLPHLTVQEAMMVSAHLKLQEKDEGRREMVKEILTALGLLSCANTRTGSLSGGQRKRLAIALELVNNPPVMFFDEPTSGLDSASCFQVVSLMKGLAQGGRSIICTIHQPSAKLFELFDQLYVLSQGQCVYRGKVCNLVPYLRDLGLNCPTYHNPADFVMEVASGEYGDQNSRLVRAVREGMCDSDHKRDLGGDAEVNPFLWHRPSEEVKQTKRLKGLRKDSSSMEGCHSFSASCLTQFCILFKRTFLSIMRDSVLTHLRITSHIGIGLLIGLLYLGIGNEAKKVLSNSGFLFFSMLFLMFAALMPTVLTFPLEMGVFLREHLNYWYSLKAYYLAKTMADVPFQIMFPVAYCSIVYWMTSQPSDAVRFVLFAALGTMTSLVAQSLGLLIGAASTSLQVATFVGPVTAIPVLLFSGFFVSFDTIPTYLQWMSYISYVRYGFEGVILSIYGLDREDLHCDIDETCHFQKSEAILRELDVENAKLYLDFIVLGIFFISLRLIAYFVLRYKIRAER

SEQ ID NO: 150685 - protein, 678 aa, Artificial Sequence
  derived and/or modified sequence
MACLMAAFSVGTAMNASSYSAEMTEPKSVCVSVDEVVSSNMEATETDLLNGHLKKVDNNLTEAQRFSSLPRRAAVNIEFRDLSYSVPEGPWWRKKGYKTLLKGISGKFNSGELVAIMGPSGAGKSTLMNILAGYRETGMKGAVLINGLPRDLRCFRKVSCYIMQDDMLLPHLTVQEAMMVSAHLKLQEKDEGRREMVKEILTALGLLSCANTRTGSLSGGQRKRLAIALELVNNPPVMFFDEPTSGLDSASCFQVVSLMKGLAQGGRSIICTIHQPSAKLFELFDQLYVLSQGQCVYRGKVCNLVPYLRDLGLNCPTYHNPADFVMEVASGEYGDQNSRLVRAVREGMCDSDHKRDLGGDAEVNPFLWHRPSEEVKQTKRLKGLRKDSSSMEGCHSFSASCLTQFCILFKRTFLSIMRDSVLTHLRITSHIGIGLLIGLLYLGIGNEAKKVLSNSGFLFFSMLFLMFAALMPTVLTFPLEMGVFLREHLNYWYSLKAYYLAKTMADVPFQIMFPVAYCSIVYWMTSQPSDAVRFVLFAALGTMTSLVAQSLGLLIGAASTSLQVATFVGPVTAIPVLLFSGFFVSFDTIPTYLQWMSYISYVRYGFEGVILSIYGLDREDLHCDIDETCHFQKSEAILRELDVENAKLYLDFIVLGIFFISLRLIAYFVLRYKIRAER

SEQ ID NO: 150686 - DNA, 2361 bp, Artificial Sequence
  derived and/or modified sequence
atggtacggagaggctggagtgtctgcactgccatcctattagcgcgactgtggtgcctggtgccaacacatacatttcttagtgagtaccctgaggcagcggagtacccccaccctggctgggtttactggctgcagatggcagttgccccaggtcatttgcgtgcctgggttatgcgtaacaacgtgactaccaatatcccctctgccttctccgggaccttaactcatgaggagaaggccgtactcacagtattcaccggaacagccacggccgtgcatgttcaggtggcggcactcgctagcgctaagctcgaaagttctgtgttcgtcacagattgtgtgtcatgcaagatcgagaacgtgtgcgattcagcgcttcagggcaagcgcgtgcccatgagtgggctgcaggggagtagcatcgtaattatgcctcccagtaacaggccactgaaagcttccgccgcaagttgcacttggtctgtgcaggttcagggaggccctcaccacttaggcgtggtcgccatctcaggaaaagtgttgagcgccgctcatggtgcaggcagggcatacggatggggattcccaggagatccaatggaggagggatacaagactctgctcaagggaatttcagggaaatttaactctggcgaactcgtcgctattatgggaccatccggtgctgggaaaagcaccctgatgaatattctggccggctaccgcgaaactggaatgaagggcgcagtgctgataaatggccttccgcgcgatttgcggtgtttccgcaaggttagttgctacataatgcaggacgatatgcttttgccccacctcacagtgcaagaagcaatgatggtgtctgctcacctgaagctgcaagagaaggacgaaggcagacgggagatggtcaaggagatcctgactgctttggggctgctgagttgcgctaacaccagaaccgggtcactctctggaggacagcggaagaggctggccatagcactggaactggtcaataaccccccagtgatgtttttcgacgagccaacgtctgggctagattctgctagttgttttcaggtggtgtctctgatgaaaggtctggcacaaggcggacgttccattatatgtactatccaccagcctagcgctaaactgtttgagctgttcgatcaactgtacgtcttgagtcaggggcagtgcgtgtaccggggcaaggtctgtaacctagttccctaccttcgggacctgggactgaattgtcctacctatcacaacccagccgatttcgtgatggaggtagctagtggcgagtacggcgaccagaactcacgtttagttagagcggtgcgcgagggtatgtgtgacagtgatcacaaacgggatttagggggcgacgccgaggtcaacccatttctttggcatcgaccctcagaagaggttaaacagaccaagagattgaaagggcttagaaaggatagcagcagcatggaggggtgccactcgttctctgcatcatgtctcactcagttctgcatactgtttaaaaggacgtttctcagcataatgcgtgacagtgttctaactcatctgagaatcaccagtcacattggcataggtttgctgattggactgttgtatctggggataggaaatgaagccaagaaagtcttgtccaatagcgggttcctgttcttcagtatgcttttcctgatgttcgccgctctgatgccaacagtgcttacattcccactggagatgggagtatttctgcgggagcatttgaactattggtactccctgaaagcctactacttagctaagacgatggcagacgttcctttccagattatgtttcctgtggcctattgtagcatcgtttactggatgacttctcaaccaagcgatgctgtgcgctttgttctgtttgccgctctgggaaccatgacctccctggtggctcagtcattagggctgctcatcggggcagcaagtacttcactgcaggtggctacctttgttgggccggtgaccgccattcctgtcttactcttcagtggtttctttgtttccttcgataccatacctacgtatcttcaatggatgtcatatattagctacgtgcgctacggctttgagggcgtgatcttgagtatttatgggcttgatcgggaagacctgcactgtgatatcgacgagacatgtcacttccagaaatcagaggcgatcctccgggaactagacgtggagaacgctaagctgtatctggacttcattgttctgggtattttttttatcagtctcagactcatcgcgtacttcgttcttagatataaaatccgagcggaaagatag

SEQ ID NO: 150687 - DNA, 2037 bp, Artificial Sequence
  derived and/or modified sequence
atggcatgtttaatggccgcctttagcgtgggtactgcaatgaacgcttccagttattccgctgaaatgacagagccaaaatccgtgtgtgttagtgtggacgaggtcgtgtcgagcaacatggaggctaccgaaaccgatctgctgaatggacatcttaaaaaggtggacaacaaccttacagaggcgcaaaggttctcgagcctgcccaggagggcggcagtcaacattgaattccgcgatctgagctatagcgtgccggaagggccatggtggcgcaagaagggctacaagaccctccttaaaggcatctcaggtaaatttaatagcggcgagctcgtggcaataatggggccaagtggagccggaaaatccaccctgatgaatattttggctggttatcgcgaaacgggaatgaagggtgccgttttgattaacggcctgccacgggatctgagatgctttagaaaagtttcttgctatatcatgcaggacgatatgcttctcccgcacctgacagtccaagaagccatgatggtgagtgcgcatttgaaattgcaggagaaggacgagggcagaagggagatggtgaaggaaatcctgacagcattggggcttttgtcttgcgccaataccagaaccggttccctttcagggggccagcggaaaaggctcgctattgctctggaacttgtgaacaaccctcccgttatgttcttcgacgaaccaacgagcgggcttgactctgcctcgtgcttccaggttgtgtcactgatgaagggtctcgcccaaggtggtcgaagcatcatttgtacgatacaccagccctccgccaaactgtttgaactgtttgatcagctgtacgtactgagtcagggccagtgcgtgtaccggggaaaagtttgcaacctggtaccctatctgagagacctggggctgaactgtccgacctatcacaaccccgcggatttcgttatggaggtggcgagtggagaatacggcgatcagaactcgcggttggtgagggcagtccgggagggcatgtgtgatagtgaccataaacgagacctgggcggagatgcagaggtgaatccttttctgtggcataggcccagcgaggaggttaaacaaacgaagcgtctcaaaggactgaggaaggactctagctccatggagggatgccattctttcagtgcctcatgcttaacccagttctgcattctgttcaaacggactttcctgtctatcatgcgggacagtgtcttaacccacctgaggataaccagtcatatcggaataggcctcttgatagggctgttgtacctgggcatcggcaatgaagcaaaaaaggtcttgtctaatagtggatttctgtttttttcgatgctcttcctaatgttcgccgctttaatgcccactgttttaacctttccacttgaaatgggggtgtttttacgcgagcacctcaattactggtatagtctgaaggcatattatttggccaaaaccatggcagacgtaccatttcaaatcatgtttccggtggcctactgcagtattgtatactggatgacgagtcaacccagtgatgccgtgcgatttgtactctttgcggccctgggaacaatgacttccctcgtcgcacagtctctgggtcttttaattggagcggcaagcacttcactgcaggttgctacctttgttggccccgtgactgctattcccgtcctgctattctcaggcttttttgtgtcctttgacaccattcccacctatctccaatggatgtcatacattagctacgttaggtatggatttgagggagtcattctgtcaatctatggcctcgatcgagaagatctgcattgtgatattgacgagacatgccatttccagaaaagcgaggctatcttgagagagctggacgtagagaacgccaaactatacctagactttattgtactgggaattttttttatcagcctccgtctgatagcatactttgtcctcagatataaaatcagggcagaacgctag

SEQ ID NO: 150688 - DNA, 2475 bp, Artificial Sequence
  derived and/or modified sequence
atgttagccgtgcagcagactgagcacctccccgcatgtccacccgccagacggtggagctccaacttctgccccgaatctacggaggggggtcccagcctgctcggacttcgagacatggtgagacgcggttggtccgtttgtactgccattcttctggcaagactgtggtgtctggtccctactcacacctttctcagcgagtacccggaggccgccgagtacccgcaccctggctgggtgtactggctgcagatggccgtggcccccggtcacctgagggcatgggttatgcggaataacgtaactaccaatataccaagcgctttctcagggacactgacgcatgaagaaaaagccgttctgacagtattcacaggcactgccaccgccgtgcatgtccaggttgccgcccttgcctctgcaaaattggagtcatctgtcttcgtcactgactgcgtgtcatgtaaaattgaaaatgtctgcgatagcgctctccaaggcaagagggtgcctatgagcggcctgcagggcagcagcattgtgattatgcctccttcaaacaggcctctggctagtgccgccagttgcacatggagcgtgcaggtccagggaggcccacaccatctcggagtagtcgccatcagcggcaaagtgctatcggctgctcatggcgccggaagagcttacggatgggggttccctggagatcctatggaggagggatacaaaaccctactgaaagggatttccggcaaattcaacagcggtgagctggtcgccataatgggaccatctggggcgggcaagagcaccctgatgaacattctggcagggtaccgggaaaccggcatgaaaggcgcagtgctcatcaatggtctgcccagagatctgcgttgtttccggaaggtaagttgttacattatgcaagacgacatgcttctgccgcacctcactgttcaggaggccatgatggttagcgctcacctcaaactgcaggagaaggatgaagggaggcgggaaatggtcaaggagatcctgaccgcgctcggcctactttcctgtgcgaacaccagaacaggaagcctcagcgggggacagcgaaaacggttagctatcgcgctcgaactggtcaataacccacccgttatgttcttcgacgagcctacatcagggttagacagcgcctcatgcttccaggtggtgtcccttatgaaaggattggcacagggaggcagaagcatcatatgcactatccaccagccgtctgctaagctcttcgagctgtttgatcaactgtacgtactctctcaaggtcagtgtgtatatagaggaaaggtttgcaaccttgtgccttacctgcgagatttgggattaaactgccccacctaccacaatccagcagactttgtgatggaggtggcgagtggcgagtacggcgaccagaattctcgccttgtccgggcggtacgtgaaggcatgtgcgatagcgatcacaagagggacttaggtggagacgcagaggtcaatccttttctctggcatcgcccttctgaagaggtgaaacagaccaaaagactgaagggcctgcggaaagactctagctctatggagggttgccattcattctcagctagctgcttaacgcagttctgcattctgtttaaacgaaccttcttaagcattatgcgtgatagtgtgctcactcacctgcgtataacgtctcacattggcattggcctgctcatcggcctgctttacctcgggattggtaatgaggcaaaaaaagtcttgtctaattcgggctttcttttcttctctatgcttttcctgatgtttgccgctctgatgcctaccgtgctaacgttcccactggaaatgggcgtctttctacgcgaacatcttaactattggtactccctcaaggcttactacctggctaaaaccatggctgatgttcccttccaaatcatgtttcccgtcgcttactgttctatagtgtactggatgaccagccaaccttcagacgccgtgcgttttgtcctcttcgccgcgctggggaccatgacttccctggtggctcagtctttgggcctgctgataggggccgcctccacatccctgcaggttgcgacattcgtagggcctgtgaccgccattccagttctcctgttctccggcttcttcgtcagttttgacactattccaacctatctccagtggatgagctacatttcctacgtgcgctatggatttgagggtgtaatcctgtctatttacgggcttgatagggaggatttacactgtgacatcgatgaaacttgtcacttccagaagtccgaggcgatcctccgggagctggacgtcgagaatgcaaaattgtacctggattttattgttctgggaatctttttcatctccctgagactgattgcctatttcgtactcagatataagatcagggctgagaggtag

SEQ ID NO: 150689 - DNA, 2361 bp, Artificial Sequence
  derived and/or modified sequence
atggtgagaagaggctggagcgtgtgcacagccatcctgctggcccggctgtggtgcctggtgcccacccacaccttcctgtctgagtacccagaggccgctgagtacccccaccctggctgggtgtactggctgcagatggctgtggcccctggccacctgcgggcctgggtgatgaggaacaacgtgaccaccaacatccccagcgccttcagcggcaccctgacccatgaggagaaggctgtgctgaccgtcttcaccggcacagccacagctgtgcacgtgcaggtggccgccctggccagcgccaagctggagagctctgtgtttgtgacagactgtgtgtcctgcaagattgaaaatgtgtgtgacagcgccctgcagggcaagagggtgcccatgagcggcctgcagggcagcagcatcgtcatcatgccacccagcaaccggcccctgaaggccagcgctgccagctgcacctggagcgtgcaggtgcagggcggcccccaccacctgggcgtggtggccatcagcggcaaggtgctgtctgctgcccacggggccggccgggcctacggctggggcttccctggggaccccatggaggagggctacaagaccctgctgaagggcatcagcggcaagttcaacagcggggagctggtggccatcatgggccccagcggggccggcaagagcaccctgatgaacatcctggccggctaccgggagaccggcatgaagggagctgtgctgatcaatggcctgccccgggacctgcgctgcttcaggaaggtgtcctgctacatcatgcaggatgacatgctgctgccccacctgactgtgcaggaggccatgatggtgtctgcccacctgaagctgcaggagaaggatgagggcagaagagagatggtgaaggagatcctgacagccctgggcctgctgagctgtgccaacaccaggacaggcagcctgagcggcggccagaggaagaggctggccatcgccctggagctggtgaacaacccccctgtgatgttctttgatgagcccaccagcggcctggacagcgccagctgcttccaggtggtgtccctgatgaagggcctggcccagggcggccgcagcatcatctgcaccatccaccagcccagcgccaagctgtttgagctgtttgaccagctgtatgtgctgagccagggccagtgtgtgtaccggggcaaggtgtgcaacctggtgccctacctgcgggacctgggcctgaactgccccacctaccacaacccagctgactttgtgatggaggtggccagcggggagtatggagaccagaacagccggctggtgcgggctgtgcgggagggcatgtgtgacagcgaccacaagagggacctgggcggagatgctgaggtgaaccccttcctgtggcaccggcccagcgaggaggtgaagcagaccaagaggctgaagggcctgaggaaggacagcagctccatggagggctgccacagcttcagcgccagctgcctgacccagttctgcatcctcttcaagaggaccttcctgagcatcatgagggacagcgtgctgacccacctgcgcatcaccagccacatcggcatcggcctgctgattggcctgctgtacctgggcattggaaatgaggccaagaaggtgctgagcaacagcggcttcctgttcttctccatgctgttcctgatgtttgctgccctgatgcccaccgtgctgaccttccccctggagatgggcgtcttcctgcgggagcacctgaactactggtacagcctgaaggcctactacctggccaagaccatggctgatgtgcccttccagatcatgtttcctgtggcctactgcagcatcgtgtactggatgaccagccagcccagtgatgctgtgcgctttgtgctgtttgctgccctgggcaccatgaccagcctggtggcccagagcctgggcctgctgattggagctgccagcaccagcctgcaggtggccacctttgtgggccctgtgacagccatccctgtgctgctcttcagcggcttctttgtgtcctttgacaccatccccacctacctgcagtggatgagctacatctcctatgtgcgctatggctttgagggcgtcatcctgagcatctacggcctggaccgggaggacctgcactgtgacattgatgagacctgccacttccagaagtctgaggccatcctgcgggagctggatgtggagaatgccaagctgtacctggacttcatcgtgctgggcatcttcttcatcagcctgcggctgattgcctactttgtgctgcgctacaagatccgggcagagaggtag

SEQ ID NO: 150690 - DNA, 2037 bp, Artificial Sequence
  derived and/or modified sequence
atggcctgcctgatggccgccttctctgtgggcacagccatgaatgccagcagctacagcgctgagatgacagagcccaagtctgtgtgtgtgtctgtggatgaggtggtgagcagcaacatggaggccacagaaacagacctgctgaatggccacctgaagaaggtggacaacaacctgacagaggcccagcgcttcagcagcctgcccaggagagctgctgtgaacatcgagttccgggacctgagctacagcgtgcctgagggcccctggtggaggaagaagggctacaagaccctgctgaagggcatcagcggcaagttcaacagcggggagctggtggccatcatgggccccagcggggccggcaagagcaccctgatgaacatcctggccggctaccgggagaccggcatgaagggagctgtgctgatcaatggcctgccccgggacctgcgctgcttcaggaaggtgtcctgctacatcatgcaggatgacatgctgctgccccacctgactgtgcaggaggccatgatggtgtctgcccacctgaagctgcaggagaaggatgagggcagaagagagatggtgaaggagatcctgacagccctgggcctgctgagctgtgccaacaccaggacaggcagcctgagcggcggccagaggaagaggctggccatcgccctggagctggtgaacaacccccctgtgatgttctttgatgagcccaccagcggcctggacagcgccagctgcttccaggtggtgtccctgatgaagggcctggcccagggcggccgcagcatcatctgcaccatccaccagcccagcgccaagctgtttgagctgtttgaccagctgtatgtgctgagccagggccagtgtgtgtaccggggcaaggtgtgcaacctggtgccctacctgcgggacctgggcctgaactgccccacctaccacaacccagctgactttgtgatggaggtggccagcggggagtatggagaccagaacagccggctggtgcgggctgtgcgggagggcatgtgtgacagcgaccacaagagggacctgggcggagatgctgaggtgaaccccttcctgtggcaccggcccagcgaggaggtgaagcagaccaagaggctgaagggcctgaggaaggacagcagctccatggagggctgccacagcttcagcgccagctgcctgacccagttctgcatcctcttcaagaggaccttcctgagcatcatgagggacagcgtgctgacccacctgcgcatcaccagccacatcggcatcggcctgctgattggcctgctgtacctgggcattggaaatgaggccaagaaggtgctgagcaacagcggcttcctgttcttctccatgctgttcctgatgtttgctgccctgatgcccaccgtgctgaccttccccctggagatgggcgtcttcctgcgggagcacctgaactactggtacagcctgaaggcctactacctggccaagaccatggctgatgtgcccttccagatcatgtttcctgtggcctactgcagcatcgtgtactggatgaccagccagcccagtgatgctgtgcgctttgtgctgtttgctgccctgggcaccatgaccagcctggtggcccagagcctgggcctgctgattggagctgccagcaccagcctgcaggtggccacctttgtgggccctgtgacagccatccctgtgctgctcttcagcggcttctttgtgtcctttgacaccatccccacctacctgcagtggatgagctacatctcctatgtgcgctatggctttgagggcgtcatcctgagcatctacggcctggaccgggaggacctgcactgtgacattgatgagacctgccacttccagaagtctgaggccatcctgcgggagctggatgtggagaatgccaagctgtacctggacttcatcgtgctgggcatcttcttcatcagcctgcggctgattgcctactttgtgctgcgctacaagatccgggcagagaggtag

SEQ ID NO: 150691 - DNA, 2475 bp, Artificial Sequence
  derived and/or modified sequence
atgctggccgtgcagcagacagagcacctgcctgcctgccccccagcccggcgctggagcagcaacttctgcccagagagcacagagggcggccccagcctgctgggcctgcgggacatggtgcggcggggctggagcgtgtgcacagccatcctgctggcccggctgtggtgcctggtgcccacccacaccttcctgtctgagtacccagaggccgctgagtacccccaccctggctgggtgtactggctgcagatggctgtggcccctggccacctgcgggcctgggtgatgagaaataatgtgaccaccaacatccccagcgccttcagcggcaccctgacccatgaggagaaggctgtgctgactgtgttcaccggcacagccacagctgtgcacgtgcaggtggccgccctggccagcgccaagctggagagctctgtgtttgtgacagactgtgtgtcctgcaagattgaaaatgtgtgtgacagcgccctgcagggcaagagggtgcccatgagcggcctgcagggcagcagcatcgtcatcatgccacccagcaaccggcccctggccagcgctgccagctgcacctggagcgtgcaggtgcagggcggcccccaccacctgggcgtggtggccatcagcggcaaggtgctgtctgctgcccacggggccggccgggcctacggctggggcttccctggggaccccatggaggagggctacaagaccctgctgaagggcatcagcggcaagttcaacagcggggagctggtggccatcatgggccccagcggggccggcaagagcaccctgatgaacatcctggccggctaccgggagaccggcatgaagggagctgtgctgatcaatggcctgccccgggacctgcgctgcttcaggaaggtgtcctgctacatcatgcaggatgacatgctgctgccccacctgactgtgcaggaggccatgatggtgtctgcccacctgaagctgcaggagaaggatgagggcagaagagagatggtgaaggagatcctgacagccctgggcctgctgagctgtgccaacaccaggacaggcagcctgagcggcggccagaggaagaggctggccatcgccctggagctggtgaacaacccccctgtgatgttctttgatgagcccaccagcggcctggacagcgccagctgcttccaggtggtgtccctgatgaagggcctggcccagggcggccgcagcatcatctgcaccatccaccagcccagcgccaagctgtttgagctgtttgaccagctgtatgtgctgagccagggccagtgtgtgtaccggggcaaggtgtgcaacctggtgccctacctgcgggacctgggcctgaactgccccacctaccacaacccagctgactttgtgatggaggtggccagcggggagtatggagaccagaacagccggctggtgcgggctgtgcgggagggcatgtgtgacagcgaccacaagagggacctgggcggagatgctgaggtgaaccccttcctgtggcaccggcccagcgaggaggtgaagcagaccaagaggctgaagggcctgaggaaggacagcagctccatggagggctgccacagcttcagcgccagctgcctgacccagttctgcatcctcttcaagaggaccttcctgagcatcatgagggacagcgtgctgacccacctgcgcatcaccagccacatcggcatcggcctgctgattggcctgctgtacctgggcattggaaatgaggccaagaaggtgctgagcaacagcggcttcctgttcttctccatgctgttcctgatgtttgctgccctgatgcccaccgtgctgaccttccccctggagatgggcgtcttcctgcgggagcacctgaactactggtacagcctgaaggcctactacctggccaagaccatggctgatgtgcccttccagatcatgtttcctgtggcctactgcagcatcgtgtactggatgaccagccagcccagtgatgctgtgcgctttgtgctgtttgctgccctgggcaccatgaccagcctggtggcccagagcctgggcctgctgattggagctgccagcaccagcctgcaggtggccacctttgtgggccctgtgacagccatccctgtgctgctcttcagcggcttctttgtgtcctttgacaccatccccacctacctgcagtggatgagctacatctcctatgtgcgctatggctttgagggcgtcatcctgagcatctacggcctggaccgggaggacctgcactgtgacattgatgagacctgccacttccagaagtctgaggccatcctgcgggagctggatgtggagaatgccaagctgtacctggacttcatcgtgctgggcatcttcttcatcagcctgcggctgattgcctactttgtgctgcgctacaagatccgggcagagaggtag

SEQ ID NO: 150692 - DNA, 2361 bp, Artificial Sequence
  derived and/or modified sequence
atggtgcggcggggctggagcgtgtgcaccgccatcctgctggccagactctggtgcctggtccccacccataccttcctctctgaatatcccgaggctgccgaatatcctcatccaggatgggtctactggctgcagatggccgtggcacccggtcacctacgcgcatgggtcatgaggaacaacgttactaccaatatcccgagcgctttttcgggcactctgacacacgaggagaaggcagtgctcacagtgttcaccggaaccgctactgcagtacacgtgcaggtggcagcactggcttcagcaaagctggaatctagcgtctttgttacggattgtgttagctgcaagattgagaacgtttgcgacagtgcactccaagggaaaagagtgcccatgtcaggcctacagggttcctccattgtaattatgccaccatctaatcggcctctgaaggcaagcgccgcgtcttgcacctggtcggtgcaagtgcagggggggccgcatcacttgggagtggtcgccatcagtggcaaggtgttaagcgctgctcatggcgctggcagagcctacggatgggggttcccaggcgatccaatggaagagggctataaaacactcctgaaaggcatcagcggaaagttcaattccggagaactcgtcgccattatgggaccatccggggctggcaaatctacgctgatgaacatcctcgcaggctaccgcgagacgggaatgaagggcgctgtgttgatcaatgggctgccaagggacctacgatgttttaggaaggtgagctgttacatcatgcaggatgacatgcttctgccccacctgacggtccaggaagcaatgatggtttctgctcacctgaagctccaggaaaaggatgagggtcgccgagaaatggtcaaggagattctaacggcccttggacttttgtcatgcgccaatacccgcactggatcgctgtccggcggccagcggaagaggttggccatagccctcgagctggttaacaatcctcctgttatgttctttgatgagcccaccagcggcctggactcagcttcgtgcttccaagttgtttcccttatgaaggggctcgcccagggcgggagatccatcatctgtaccatccaccaaccctctgccaagctttttgagctttttgatcagctgtatgtgcttagccaggggcagtgcgtgtatcgcggtaaggtgtgtaatttggtcccctatctaagggatttgggcctgaattgtccaacataccacaacccagcagattttgtcatggaagtcgctagcggcgagtacggtgaccagaatagtagactggtgagagccgtcagagagggaatgtgtgactccgaccataagagggatctcggaggcgatgccgaggtgaaccctttcctgtggcatcggccaagtgaagaggtgaaacaaacaaaaaggctaaagggattgcgaaaggacagttctagtatggagggttgccactccttttcggcatcatgccttactcagttttgtattctgtttaagagaacctttctgagcatcatgagagatagtgtcctgacccatttgcggatcactagccatatcgggattgggctgctcataggtctactgtacctgggcattggcaatgaggcgaagaaagtactttctaactctggatttttatttttttctatgcttttccttatgtttgctgcccttatgcccaccgttttaacgtttccattggagatgggggtatttctgagggagcaccttaactactggtattccttgaaagcctattatctcgccaaaaccatggcagacgtgccttttcagattatgtttcccgtagcctattgttccattgtatattggatgacctcccagccttccgatgccgtgcgctttgtgctattcgctgccttgggcacaatgacatctctggttgcccaatccttagggctgctcatcggggcggccagtaccagtttacaggtagcgacctttgtcggtccagtgacagccatcccagtactgcttttcagtggctttttcgtgagttttgataccatcccaacatatctccagtggatgagctacatctcttatgtccgttacgggttcgaaggtgtgattctctcaatctatggcttggatcgggaggatctccactgcgatatcgatgaaacctgtcactttcagaagtctgaggccattctgagagaactggacgtggagaacgcgaaactatatctggatttcatcgtgctgggaatctttttcattagtctgcgcctcatagcttacttcgtgctgcgatataagataagagccgaacgctag

SEQ ID NO: 150693 - DNA, 2037 bp, Artificial Sequence
  derived and/or modified sequence
atggcctgcctgatggccgccttcagcgtgggcaccgccatgaacgcaagctcctacagcgctgagatgacagaaccaaagtccgtgtgtgtcagtgtagacgaagttgtcagttccaacatggaagccacggaaactgacctgctgaacggacatctgaaaaaagttgacaataacctcacagaggctcaaaggtttagttctcttcctcgccgggccgctgttaacatagaatttagagatttgtcctattccgtcccagaaggaccgtggtggaggaaaaaaggttacaaaacccttctgaaagggatcagcggaaaattcaatagcggggagttagtcgccatcatgggacccagtggcgccgggaagtcaactttaatgaacattctggcaggctacagggagaccgggatgaaaggagcagtcctgattaatggcctgccacgtgacctgaggtgttttcggaaagtcagctgctatatcatgcaggacgatatgctattacctcatctgacggtccaggaggcaatgatggtttctgcacacctcaaattgcaagaaaaggatgaggggagaagggagatggtgaaagagatacttactgccctcggactgctgagttgtgccaacacacgtactgggtccttgagcggaggtcagaggaagcggctggcgattgctttggagctggttaacaatccaccagtcatgttcttcgatgagccaacctccggacttgattcagcgtcatgctttcaggttgtctcactcatgaaaggactggcccaaggggggcgatcgatcatttgcactatccatcagccaagcgctaagctgttcgagcttttcgatcagctatacgtgctttcacagggccaatgcgtgtaccgagggaaggtgtgcaatctcgtcccatacttacgtgacttagggctgaattgccccacatatcataatcccgctgattttgtcatggaggtggcttccggcgagtatggagaccagaatagtcggctggtgcgggccgtgagggagggaatgtgtgactctgaccacaaacgggacctcggcggtgacgctgaggtgaatccattcctgtggcacagacctagcgaggaagtgaagcagacaaaaagactaaaggggctgcgcaaagacagcagctccatggaggggtgccattcattttctgctagctgtctgacccaattttgcattttgttcaaaaggacattcctgtccatcatgagggatagtgtcttgacccacctgaggataacatcgcatataggtatcggtcttctgatcggcctactatacctgggtatcgggaatgaggccaaaaaagtgctgagtaatagtggatttctttttttctctatgttgttcctgatgtttgccgctctaatgcccacagtactaacctttcccttggagatgggagtcttcctccgcgagcacttgaactactggtattccctgaaagcttactacttggcaaaaacaatggcagatgtgccctttcagatcatgtttcccgtggcctattgctccatcgtgtactggatgacctcccagccttctgacgccgtgcgattcgtgctgttcgccgcccttgggacaatgaccagtctggtggcacagagcctggggctgctgatcggagctgcgtccacgtccttacaagtggctacttttgtcggccctgtcactgccatccctgtcctgctcttctccggattcttcgtttctttcgatactattcccacttacctgcagtggatgagttacatctcgtacgtacgctacgggtttgaaggggtgattcttagtatctacggtttagatcgggaagacttgcactgcgatattgacgagacctgccattttcagaaaagtgaggccatactgcgggaactagatgtggagaacgccaagctgtatctcgattttattgttctggggatctttttcatcagcttgcgtctcattgcatacttcgtgctgcgttataagatacgagcagagcgttag

SEQ ID NO: 150694 - DNA, 2475 bp, Artificial Sequence
  derived and/or modified sequence
atgctggccgtgcagcagaccgagcacctgcccgcctgcccccccgctcgcagatggtcttccaacttttgtcctgagagtactgagggaggtccaagcctccttggtctgcgtgatatggtaagacgggggtggagtgtttgcacggcgatactgttggctagactatggtgtctcgttcctacacataccttcctgagcgaatatcccgaggcagcggaatacccacaccccggatgggtctactggctccagatggccgtagcgcccggccacttacgggcctgggttatgcgcaacaacgttacaaccaacatccctagcgcattcagtggaacactgacacacgaagaaaaagcggtgttgaccgtgttcaccgggacggcaaccgcggttcatgtgcaggttgctgcactcgcatccgccaagctggaaagctctgtattcgtcacggattgcgtctcatgcaaaattgaaaacgtctgtgactccgctttacaaggcaagcgagtgcccatgtccggattgcagggatcttctatagtgattatgcctccatcaaaccggccgctggccagcgcggcctcctgtacctggagtgtccaggtccagggcggacctcatcaccttggtgtcgtggcaatctccggcaaagtactgtccgcagcccacggagccggccgagcttacgggtggggcttccctggcgaccccatggaggagggatacaagacactgctgaagggcatttcgggaaagtttaattccggcgaacttgtggcaataatgggtccatctggagccggtaaatccactttaatgaatatattggcgggctatcgcgagaccggtatgaaaggcgccgtcttaattaatggcctgccaagggacttgcgctgtttccgcaaagtgtcttgttacattatgcaagatgacatgctgctcccacacctcactgtgcaagaagccatgatggtaagcgcccacttgaagctgcaggagaaggacgaggggagaagagagatggtcaaggaaattttaacggcccttggcctgctgtcatgcgcaaacaccaggaccggatccctatctggcggccagcgcaagagactggccatagcacttgagctcgtgaacaatcctcctgtcatgttcttcgacgagcccactagcggtttggattccgcgtcttgttttcaggtcgtttctctgatgaagggacttgcccagggcggtaggtccattatttgcaccatccatcagccaagcgcaaaattgtttgagctgttcgaccaactctatgtccttagtcagggtcaatgcgtttataggggcaaggtttgcaacctggttccttatctgcgcgatttgggcttaaactgtccgacttaccataatccggccgactttgtcatggaggtggccagcggagaatatggggaccagaattcacgactcgtgagagccgtgagggaaggaatgtgtgactccgaccacaaaagagatctgggcggggacgcagaggtgaacccctttctgtggcaccgccctagcgaggaagtgaagcagacgaagagattaaagggactgagaaaggactccagctcaatggaaggctgccactccttttccgccagctgtctgactcagttttgcattttattcaagcggacctttttgtccattatgcgggattctgttcttacacatctgcgtattacctcccacatcggtattggtctgctgatcggcttgctttacctgggaattggtaatgaagccaagaaggtgctgagtaactctggattcctgttcttcagcatgctgtttctgatgtttgccgcattaatgcctaccgtgcttaccttccccctggagatgggagtgttcctcagggagcacctgaattattggtattctctcaaagcatattatttagccaaaacgatggcagatgtgccctttcagatcatgttcccagttgcctattgcagtattgtgtattggatgacctcgcagccttccgacgcggtgaggttcgtcctattcgcagcgctggggactatgacgtccctggtggctcaatctttagggctcctgatcggggcagccagcacttctctccaggtggcaacatttgtcggccccgtcacggctattcccgttctgcttttttctggtttcttcgtgtccttcgacactattcctacttacctgcaatggatgagttacatcagttacgttaggtatggcttcgaaggcgtgattctatctatctacggccttgaccgcgaagacctgcactgtgatattgacgaaacttgtcacttccaaaaatcagaagctatcctgagggagctggacgtggaaaacgctaagctctacctggatttcattgtcttgggaatttttttcatttctttacgcctaatagcatattttgtccttagatacaagattcgtgcagagcgatag

SEQ ID NO: 150695 - DNA, 2361 bp, Artificial Sequence
  derived and/or modified sequence
atggtcaggagaggatggtcagtgtgtacagcgattctacttgcccgtctctggtgccttgtgccgactcacacattcctgtccgagtacccagaggcagcagagtaccctcacccagggtgggtctattggctacagatggcggtcgcgccaggacacctgcgagcatgggttatgcgaaataatgtgaccactaatatcccttccgcattcagtgggaccctcacacacgaggagaaagctgtgctgaccgtgttcactggcacagccactgctgtgcacgtacaagtggcagcgctggcaagtgccaagctcgagtcctccgtgtttgtgaccgattgtgtgtcatgtaaaattgagaacgtgtgcgactctgcactgcaggggaagagggtgcctatgagcggtttacagggcagcagcattgtaatcatgcccccttctaaccgaccccttaaagcctccgcagcgtcttgcacctggtcagtgcaggtgcagggtgggccacatcatctaggggtggttgctatcagtggtaaagtcctgtccgcagcacacggcgcaggtcgtgcctacgggtggggattcccgggtgatccgatggaggaaggctacaaaaccctccttaaggggatctccggcaaatttaatagcggtgagctagttgccatcatgggaccaagcggcgcaggcaagtcaactctgatgaacattttggccggttatcgcgagaccgggatgaagggagcagtgctgatcaacggactgccgagggacttaaggtgcttccgcaaggtttcttgttacatcatgcaggacgacatgctcctccctcacctcaccgtgcaggaagcgatgatggttagtgctcacctcaagctgcaggaaaaagacgaaggcagacgggagatggtcaaggaaattctgactgcacttggcctgctgagttgcgctaacacaagaaccggatccctcagcggcggtcagagaaagagattggccattgcgctagaactcgtgaacaatccacctgtgatgtttttcgacgaaccaacctcagggctcgactctgcatcatgcttccaggtagtgtctctgatgaaaggccttgcccagggagggaggtctattatatgcaccatccatcagccttcagccaagctttttgagctgtttgaccagctgtatgtgctttctcaaggacagtgcgtgtacagaggaaaggtgtgtaacctcgtcccttacctgcgcgacctggggctcaattgccctacttaccacaacccagctgacttcgttatggaagtcgcttctggggaatatggagatcagaattcccgccttgtcagagccgtaagagaaggaatgtgcgactccgaccataagagagatctgggaggtgacgccgaagtcaacccatttctatggcatagaccttccgaggaagtgaagcagactaaaaggctaaaaggactgcggaaagattcatcttctatggaggggtgtcatagtttctcggcaagttgtctgacccagttctgtatcctcttcaagaggaccttcttgagcataatgagggacagcgttctaacacaccttcgcatcacatcccacatagggataggcctgctgattgggctattgtacctgggtatagggaatgaggcgaaaaaagttctgtctaacagtggttttctatttttcagtatgttgttcctcatgttcgcagctctgatgcctaccgtactcacattcccactggagatgggcgtatttctccgcgaacatctgaactattggtactcactgaaggcctactatttggcaaagacaatggccgacgtccccttccagatcatgttccctgtcgcctattgctccattgtttattggatgacaagtcagcccagcgacgcagttcgctttgtgctgttcgcggcacttgggacaatgacatcgttggtggcacagtctttgggtctgctcataggagccgcatccacgtctcttcaggtggccacttttgtgggacccgttacagctatacctgtgctgttgttttccggatttttcgtgtccttcgacaccatacctacatatctacagtggatgagctacatatcctatgtgcgctatggttttgaaggagtgatcctgtcaatatacggtctggatcgagaagacttacattgtgatattgacgaaacttgtcattttcaaaaatccgaagctattctccgcgagctggatgtggaaaacgctaagttatatctggattttatcgtgctggggatttttttcatcagccttaggctgatagcttactttgtgctgcgatacaagattcgtgctgaacggtag

SEQ ID NO: 150696 - DNA, 2037 bp, Artificial Sequence
  derived and/or modified sequence
atggcatgtctgatggctgctttcagcgtggggaccgcaatgaacgcatcctcatacagcgcagagatgaccgagccaaaatctgtttgcgtgagcgtggacgaagtcgtctcctcaaatatggaggccactgaaaccgatcttctgaacggacacctgaaaaaagtggacaacaacctcaccgaagcccaaagattctcttcactgccgaggcgagcggcagtgaatatagagttccgggatctgagttatagcgtgcccgagggaccatggtggcgaaaaaaggggtacaagacactactgaaaggtatttctggcaaattcaattccggcgagctcgtcgccattatggggcctagcggagcaggtaagagtacacttatgaacattctcgccggatacagggagactggcatgaagggagccgttcttattaacggcctgccacgtgacctgcgctgttttaggaaggtctcctgttacataatgcaggacgacatgctattgccacacctcacagtacaagaggcaatgatggtgtctgcccatttgaaattacaggaaaaagatgaaggcaggcgtgagatggtgaaggaaatactgaccgccttgggactactcagctgtgccaatacccgaacgggcagccttagcggcggacagagaaaacgtttggccattgcattggaactggttaataacccaccagtgatgtttttcgatgaacccacctccggcctggacagcgcttcctgcttccaggtggtgagtctgatgaaagggttggcccagggcggaaggtccatcatctgtacaattcaccagcccagcgccaagctctttgaactattcgaccagctgtacgtgctctcccaaggacagtgcgtgtatcgaggcaaagtctgcaacttggttccctacttgcgagatctggggctcaactgcccaacttaccataaccctgccgactttgtcatggaagttgcttcaggcgaatacggcgaccaaaacagtcgcttggtgcgtgctgtgagagaaggcatgtgcgattctgaccacaagagggacttaggtggtgatgcagaggtcaatccctttctttggcacaggccaagcgaagaagtcaagcagacaaaaagactgaagggccttcgcaaggattcttctagcatggagggttgtcactccttctccgcctcctgtttgactcaattctgcatacttttcaaacggacattcctatcaattatgcgagatagtgtcttaactcatcttcgcatcacaagccacattggtatcggactcttgattggcctgctttatttagggatcgggaatgaggccaaaaaggtcctgagcaatagtggctttctgttcttctctatgctcttcttgatgttcgctgcccttatgcctacagtgttgacatttccactggaaatgggggtgttcttgcgcgagcatttgaattattggtacagtcttaaggcctactatttagcaaagaccatggcagacgtccccttccagataatgttccctgtcgcctattgttcaattgtatattggatgacaagccagccctccgatgccgttcgcttcgtcctatttgctgcgcttggcactatgacatccttagttgctcaatctctggggttattgatcggggcagcatccacatctcttcaggtcgccactttcgtcggtcccgtgaccgccatcccggttcttctgtttagcggcttcttcgtctcctttgacactattccaacctatctgcagtggatgagttacatctcttacgtgcgctacggcttcgaaggagtgatcctgtccatctatgggctggacagagaggacctacactgcgacatcgatgagacctgccattttcaaaaatcagaagctatcctgcgggaactcgatgtggaaaatgcgaaactctacttggactttattgttctggggatatttttcatctcactcaggttgattgcctactttgttttgcgttataagatcagggcagagagatag

SEQ ID NO: 150697 - DNA, 2475 bp, Artificial Sequence
  derived and/or modified sequence
atgttggccgttcaacagacagagcatctcccagcatgccctcctgcacggcgttggtctagcaatttctgcccggaatcaactgaaggcggaccctcactgctcggactgcgtgacatggtgagacgcggatggtccgtctgtacagcgattttattagctcgcttatggtgtttagtgccgacccataccttcctgtccgagtatccagaagccgcagaatatccccacccaggatgggtctactggctgcagatggccgtcgcgccaggacacctgcgcgcttgggtgatgcggaataacgtgacaacaaatatcccttcagcgttttccgggacactgacccacgaggagaaagcagttctgacagtgtttaccggcacagccacagctgtccatgtccaggtcgcagctctcgccagtgctaagctagagagctccgtgtttgtcactgactgtgtatcatgtaagatcgaaaatgtatgcgattctgcacttcagggcaaacgagtgccaatgtccgggttgcagggcagttccattgttattatgccccctagcaataggccactcgcttcagccgcatcctgcacctggagcgtgcaggttcagggaggcccacatcatcttggagttgtggctatttccggcaaggtgctctctgccgcacacggggctggcagagcatacgggtgggggtttcccggagatccaatggaggagggctataaaaccttgctcaagggaatcagtggcaagttcaactcaggagaactggtagcaatcatgggccctagcggggcaggcaagagtacactgatgaatatccttgccggttatcgggaaaccggcatgaaaggcgcagttctgattaacggactaccaagagacctacgttgctttcggaaggtcagctgctatataatgcaggatgatatgctgctgccccacttgaccgtccaggaggcaatgatggtgtcagctcatctgaagctgcaggaaaaggacgaaggtcgtcgagagatggttaaagagattctgacagccctgggtcttctgtcttgtgccaacacgagaacggggagcctgagtgggggacagagaaagcgcttggccatcgccctggagctcgtgaataatcctccagtgatgttcttcgatgagccaacctccgggttggacagcgcctcctgctttcaggtggtgtcacttatgaagggactggcacaggggggacgatcaatcatctgtaccatacatcagccctccgctaagctttttgagctgttcgaccaactttacgtactgtcacaggggcaatgcgtatataggggtaaagtctgtaatctagtgccctatcttagagacttgggcctaaactgcccaacctaccacaacccggctgacttcgtgatggaggtcgccagcggggaatatggtgatcagaattcacgcctcgtgcgagctgtacgggagggcatgtgcgactctgatcacaaacgtgatctcggcggtgacgccgaagtcaatcccttcctctggcacaggccatcagaggaagtgaagcagaccaaacgcttgaaggggctgaggaaggactcatcttctatggagggatgccactcattctcagcgagctgcttaactcagttctgtatcctgttcaaacggactttcctgtccattatgcgggacagcgtcctgacacacctgagaataaccagccacatcggcataggattgctgattggtcttctctacctgggtatcggtaatgaagcaaaaaaggtcctgagcaactccgggttcctcttcttttccatgcttttcctgatgttcgcagccctaatgcccactgttcttacttttccgctggaaatgggagtcttcctccgcgagcatttaaattattggtacagtctgaaggcctattacctggccaagacaatggctgacgtccccttccaaatcatgtttcctgtcgcctattgctcaatcgtgtactggatgacttcccagccaagcgatgccgtcaggttcgtgttgtttgccgctctgggcaccatgacttccctggtggcccaatcactcggtctgcttattggggcagcgagcactagcctgcaggtggcaactttcgtgggccctgtgactgctattcccgtgttgttgtttagcggattctttgtgagctttgataccatacccacttatctgcagtggatgagctatatttcctacgtgcgttatggctttgagggtgtgatcctgtccatttacggcctcgatagagaagacctacattgcgacattgatgaaacttgccattttcagaagagcgaggctatacttagagagcttgacgttgaaaatgctaaactgtaccttgactttattgtgctgggaattttcttcatatcactgaggttgatcgcctatttcgtactgcggtataagatccgggctgagcgatag

SEQ ID NO: 150698 - DNA, 3211 bp, Artificial Sequence
  derived and/or modified sequence
atggtcaggagaggttggtctgtctgtaccgccattctcttggccagactgtggtgtctggtccctactcacaccttcctgtcagagtatccagaggccgcagagtatccacaccctggctgggtgtactggctacagatggctgtggctccaggtcacctgcgtgcctgggtgatgagaaataatgtcacaacaaatatcccatctgcattctctgggacactgacccatgaagagaaagcagttctcacagtttttacaggcacagccacagccgtgcatgtacaggtggcagctttagcttctgctaaactggagagctcagtgtttgtgacagactgcgtgtcctgcaaaatcgaaaatgtctgtgattcagctcttcagggaaaaagggtgccgatgtctggcctacagggctcaagcattgtcatcatgcccccatccaaccgtccactcaaggccagtgcggcatcctgcacgtggtcagtccaagtccagggagggccccatcacctgggggtggtcgctatcagtggcaaagtcttgtcagcagctcatggggcaggaagggcctatggttgggggtttcctggcgatcccatggaggaaggatacaagaccctcctgaaaggaatttccgggaagttcaatagtggtgagttggtggccattatgggtccttccggggccgggaagtccacgctgatgaacatcctggctggatacagggagacgggcatgaagggggccgtcctcatcaacggcctgccccgggacctgcgctgcttccggaaggtgtcctgctacatcatgcaggatgacatgctgctgccgcatctcactgtgcaggaggccatgatggtgtcggcacatctgaagcttcaggagaaggatgaaggcagaagggaaatggtcaaggagatactgacagcgctgggcttgctgtcttgcgccaacacgcggaccgggagcctgtcaggtggtcagcgcaagcgcctggccatcgcgctggagctggtgaacaaccctccagtcatgttcttcgatgagcccaccagcggcctggacagcgcctcctgcttccaggtggtctcgctgatgaaagggctcgctcaagggggtcgctccatcatttgcaccatccaccagcccagcgccaaactcttcgagctgttcgaccagctttacgtcctgagtcaaggacaatgtgtgtaccggggaaaagtctgcaatcttgtgccatatttgagggatttgggtctgaactgcccaacctaccacaacccagcagattttgtcatggaggttgcatccggcgagtacggtgatcagaacagtcggctggtgagagcggttcgggagggcatgtgtgactcagaccacaagagagacctcgggggtgatgccgaggtgaacccttttctttggcaccggccctctgaagaggtaaagcagacaaaacgattaaaggggttgagaaaggactcctcgtccatggaaggctgccacagcttctctgccagctgcctcacgcagttctgcatcctcttcaagaggaccttcctcagcatcatgagggactcggtcctgacacacctgcgcatcacctcgcacattgggatcggcctcctcattggcctgctgtacttggggatcgggaacgaagccaagaaggtcttgagcaactccggcttcctcttcttctccatgctgttcctcatgttcgcggccctcatgcctactgttctgacatttcccctggagatgggagtctttcttcgggaacacctgaactactggtacagcctgaaggcctactacctggccaagaccatggcagacgtgccctttcagatcatgttcccagtggcctactgcagcatcgtgtactggatgacgtcgcagccgtccgacgccgtgcgctttgtgctgtttgccgcgctgggcaccatgacctccctggtggcacagtccctgggcctgctgatcggagccgcctccacgtccctgcaggtggccactttcgtgggcccagtgacagccatcccggtgctcctgttctcggggttcttcgtcagcttcgacaccatccccacgtacctacagtggatgtcctacatctcctatgtcaggtatgggttcgaaggggtcatcctctccatctatggcttagaccgggaagatctgcactgtgacatcgacgagacgtgccacttccagaagtcggaggccatcctgcgggagctggacgtggaaaatgccaagctgtacctggacttcatcgtactcgggattttcttcatctccctccgcctcattgcctattttgtcctcaggtacaaaatccgggcagagaggtaaaacacctgaatgccaggaaacaggaagattagacactgtggccgagggcacgtctagaatcgaggaggcaagcctgtgcccgaccgacgacacagagactcttctgatccaacccctagaaccgcgttgggtttgtgggtgtctcgtgctcagccactctgcccagctgggttggatcttctctccattcccctttctagctttaactaggaagatgtaggcagattggtggtttttttttttttaacatacagaattttaaataccacaactggggcagaatttaaagctgcaacacagctggtgatgagaggcttcctcagtccagtcgctccttagcaccaggcaccgtgggtcctggatggggaactgcaagcagcctctcagctgatggctgcacagtcagatgtctggtggcagagagtccgagcatggagcgattccattttatgactgttgtttttcacattttcatctttctaaggtgtgtctcttttccaatgagaagtcatttttgcaagccaaaagtcgatcaatcgcattcattttaagaaattatacctttttagtacttgctgaagaatgattcagggtaaatcacatactttgtttagagaggcgaggggtttaaccgagtcacccagctggtctcatacatagacagcacttgtgaaggattgaatgcaggttccaggtggagggaagacgtggacaccatctccactgagccatgcagacatttttaaaagctatacaaaaaattgtgagaagacattggccaactctttcaaagtctttctttttccacgtgcttcttattttaagcgaaatatattgtttgtttcttcct

SEQ ID NO: 150699 - DNA, 3034 bp, Artificial Sequence
  derived and/or modified sequence
gagccggagccggatcccagccggagcccaagcgcagcccgcaccccgcgcagcggctgagccgggagccagcgcagcctcggccccgcagctcaagcctcgtccccgccgccgccgccgccgccgccgccgccgcccccggggcatggcctgtctgatggccgctttctcggtcggcaccgccatgaatgccagcagttactctgcagagatgacggagcccaagtcggtgtgtgtctcggtggatgaggtggtgtccagcaacatggaggccactgagacggacctgctgaatggacatctgaaaaaagtagataataacctcacggaagcccagcgcttctcctccttgcctcggagggcagctgtgaacattgaattcagggacctttcctattcggttcctgaaggaccctggtggaggaagaaaggatacaagaccctcctgaaaggaatttccgggaagttcaatagtggtgagttggtggccattatgggtccttccggggccgggaagtccacgctgatgaacatcctggctggatacagggagacgggcatgaagggggccgtcctcatcaacggcctgccccgggacctgcgctgcttccggaaggtgtcctgctacatcatgcaggatgacatgctgctgccgcatctcactgtgcaggaggccatgatggtgtcggcacatctgaagcttcaggagaaggatgaaggcagaagggaaatggtcaaggagatactgacagcgctgggcttgctgtcttgcgccaacacgcggaccgggagcctgtcaggtggtcagcgcaagcgcctggccatcgcgctggagctggtgaacaaccctccagtcatgttcttcgatgagcccaccagcggcctggacagcgcctcctgcttccaggtggtctcgctgatgaaagggctcgctcaagggggtcgctccatcatttgcaccatccaccagcccagcgccaaactcttcgagctgttcgaccagctttacgtcctgagtcaaggacaatgtgtgtaccggggaaaagtctgcaatcttgtgccatatttgagggatttgggtctgaactgcccaacctaccacaacccagcagattttgtcatggaggttgcatccggcgagtacggtgatcagaacagtcggctggtgagagcggttcgggagggcatgtgtgactcagaccacaagagagacctcgggggtgatgccgaggtgaacccttttctttggcaccggccctctgaagaggtaaagcagacaaaacgattaaaggggttgagaaaggactcctcgtccatggaaggctgccacagcttctctgccagctgcctcacgcagttctgcatcctcttcaagaggaccttcctcagcatcatgagggactcggtcctgacacacctgcgcatcacctcgcacattgggatcggcctcctcattggcctgctgtacttggggatcgggaacgaagccaagaaggtcttgagcaactccggcttcctcttcttctccatgctgttcctcatgttcgcggccctcatgcctactgttctgacatttcccctggagatgggagtctttcttcgggaacacctgaactactggtacagcctgaaggcctactacctggccaagaccatggcagacgtgccctttcagatcatgttcccagtggcctactgcagcatcgtgtactggatgacgtcgcagccgtccgacgccgtgcgctttgtgctgtttgccgcgctgggcaccatgacctccctggtggcacagtccctgggcctgctgatcggagccgcctccacgtccctgcaggtggccactttcgtgggcccagtgacagccatcccggtgctcctgttctcggggttcttcgtcagcttcgacaccatccccacgtacctacagtggatgtcctacatctcctatgtcaggtatgggttcgaaggggtcatcctctccatctatggcttagaccgggaagatctgcactgtgacatcgacgagacgtgccacttccagaagtcggaggccatcctgcgggagctggacgtggaaaatgccaagctgtacctggacttcatcgtactcgggattttcttcatctccctccgcctcattgcctattttgtcctcaggtacaaaatccgggcagagaggtaaaacacctgaatgccaggaaacaggaagattagacactgtggccgagggcacgtctagaatcgaggaggcaagcctgtgcccgaccgacgacacagagactcttctgatccaacccctagaaccgcgttgggtttgtgggtgtctcgtgctcagccactctgcccagctgggttggatcttctctccattcccctttctagctttaactaggaagatgtaggcagattggtggtttttttttttttaacatacagaattttaaataccacaactggggcagaatttaaagctgcaacacagctggtgatgagaggcttcctcagtccagtcgctccttagcaccaggcaccgtgggtcctggatggggaactgcaagcagcctctcagctgatggctgcacagtcagatgtctggtggcagagagtccgagcatggagcgattccattttatgactgttgtttttcacattttcatctttctaaggtgtgtctcttttccaatgagaagtcatttttgcaagccaaaagtcgatcaatcgcattcattttaagaaattatacctttttagtacttgctgaagaatgattcagggtaaatcacatactttgtttagagaggcgaggggtttaaccgagtcacccagctggtctcatacatagacagcacttgtgaaggattgaatgcaggttccaggtggagggaagacgtggacaccatctccactgagccatgcagacatttttaaaagctatacaaaaaattgtgagaagacattggccaactctttcaaagtctttctttttccacgtgcttcttattttaagcgaaatatattgtttgtttcttcctaa

SEQ ID NO: 150700 - DNA, 3475 bp, Artificial Sequence
  derived and/or modified sequence
ttctttccaagggtctctgggtgaggcccgtgaccttcccaagcctctccctgtcttgtgaaacctgggcgtgatatacctcccttttagggctgctgcgatcatttaggcagattaaacctcataagtggtttcccatacaagaaagatgctagcagtgcaacagacagaacacttacctgcctgccctcccgccaggaggtggtcttccaacttttgcccggagtctacagagggtgggccctctctgctggggctccgggacatggtcaggagaggttggtctgtctgtaccgccattctcttggccagactgtggtgtctggtccctactcacaccttcctgtcagagtatccagaggccgcagagtatccacaccctggctgggtgtactggctacagatggctgtggctccaggtcacctgcgtgcctgggtgatgagaaataatgtcacaacaaatatcccatctgcattctctgggacactgacccatgaagagaaagcagttctcacagtttttacaggcacagccacagccgtgcatgtacaggtggcagctttagcttctgctaaactggagagctcagtgtttgtgacagactgcgtgtcctgcaaaatcgaaaatgtctgtgattcagctcttcagggaaaaagggtgccgatgtctggcctacagggctcaagcattgtcatcatgcccccatccaaccgtccactcgccagtgcggcatcctgcacgtggtcagtccaagtccagggagggccccatcacctgggggtggtcgctatcagtggcaaagtcttgtcagcagctcatggggcaggaagggcctatggttgggggtttcctggcgatcccatggaggaaggatacaagaccctcctgaaaggaatttccgggaagttcaatagtggtgagttggtggccattatgggtccttccggggccgggaagtccacgctgatgaacatcctggctggatacagggagacgggcatgaagggggccgtcctcatcaacggcctgccccgggacctgcgctgcttccggaaggtgtcctgctacatcatgcaggatgacatgctgctgccgcatctcactgtgcaggaggccatgatggtgtcggcacatctgaagcttcaggagaaggatgaaggcagaagggaaatggtcaaggagatactgacagcgctgggcttgctgtcttgcgccaacacgcggaccgggagcctgtcaggtggtcagcgcaagcgcctggccatcgcgctggagctggtgaacaaccctccagtcatgttcttcgatgagcccaccagcggcctggacagcgcctcctgcttccaggtggtctcgctgatgaaagggctcgctcaagggggtcgctccatcatttgcaccatccaccagcccagcgccaaactcttcgagctgttcgaccagctttacgtcctgagtcaaggacaatgtgtgtaccggggaaaagtctgcaatcttgtgccatatttgagggatttgggtctgaactgcccaacctaccacaacccagcagattttgtcatggaggttgcatccggcgagtacggtgatcagaacagtcggctggtgagagcggttcgggagggcatgtgtgactcagaccacaagagagacctcgggggtgatgccgaggtgaacccttttctttggcaccggccctctgaagaggtaaagcagacaaaacgattaaaggggttgagaaaggactcctcgtccatggaaggctgccacagcttctctgccagctgcctcacgcagttctgcatcctcttcaagaggaccttcctcagcatcatgagggactcggtcctgacacacctgcgcatcacctcgcacattgggatcggcctcctcattggcctgctgtacttggggatcgggaacgaagccaagaaggtcttgagcaactccggcttcctcttcttctccatgctgttcctcatgttcgcggccctcatgcctactgttctgacatttcccctggagatgggagtctttcttcgggaacacctgaactactggtacagcctgaaggcctactacctggccaagaccatggcagacgtgccctttcagatcatgttcccagtggcctactgcagcatcgtgtactggatgacgtcgcagccgtccgacgccgtgcgctttgtgctgtttgccgcgctgggcaccatgacctccctggtggcacagtccctgggcctgctgatcggagccgcctccacgtccctgcaggtggccactttcgtgggcccagtgacagccatcccggtgctcctgttctcggggttcttcgtcagcttcgacaccatccccacgtacctacagtggatgtcctacatctcctatgtcaggtatgggttcgaaggggtcatcctctccatctatggcttagaccgggaagatctgcactgtgacatcgacgagacgtgccacttccagaagtcggaggccatcctgcgggagctggacgtggaaaatgccaagctgtacctggacttcatcgtactcgggattttcttcatctccctccgcctcattgcctattttgtcctcaggtacaaaatccgggcagagaggtaaaacacctgaatgccaggaaacaggaagattagacactgtggccgagggcacgtctagaatcgaggaggcaagcctgtgcccgaccgacgacacagagactcttctgatccaacccctagaaccgcgttgggtttgtgggtgtctcgtgctcagccactctgcccagctgggttggatcttctctccattcccctttctagctttaactaggaagatgtaggcagattggtggtttttttttttttaacatacagaattttaaataccacaactggggcagaatttaaagctgcaacacagctggtgatgagaggcttcctcagtccagtcgctccttagcaccaggcaccgtgggtcctggatggggaactgcaagcagcctctcagctgatggctgcacagtcagatgtctggtggcagagagtccgagcatggagcgattccattttatgactgttgtttttcacattttcatctttctaaggtgtgtctcttttccaatgagaagtcatttttgcaagccaaaagtcgatcaatcgcattcattttaagaaattatacctttttagtacttgctgaagaatgattcagggtaaatcacatactttgtttagagaggcgaggggtttaaccgagtcacccagctggtctcatacatagacagcacttgtgaaggattgaatgcaggttccaggtggagggaagacgtggacaccatctccactgagccatgcagacatttttaaaagctatacaaaaaattgtgagaagacattggccaactctttcaaagtctttctttttccacgtgcttcttattttaagcgaaatatattgtttgtttcttcctaa

SEQ ID NO: 150701 - DNA, 2361 bp, Artificial Sequence
  derived and/or modified sequence
atggtgagaagaggctggagcgtgtgcaccgccatcctgctggccagactgtggtgcctggtgcccacccacaccttcctgagcgagtaccccgaggccgccgagtacccccaccccggctgggtgtactggctgcagatggccgtggcccccggccacctgagagcctgggtgatgagaaacaacgtgaccaccaacatccccagcgccttcagcggcaccctgacccacgaggagaaggccgtgctgaccgtgttcaccggcaccgccaccgccgtgcacgtgcaggtggccgccctggccagcgccaagctggagagcagcgtgttcgtgaccgactgcgtgagctgcaagatcgagaacgtgtgcgacagcgccctgcagggcaagagagtgcccatgagcggcctgcagggcagcagcatcgtgatcatgccccccagcaacagacccctgaaggccagcgccgccagctgcacctggagcgtgcaggtgcagggcggcccccaccacctgggcgtggtggccatcagcggcaaggtgctgagcgccgcccacggcgccggcagagcctacggctggggcttccccggcgaccccatggaggagggctacaagaccctgctgaagggcatcagcggcaagttcaacagcggcgagctggtggccatcatgggccccagcggcgccggcaagagcaccctgatgaacatcctggccggctacagagagaccggcatgaagggcgccgtgctgatcaacggcctgcccagagacctgagatgcttcagaaaggtgagctgctacatcatgcaggacgacatgctgctgccccacctgaccgtgcaggaggccatgatggtgagcgcccacctgaagctgcaggagaaggacgagggcagaagagagatggtgaaggagatcctgaccgccctgggcctgctgagctgcgccaacaccagaaccggcagcctgagcggcggccagagaaagagactggccatcgccctggagctggtgaacaacccccccgtgatgttcttcgacgagcccaccagcggcctggacagcgccagctgcttccaggtggtgagcctgatgaagggcctggcccagggcggcagaagcatcatctgcaccatccaccagcccagcgccaagctgttcgagctgttcgaccagctgtacgtgctgagccagggccagtgcgtgtacagaggcaaggtgtgcaacctggtgccctacctgagagacctgggcctgaactgccccacctaccacaaccccgccgacttcgtgatggaggtggccagcggcgagtacggcgaccagaacagcagactggtgagagccgtgagagagggcatgtgcgacagcgaccacaagagagacctgggcggcgacgccgaggtgaaccccttcctgtggcacagacccagcgaggaggtgaagcagaccaagagactgaagggcctgagaaaggacagcagcagcatggagggctgccacagcttcagcgccagctgcctgacccagttctgcatcctgttcaagagaaccttcctgagcatcatgagagacagcgtgctgacccacctgagaatcaccagccacatcggcatcggcctgctgatcggcctgctgtacctgggcatcggcaacgaggccaagaaggtgctgagcaacagcggcttcctgttcttcagcatgctgttcctgatgttcgccgccctgatgcccaccgtgctgaccttccccctggagatgggcgtgttcctgagagagcacctgaactactggtacagcctgaaggcctactacctggccaagaccatggccgacgtgcccttccagatcatgttccccgtggcctactgcagcatcgtgtactggatgaccagccagcccagcgacgccgtgagattcgtgctgttcgccgccctgggcaccatgaccagcctggtggcccagagcctgggcctgctgatcggcgccgccagcaccagcctgcaggtggccaccttcgtgggccccgtgaccgccatccccgtgctgctgttcagcggcttcttcgtgagcttcgacaccatccccacctacctgcagtggatgagctacatcagctacgtgagatacggcttcgagggcgtgatcctgagcatctacggcctggacagagaggacctgcactgcgacatcgacgagacctgccacttccagaagagcgaggccatcctgagagagctggacgtggagaacgccaagctgtacctggacttcatcgtgctgggcatcttcttcatcagcctgagactgatcgcctacttcgtgctgagatacaagatcagagccgagagatag

SEQ ID NO: 150702 - DNA, 2037 bp, Artificial Sequence
  derived and/or modified sequence
atggcctgcctgatggccgccttcagcgtgggcaccgccatgaacgccagcagctacagcgccgagatgaccgagcccaagagcgtgtgcgtgagcgtggacgaggtggtgagcagcaacatggaggccaccgagaccgacctgctgaacggccacctgaagaaggtggacaacaacctgaccgaggcccagagattcagcagcctgcccagaagagccgccgtgaacatcgagttcagagacctgagctacagcgtgcccgagggcccctggtggagaaagaagggctacaagaccctgctgaagggcatcagcggcaagttcaacagcggcgagctggtggccatcatgggccccagcggcgccggcaagagcaccctgatgaacatcctggccggctacagagagaccggcatgaagggcgccgtgctgatcaacggcctgcccagagacctgagatgcttcagaaaggtgagctgctacatcatgcaggacgacatgctgctgccccacctgaccgtgcaggaggccatgatggtgagcgcccacctgaagctgcaggagaaggacgagggcagaagagagatggtgaaggagatcctgaccgccctgggcctgctgagctgcgccaacaccagaaccggcagcctgagcggcggccagagaaagagactggccatcgccctggagctggtgaacaacccccccgtgatgttcttcgacgagcccaccagcggcctggacagcgccagctgcttccaggtggtgagcctgatgaagggcctggcccagggcggcagaagcatcatctgcaccatccaccagcccagcgccaagctgttcgagctgttcgaccagctgtacgtgctgagccagggccagtgcgtgtacagaggcaaggtgtgcaacctggtgccctacctgagagacctgggcctgaactgccccacctaccacaaccccgccgacttcgtgatggaggtggccagcggcgagtacggcgaccagaacagcagactggtgagagccgtgagagagggcatgtgcgacagcgaccacaagagagacctgggcggcgacgccgaggtgaaccccttcctgtggcacagacccagcgaggaggtgaagcagaccaagagactgaagggcctgagaaaggacagcagcagcatggagggctgccacagcttcagcgccagctgcctgacccagttctgcatcctgttcaagagaaccttcctgagcatcatgagagacagcgtgctgacccacctgagaatcaccagccacatcggcatcggcctgctgatcggcctgctgtacctgggcatcggcaacgaggccaagaaggtgctgagcaacagcggcttcctgttcttcagcatgctgttcctgatgttcgccgccctgatgcccaccgtgctgaccttccccctggagatgggcgtgttcctgagagagcacctgaactactggtacagcctgaaggcctactacctggccaagaccatggccgacgtgcccttccagatcatgttccccgtggcctactgcagcatcgtgtactggatgaccagccagcccagcgacgccgtgagattcgtgctgttcgccgccctgggcaccatgaccagcctggtggcccagagcctgggcctgctgatcggcgccgccagcaccagcctgcaggtggccaccttcgtgggccccgtgaccgccatccccgtgctgctgttcagcggcttcttcgtgagcttcgacaccatccccacctacctgcagtggatgagctacatcagctacgtgagatacggcttcgagggcgtgatcctgagcatctacggcctggacagagaggacctgcactgcgacatcgacgagacctgccacttccagaagagcgaggccatcctgagagagctggacgtggagaacgccaagctgtacctggacttcatcgtgctgggcatcttcttcatcagcctgagactgatcgcctacttcgtgctgagatacaagatcagagccgagagatag

SEQ ID NO: 150703 - DNA, 2475 bp, Artificial Sequence
  derived and/or modified sequence
atgctggccgtgcagcagaccgagcacctgcccgcctgcccccccgccagaagatggagcagcaacttctgccccgagagcaccgagggcggccccagcctgctgggcctgagagacatggtgagaagaggctggagcgtgtgcaccgccatcctgctggccagactgtggtgcctggtgcccacccacaccttcctgagcgagtaccccgaggccgccgagtacccccaccccggctgggtgtactggctgcagatggccgtggcccccggccacctgagagcctgggtgatgagaaacaacgtgaccaccaacatccccagcgccttcagcggcaccctgacccacgaggagaaggccgtgctgaccgtgttcaccggcaccgccaccgccgtgcacgtgcaggtggccgccctggccagcgccaagctggagagcagcgtgttcgtgaccgactgcgtgagctgcaagatcgagaacgtgtgcgacagcgccctgcagggcaagagagtgcccatgagcggcctgcagggcagcagcatcgtgatcatgccccccagcaacagacccctggccagcgccgccagctgcacctggagcgtgcaggtgcagggcggcccccaccacctgggcgtggtggccatcagcggcaaggtgctgagcgccgcccacggcgccggcagagcctacggctggggcttccccggcgaccccatggaggagggctacaagaccctgctgaagggcatcagcggcaagttcaacagcggcgagctggtggccatcatgggccccagcggcgccggcaagagcaccctgatgaacatcctggccggctacagagagaccggcatgaagggcgccgtgctgatcaacggcctgcccagagacctgagatgcttcagaaaggtgagctgctacatcatgcaggacgacatgctgctgccccacctgaccgtgcaggaggccatgatggtgagcgcccacctgaagctgcaggagaaggacgagggcagaagagagatggtgaaggagatcctgaccgccctgggcctgctgagctgcgccaacaccagaaccggcagcctgagcggcggccagagaaagagactggccatcgccctggagctggtgaacaacccccccgtgatgttcttcgacgagcccaccagcggcctggacagcgccagctgcttccaggtggtgagcctgatgaagggcctggcccagggcggcagaagcatcatctgcaccatccaccagcccagcgccaagctgttcgagctgttcgaccagctgtacgtgctgagccagggccagtgcgtgtacagaggcaaggtgtgcaacctggtgccctacctgagagacctgggcctgaactgccccacctaccacaaccccgccgacttcgtgatggaggtggccagcggcgagtacggcgaccagaacagcagactggtgagagccgtgagagagggcatgtgcgacagcgaccacaagagagacctgggcggcgacgccgaggtgaaccccttcctgtggcacagacccagcgaggaggtgaagcagaccaagagactgaagggcctgagaaaggacagcagcagcatggagggctgccacagcttcagcgccagctgcctgacccagttctgcatcctgttcaagagaaccttcctgagcatcatgagagacagcgtgctgacccacctgagaatcaccagccacatcggcatcggcctgctgatcggcctgctgtacctgggcatcggcaacgaggccaagaaggtgctgagcaacagcggcttcctgttcttcagcatgctgttcctgatgttcgccgccctgatgcccaccgtgctgaccttccccctggagatgggcgtgttcctgagagagcacctgaactactggtacagcctgaaggcctactacctggccaagaccatggccgacgtgcccttccagatcatgttccccgtggcctactgcagcatcgtgtactggatgaccagccagcccagcgacgccgtgagattcgtgctgttcgccgccctgggcaccatgaccagcctggtggcccagagcctgggcctgctgatcggcgccgccagcaccagcctgcaggtggccaccttcgtgggccccgtgaccgccatccccgtgctgctgttcagcggcttcttcgtgagcttcgacaccatccccacctacctgcagtggatgagctacatcagctacgtgagatacggcttcgagggcgtgatcctgagcatctacggcctggacagagaggacctgcactgcgacatcgacgagacctgccacttccagaagagcgaggccatcctgagagagctggacgtggagaacgccaagctgtacctggacttcatcgtgctgggcatcttcttcatcagcctgagactgatcgcctacttcgtgctgagatacaagatcagagccgagagatag

SEQ ID NO: 150704 - protein, 254 aa, Artificial Sequence
  derived and/or modified sequence
MATAGNPWGWFLGYLILGVAGSLVSGSCSQIINGEDCSPHSQPWQAALVMENELFCSGVLVHPQWVLSAAHCFQNSYTIGLGLHSLEADQEPGSQMVEASLSVRHPEYNRPLLANDLMLIKLDESVSESDTIRSISIASQCPTAGNSCLVSGWGLLANGRMPTVLQCVNVSVVSEEVCSKLYDPLYHPSMFCAGGGHDQKDSCNGDSGGPLICNGYLQGLVSFGKAPCGQVGVPGVYTNLCKFTEWIEKTVQAS

SEQ ID NO: 150705 - DNA, 765 bp, Artificial Sequence
  derived and/or modified sequence
atggccacagcggggaatccatggggatggttcctgggatacctgatcctgggggtggcagggagcctcgtctctggtagttgtagccagattataaatggggaagactgctccccccactctcagccctggcaggccgcgttggtcatggagaacgaactgttttgttctggtgtattggtgcatcctcagtgggtgttgagcgcagcccactgctttcagaatagctacaccataggtctcggactccactctctggaagcagatcaggaacctggatctcagatggtcgaggctagcttgtcagtccggcatcccgagtacaatagacccctgctggcgaatgacctgatgctgattaagctggatgaatctgtgagcgaatctgacacaattagaagtattagtatcgcaagccagtgccccactgctggaaactcctgcctcgttagcggatggggccttctggctaatgggcgcatgccgactgttctacagtgtgtaaatgtcagtgttgtgtccgaggaagtctgcagcaaattgtacgacccactctaccacccttctatgttctgtgccggtggtgggcacgaccagaaggattcctgtaacggcgattccggggggccgctgatttgtaacgggtatctccaggggcttgtctcttttggtaaggctccttgcggccaggtcggtgtgcccggcgtatacaccaacctttgtaaattcactgagtggatcgaaaaaaccgttcaggcatcctag

SEQ ID NO: 150706 - DNA, 1347 bp, Artificial Sequence
  derived and/or modified sequence
atggccacagcaggaaatccctggggctggttcctggggtacctcatccttggtgtcgcaggatcgctcgtctctggtagctgcagccaaatcataaacggcgaggactgcagcccgcactcgcagccctggcaggcggcactggtcatggaaaacgaattgttctgctcgggcgtcctggtgcatccgcagtgggtgctgtcagccgcacactgtttccagaactcctacaccatcgggctgggcctgcacagtcttgaggccgaccaagagccagggagccagatggtggaggccagcctctccgtacggcacccagagtacaacagacccttgctcgctaacgacctcatgctcatcaagttggacgaatccgtgtccgagtctgacaccatccggagcatcagcattgcttcgcagtgccctaccgcggggaactcttgcctcgtttctggctggggtctgctggcgaacggcagaatgcctaccgtgctgcagtgcgtgaacgtgtcggtggtgtctgaggaggtctgcagtaagctctatgacccgctgtaccaccccagcatgttctgcgccggcggagggcacgaccagaaggactcctgcaacggtgactctggggggcccctgatctgcaacgggtacttgcagggccttgtgtctttcggaaaagccccgtgtggccaagttggcgtgccaggtgtctacaccaacctctgcaaattcactgagtggatagagaaaaccgtccaggccagttaactctggggactgggaacccatgaaattgacccccaaatacatcctgcggaaggaattcaggaatatctgttcccagcccctcctccctcaggcccaggagtccaggcccccagcccctcctccctcaaaccaagggtacagatccccagcccctcctccctcagacccaggagtccagaccccccagcccctcctccctcagacccaggagtccagcccctcctccctcagacccaggagtccagaccccccagcccctcctccctcagacccaggagtccagcccctcctccctcagacccaggagtccagaccccccagcccctcctccctcagacccaggggtccaggcccccaacccctcctccctcagactcagaggtccaggcccccaacccctccttccccagacccagaggtccaggtcccagcccctcctccctcagacccagcggtccaatgccacctagactctccctgtacacagtgcccccttgtggcacgttgacccaaccttaccagttggtttttcattttttgtccctttcccctagatccagaaataaagtctaagagaagcgc

SEQ ID NO: 150707 - DNA, 765 bp, Artificial Sequence
  derived and/or modified sequence
atggccacagctggcaacccctggggctggttcctgggctacctgatcctgggcgtggccggcagcctggtgtctggcagctgcagccagatcatcaatggagaggactgcagcccccacagccagccctggcaggccgccctggtgatggagaatgagctgttctgcagcggcgtgctggtgcacccccagtgggtgctgtctgctgcccactgcttccagaacagctacaccatcggcctgggcctgcacagcctggaggccgaccaggagcccggcagccagatggtggaggccagcctgtctgtgcgccaccctgagtacaaccggcccctgctggccaatgacctgatgctgatcaagctggatgaatctgtgtctgagagtgacaccatccgcagcatcagcatcgccagccagtgccccacagctggcaacagctgcctggtgtctggctggggcctgctggccaacggccgcatgcccaccgtgctgcagtgtgtgaatgtgtctgtggtgtctgaggaggtgtgcagcaagctgtatgaccccctgtaccaccccagcatgttctgtgccggcggcggccatgaccagaaggacagctgcaatggagacagcggcggccccctcatctgcaatggctacctgcagggcctggtgtcctttgggaaggccccctgtggccaggtgggcgtgcctggggtgtacaccaacctgtgcaagttcacagagtggattgagaagacagtgcaggccagctag

SEQ ID NO: 150708 - DNA, 765 bp, Artificial Sequence
  derived and/or modified sequence
atggccaccgccggcaacccctggggctggttcctgggctacctgattctgggcgtagccgggagtcttgtctcgggctcatgcagtcagataattaacggggaggattgtagcccccatagccaaccttggcaagcggccctagttatggaaaacgagcttttttgcagtggagtgctggttcacccccagtgggtgctgtctgcagcccattgtttccagaacagttacactatcgggctagggttgcactcactagaggcagaccaggaaccagggtcacagatggttgaggcaagtctgtcagtgagacatcctgagtataacagacccctcttggccaatgacctgatgctgatcaaactcgacgaatctgtgtccgagtccgacaccattagatctatcagcattgcttcacagtgtcccaccgcgggcaatagttgcctggtctcaggttggggactcctggcaaatggacgcatgccaacagtgcttcagtgcgttaacgtgagtgtggtgagtgaagaagtctgctctaaactgtatgatcccctttaccatccttcaatgttttgcgctggtggaggccacgaccagaaggactcgtgcaacggagatagcggaggacccctgatttgcaatggttaccttcagggcctggtctcttttggcaaggcaccatgtggccaggtcggggtgcccggtgtgtataccaatctttgcaagttcactgagtggatagagaaaaccgtgcaggcctcttag

SEQ ID NO: 150709 - DNA, 765 bp, Artificial Sequence
  derived and/or modified sequence
atggctaccgccggaaacccatggggctggtttttgggatatctaatcctgggagtcgctggctctctggtctccggaagctgttcccagatcatcaatggggaggactgcagccctcactctcagccctggcaggccgctctagtgatggagaacgaattgttctgttcaggcgtgctcgttcaccctcagtgggtcctatctgccgctcactgttttcagaactcttacacaatcggtttaggacttcattcacttgaggctgatcaggaaccaggttctcagatggtggaagccagcttgtcagtgcgccacccagagtacaataggcctcttctagcgaatgacctgatgctgataaaattggatgaaagtgtttccgagtccgacaccattaggagtatttccattgctagtcaatgtcccaccgcgggaaactcttgcttggtctctggctggggcctcttggccaacggcagaatgcctactgtcttgcaatgcgtcaatgttagtgtggtctcagaggaggtctgtagcaagctatacgatccactttaccaccctagcatgttttgtgccggaggtggacatgatcagaaggattcctgcaatggagactctggtggtccgctgatctgtaatggatacctccaggggctggtgagcttcggcaaagcaccctgcggccaggtgggggtgcccggtgtttacactaatctgtgtaagttcactgagtggatcgagaagaccgttcaggccagttag

SEQ ID NO: 150710 - DNA, 765 bp, Artificial Sequence
  derived and/or modified sequence
atggccaccgccggcaacccctggggctggttcctgggctacctgatcctgggcgtggccggcagcctggtgagcggcagctgcagccagatcatcaacggcgaggactgcagcccccacagccagccctggcaggccgccctggtgatggagaacgagctgttctgcagcggcgtgctggtgcacccccagtgggtgctgagcgccgcccactgcttccagaacagctacaccatcggcctgggcctgcacagcctggaggccgaccaggagcccggcagccagatggtggaggccagcctgagcgtgagacaccccgagtacaacagacccctgctggccaacgacctgatgctgatcaagctggacgagagcgtgagcgagagcgacaccatcagaagcatcagcatcgccagccagtgccccaccgccggcaacagctgcctggtgagcggctggggcctgctggccaacggcagaatgcccaccgtgctgcagtgcgtgaacgtgagcgtggtgagcgaggaggtgtgcagcaagctgtacgaccccctgtaccaccccagcatgttctgcgccggcggcggccacgaccagaaggacagctgcaacggcgacagcggcggccccctgatctgcaacggctacctgcagggcctggtgagcttcggcaaggccccctgcggccaggtgggcgtgcccggcgtgtacaccaacctgtgcaagttcaccgagtggatcgagaagaccgtgcaggccagctag

SEQ ID NO: 150711 - protein, 128 aa, Artificial Sequence
  derived and/or modified sequence
MASEASVRLGVPPGRLWIQRPGIYEDEEGRTWVTVVVRFNPSRREWARASQGSRYEPSITVHLWQMAVHTRELLSSGQMPFSQLPAVWQLYPGRKYRAADSSFWEIADHGQIDSMEQLVLTYQPERKD

SEQ ID NO: 150712 - DNA, 387 bp, Artificial Sequence
  derived and/or modified sequence
atggccagcgaggccagcgtgagactgggcgtgccccccggcagactgtggatccagagacccggcatctacgaggacgaggagggcagaacctgggtgaccgtggtggtgagattcaaccccagcagaagagagtgggccagagccagccagggcagcagatacgagcccagcatcaccgtgcacctgtggcagatggccgtgcacaccagagagctgctgagcagcggccagatgcccttcagccagctgcccgccgtgtggcagctgtaccccggcagaaagtacagagccgccgacagcagcttctgggagatcgccgaccacggccagatcgacagcatggagcagctggtgctgacctaccagcccgagagaaaggactag

SEQ ID NO: 150713 - DNA, 387 bp, Artificial Sequence
  derived and/or modified sequence
atggcctccgaggcttctgttcggctgggggtgccccccgggcgcctatggatccaacgccccgggatctacgaggacgaagagggtagaacgtgggtcacagtggtggtacgattcaatccttcgcgccgtgagtgggcacgcgcctcacagggttccaggtatgagcccagcatcactgtccacctgtggcagatggccgttcatacgagggagctcctatcctctggacagatgccattttcccagctgcccgctgtctggcagttgtaccccgggagaaaatacagggccgcagatagctccttttgggaaatcgcagaccatggccagatcgattcaatggaacagctggtgctcacttaccaacccgaacggaaggactag

SEQ ID NO: 150714 - DNA, 387 bp, Artificial Sequence
  derived and/or modified sequence
atggctagtgaggcctcagtgcgcctcggagtcccaccaggcaggttgtggatccagcggcccgggatctacgaagacgaggaaggcagaacatgggtcacagtggtggttcgattcaacccctctagacgggaatgggccagagcatcacaaggaagtcgatacgagcctagtatcacagtccacctctggcagatggcagtccacacgcgcgagctgctatcttccggccagatgcccttttcccagctccctgctgtgtggcagctgtatccgggtcgtaagtatagagccgcggactcttcattttgggaaatcgcggaccacggccagatagacagcatggagcagctggttttgacttaccagccagaacggaaggattag

SEQ ID NO: 150715 - DNA, 387 bp, Artificial Sequence
  derived and/or modified sequence
atggccagcgaggcctctgtgcggctgggcgtgcccccaggccgcctgtggatccagaggcctggcatctatgaagatgaggagggccgcacctgggtgacagtggtggtgcgcttcaaccccagcagaagagagtgggcccgggccagccagggcagccgctatgagcccagcatcaccgtgcacctgtggcagatggctgtgcacacccgggagctgctgagcagcggccagatgcccttcagccagctgcctgctgtgtggcagctgtacccaggcaggaagtacagagctgctgacagcagcttctgggagattgctgaccacggccagattgacagcatggagcagctggtgctgacctaccagcctgagaggaaggactag

SEQ ID NO: 150716 - DNA, 387 bp, Artificial Sequence
  derived and/or modified sequence
atggccagcgaggccagcgtgcggctgggcgtgccccccggccggctgtggattcaacggcccggcatttacgaggatgaagaaggacgcacgtgggtaaccgtggttgtaagatttaacccttcacgacgggaatgggcacgagcctctcagggaagccgatatgagccgagcattacagtgcacttatggcagatggctgtgcacacccgggaactattgtcatccggacagatgcccttctcacagctgccagcagtctggcagctgtacccgggcaggaagtaccgggctgcggattcttcattctgggaaatcgctgaccatggccaaattgacagcatggagcagctggttctgacgtatcagcctgaacgtaaagattag

SEQ ID NO: 150717 - DNA, 387 bp, Artificial Sequence
  derived and/or modified sequence
atggccagcgaggccagcgtgcggctgggcgtgccccccggccggctgtggattcagaggcccgggatatacgaggacgaagaaggaaggacttgggtgacagtcgtggtgcggttcaaccccagtcgtcgagagtgggccagagcttcccaggggagtcgatacgagcctagcattaccgtgcacttatggcagatggcggtgcacacacgggaattactgtccagtggtcaaatgcctttcagccagctgcccgctgtgtggcaactctacccgggaaggaagtatagggccgccgattcatcattttgggaaatcgccgaccacgggcagatcgattccatggaacagctggtgttgacgtaccaacctgaaagaaaagactag

SEQ ID NO: 150718 - DNA, 387 bp, Artificial Sequence
  derived and/or modified sequence
atggcatctgaggcctccgtgcgcctcggagtgcctccagggaggctctggatccaaagacccggaatttacgaggatgaggaggggaggacttgggtcactgtagtagtcagattcaacccctctcggcgagaatgggcaagggcatcacaaggctcacgttacgagccctcaatcacagtacacctgtggcagatggcagtgcatactagggaactcctctcttcgggacaaatgccgttcagtcaactgcctgctgtttggcagttgtaccccggtaggaagtatcgagccgctgattcctcattctgggaaatcgcagaccacggacagatcgactctatggaacagctcgtactgacctaccaacctgaaagaaaagactag

SEQ ID NO: 150719 - DNA, 387 bp, Artificial Sequence
  derived and/or modified sequence
atggcctcagaggcgtccgtgagactgggagtccccccaggtcgactctggatccagcggccaggtatctacgaagacgaagagggcaggacctgggtgactgtcgtggtccgattcaaccctagcagacgcgagtgggctagggcttctcagggatctcgctacgaaccaagtattaccgtccacctttggcagatggctgtgcatacccgcgagctgttatcatcaggtcagatgcccttttcccaactcccagcagtttggcagttgtatcccggtagaaaataccgtgctgcggatagcagcttttgggaaatagccgaccacgggcagattgactctatggaacagctggtgctgacctatcagcccgaaaggaaagattag

SEQ ID NO: 150720 - DNA, 1151 bp, Artificial Sequence
  derived and/or modified sequence
tggaaagctacacgtgtgagcctagaggcgggtcccggttgcagacttgccatggcctccgaagcttctgtgcgtctaggggtgccccctggccgtctgtggatccagaggcctggcatctacgaagatgaggaggggagaacctgggtgactgtggtcgtgcggttcaatccctcgcgtagggaatgggccagggcctcccagggcagcagatatgaacccagcatcacagtgcacttgtggcagatggcagtgcatacccgggagctactctcctccggccagatgcccttctcccagctgcccgccgtgtggcagctctaccccgggaggaagtaccgagcagcggattccagtttctgggaaatagcagaccatggccagattgactctatggagcagctggtcctaacatatcagccggagaggaaagactgacactgggagtggctggccctgctggccctgcctcttctggcctggtgtctcctcatgccccctcagtgaggatcttcatgtacctgctcttctgtttgcacacccagcatagcctccttgcaggcagaaggcagtagggcccctgcacactcagtttctctcgttttccttagttatcagtcctgtcctgtcccactcaggtctgtacttagggcagctggcctggatgggcttcactggggccctgtctgtgtgctgagccagtttcccctgctggctgcaagctgtgggttctttctcctctgtgcccctcatgctgatcttctagatgccactcccaaatccccttcatacccaccaggatgtgtgcccagccaggcctccagcacccccagtgcagctcgtgattggaaactcaccatcggcaggcagtggttcggtttaagagatggcattagagggagcccagtctggatgtggacttggatgccctgtgggtatcagttctgctgacactttggcccgaaatagatccagtgctgagcaagcaatgtacaccagagcctcagtgagcccatctgcacagtggggagcatggagggatgggtttggcctgtgcttctgcttattcagtccttcagctcacggaagggatgctagtccgtgaaggtgacctcacagtactggttaattaaactttattgctcactgtc

SEQ ID NO: 150721 - DNA, 1738 bp, Artificial Sequence
  derived and/or modified sequence
acacgtgtgagcctagaggcgggtcccggttgcagacttgccatggcctccgaagcttctgtgcgtctaggggtgccccctggccgtctgtggatccagaggcctggcatctacgaagatgaggaggggagaacctgggtgactgtggtcgtgcggttcaatccctcgcgtagggaatgggccagggcctcccagggcagcagatatgaacccagcatcacagtgcacttgtggcagatggcagtgcatacccgggagctactctcctccggccagatgcccttctcccagctgcccgccgtgtggcagctctaccccgggaggaagtaccgagcagcggattccagtttctgggaaatagcagaccatggccagattgactctatggagcagctggtcctaacatatcagccggagaggaaagactgacactgggagtggctggtatgttggggccctgtgcgtctcagtgtagggatcagacgaaagtgagaagacctctcctcttttcagaaagacggcgtggcctcctcctccctgctgtttgctgagatttttcttacatagccacctgtcacctctgttccccagccccttggatgtgatggtacacagtgggtgggcccccataataagttcctaaagcatgggatctcatcgaataagactcatcatttaatccttgtgagaattttgtgaggtgtacgtgttaatgtcccatttcacgacgaaaagacaagactctggggatgggaatgacttcctcgagaccatacagccaggaaatagcggtgaatctagtgatctcgggtccctagatttaaccatggcactgaggtgccgtgtgacggtggccttggaggacccagcactgacccatagagggctcctctcagatgggcagcagcttggagcaggccaggcagggcctgggccattggaggggctggcactggacttgcctttgaccccagcagcttggatggggtgccgggctcccccatagttcactgactgtctcctttggtcttctcgcaggccctgctggccctgcctcttctggcctggtgtctcctcatgccccctcagtgaggatcttcatgtacctgctcttctgtttgcacacccagcatagcctccttgcaggcagaaggcagtagggcccctgcacactcagtttctctcgttttccttagttatcagtcctgtcctgtcccactcaggtctgtacttagggcagctggcctggatgggcttcactggggccctgtctgtgtgctgagccagtttcccctgctggctgcaagctgtgggttctttctcctctgtgcccctcatgctgatcttctagatgccactcccaaatccccttcatacccaccaggatgtgtgcccagccaggcctccagcacccccagtgcagctcgtgattggaaactcaccatcggcaggcagtggttcggtttaagagatggcattagagggagcccagtctggatgtggacttggatgccctgtgggtatcagttctgctgacactttggcccgaaatagatccagtgctgagcaagcaatgtacaccagagcctcagtgagcccatctgcacagtggggagcatggagggatgggtttggcctgtgcttctgcttattcagtccttcagctcacggaagggatgctagtccgtgaaggtgacctcacagtactggttaattaaactttattgctcactgtcca

SEQ ID NO: 150722 - protein, 508 aa, Artificial Sequence
  derived and/or modified sequence
MEEGPLPGGLPSPEDAMVTELLSPEGPFASENIGLKAPVKYEEDEFHVFKEAYLGPADPKEPVLHAFNPALGADCKGQVKAKLAGGDSDGGELLGEYPGIPELSALEDVALLQAPQPPACNVHFLSSLLPAHRSPAVLPLGAWVLEGASHPGVRMIPVEIKEAGGTTTSNNPEEATLQNLLAQESCCKFPSSQELEDASCCSLKKDSNPMVICQLKGGTQMLCIDNSRTRELKALHLVPQYQDQNNYLQSDVPKPMTALVGRFLPASTKLNLITQQLEGALPSVVNGSAFPSGSTLPGPPKITLAGYCDCFASGDFCNNCNCNNCCNNLHHDIERFKAIKACLGRNPEAFQPKIGKGQLGNVKPQHNKGCNCRRSGCLKNYCECYEAQIMCSSICKCIGCKNYEESPERKTLMSMPNYMQTGGLEGSHYLPPTKFSGLPRFSHDRRPSSCISWEVVEATCACLLAQGEEAEKEHCSKCLAEQMILEEFGRCLSQILHTEFKSKGLKME

SEQ ID NO: 150723 - DNA, 1527 bp, Artificial Sequence
  derived and/or modified sequence
atggaggaaggccccctccctggggggctaccgtcacccgaggacgctatggtgaccgagctgctgagtcctgaagggccatttgcctccgagaacattgggctgaaagctcctgtcaaatatgaggaagacgagttccatgtgtttaaagaagcctacttgggcccagccgaccctaaagagccagtgctacacgcatttaatccggctctgggtgcggattgtaagggtcaagttaaggcaaaactggccggcggagactccgatgggggggaactcctcggcgagtaccctggaatccctgagttatcagccctggaagatgttgccttgcttcaggcgccgcaacctcctgcctgtaacgttcactttctgagctcattgctccccgctcacagaagtcccgccgtgctacccttaggggcttgggtcctcgaaggcgccagccacccgggcgtacgcatgatccccgtggagataaaggaagcagggggtaccacaacctcaaacaacccagaggaagcaaccttacaaaatctcctagctcaggaaagctgctgcaagtttcccagcagccaggagctggaagatgccagctgctgctctctgaaaaaagatagcaatcctatggtcatttgccagctaaaggggggtactcagatgctgtgcattgataattccaggactcgagagttgaaggctctccacctcgtgcctcaatatcaggaccagaataattatctgcaaagtgatgtccccaaacctatgacagccttggtgggcagatttttgccagccagcacaaaactgaacctcataacccagcagctggagggagccctaccatctgtcgtgaatggcagtgcatttccctccgggtcaacccttcctggacctcccaagatcactctggccggctactgtgactgcttcgccagtggagatttctgtaataactgcaactgcaacaactgttgcaataatctacaccacgacatcgagaggtttaaagccattaaggcttgtctcgggaggaacccggaagcctttcagcccaagatcggtaagggacagttgggcaatgttaagccccagcataataagggatgtaactgtcgtaggagtggttgtttgaagaactactgtgaatgttatgaggcccagatcatgtgcagctccatctgcaagtgcatcggttgtaagaactacgaggagtctccagaacgaaaaacactgatgtcgatgccaaactatatgcagacgggaggcctcgaaggctcccactatctgccccctaccaaattttctggccttcccaggttcagccatgaccgtcggcctagcagttgtataagctgggaagtggtcgaagcaacctgcgcctgtctcctcgcccagggcgaagaggctgagaaggagcattgctctaagtgtttggctgagcagatgatcctggaagagtttgggcgctgtctgtcccagattcttcacaccgagttcaagagtaagggcttgaaaatggagtag

SEQ ID NO: 150724 - DNA, 1527 bp, Artificial Sequence
  derived and/or modified sequence
atggaggagggccccctgcccggcggcctgcccagcccagaagatgccatggtgacagagctgctgagccctgagggcccctttgcctctgaaaatattggcctgaaggcccctgtgaagtatgaagaagatgagttccacgtgttcaaggaggcctacctgggccctgctgaccccaaggagcctgtgctgcacgccttcaacccagccctgggcgctgactgcaagggccaggtgaaggccaagctggccggcggggacagtgatggaggagagctgctgggggagtacccaggcatccctgagctgagcgccctggaggatgtggccctgctgcaggccccccagcccccagcctgcaatgtgcacttcctgagcagcctgctgcctgcccacaggagccctgctgtgctgcccctgggcgcctgggtgctggagggcgccagccaccctggggtgaggatgatccctgtggagatcaaggaggccggcggcaccaccaccagcaacaaccctgaggaggccaccctgcagaacctgctggcccaggagagctgctgcaagttccccagcagccaggagctggaggatgccagctgctgcagcctgaagaaggacagcaaccccatggtgatctgccagctgaagggcggcacccagatgctgtgcatcgacaacagcaggacccgggagctgaaggccctgcacctggtgccccagtaccaggaccagaacaactacctgcagagtgatgtgcccaagcccatgacagccctggtgggccgcttcctgcctgccagcaccaagctgaacctgatcacccagcagctggagggcgccctgcccagcgtggtgaatggcagcgccttccccagcggcagcaccctgcccggcccccccaagatcaccctggccggctactgtgactgctttgccagcggggacttctgcaacaactgcaactgcaacaactgctgcaacaacctgcaccacgacatcgagcgcttcaaggccatcaaggcctgcctgggcagaaatcctgaggccttccagcccaagattggcaagggccagctgggcaatgtgaagccccagcacaacaagggctgcaactgcagaagaagtggctgcctgaagaactactgtgaatgttatgaggcccagatcatgtgcagcagcatctgcaagtgcatcggctgcaagaactatgaggagagccctgagaggaagaccctgatgtccatgcccaactacatgcagacaggaggcctggagggcagccactacctgccccccaccaagttcagcggcctgccccgcttcagccatgacagaagacccagcagctgcatctcctgggaggtggtggaggccacctgtgcctgcctgctggcccagggcgaggaggccgagaaggagcactgcagcaagtgcctggccgagcagatgatcctggaggagtttggccgctgcctgagccagatcctgcacacagagttcaagagcaagggcctgaagatggagtag

SEQ ID NO: 150725 - DNA, 2579 bp, Artificial Sequence
  derived and/or modified sequence
actgcccgggcgcctcttcccctccccccaggttcctgtccctcacccttcccccttctccaaccgccaacggccgcctgcgcctgaggcccggcccacgccccatcccgctcgctccacgctgcggcagccccggcggccccaggtgcgcggcccccgccatcccgccccgccgccctgcgccatggaggagggccctctgccgggcgggctgcccagccccgaggatgcgatggtgacggagctcttaagccccgagggtccgttcgcttcggagaacatcggcctgaaggcccccgtgaagtacgaggaggacgagttccacgtcttcaaagaagcgtacctgggcccggcggaccccaaggaacccgtcctgcacgcgttcaaccccgcgctgggcgccgactgcaagggccaggtcaaggcgaagctcgcggggggcgacagcgacggcggggagctcctcggggagtaccccgggatcccagagctcagcgcgctggaggacgtcgcgctcctgcaggccccgcagccgcccgcctgcaacgtgcacttcctgtcctcgctgctacccgcgcaccgcagcccggcggtgttgcccctgggcgcctgggtcctggaaggagcctcccacccgggcgtccgcatgatcccagttgaaatcaaggaagcaggtggtactactacaagtaataatccggaagaagcaactttgcagaatcttcttgctcaggaatcctgttgcaagttcccatcgtcccaggaactagaggatgcctcctgctgttctcttaagaaagattccaacccaatggtgatatgccaattgaaagggggcacacaaatgctatgtatagacaattctagaacaagagaactaaaagcactccatttggttcctcagtatcaagatcaaaataattatctacagtcagatgtccctaaaccaatgactgctttagtagggagatttttgccagcatcaacaaaattaaatctcattacacaacaacttgagggagccttaccatcggtagtcaacgggtctgctttcccctcgggatcaactcttccaggaccaccaaaaataactttggctgggtactgtgactgctttgccagtggggacttttgcaacaactgcaattgtaataattgttgcaacaacttgcatcatgatattgaacggtttaaagccattaaggcatgtcttggtagaaatccagaagctttccagccaaaaattgggaagggccaattgggcaatgtcaagccccagcacaacaaagggtgcaactgcaggaggtcaggctgcctgaagaattactgcgagtgctatgaggcccaaattatgtgttcttctatttgcaaatgcattggttgcaaaaattatgaagaaagcccagaacgaaagacactaatgagcatgccaaactacatgcagactggaggtttggaaggcagccattacctgccaccaacgaaattttcaggacttccaagattcagtcacgataggcggccttcctcatgcatctcctgggaggtggtggaggccacatgcgcctgcctgcttgctcagggagaagaggccgagaaagaacactgctccaagtgcctggcagagcagatgatcctggaggaatttggaaggtgcttatcacagattctccacactgagtttaaatctaagggattgaaaatggagtagagtataaagtgtgaatgcatgttgattttgtcttagtctagaaatctctagtttagaaaggatgtttaggggaacatgaggctggctctgcagcaacaaccaggctcccctgcatccctgggcccagggagtttactcagagctctctgaagatgtggcaacccatgcccccttttctgaggaggtgcatggcctgagcattgtttgtctggcccagaggagagagcttgggttcccatagtcctgggagagtgtctgcagggcggcggagggcagagcagggcaggggagggcacagcaggccctgcgaagggcagagcggggcaggggagggcagagcaggccctgcggagagctcactctggtcgactcttcctctcagagaatgttgctctggaggctgctctgcatgaaaaccctaatggtttcttgtttgtttttcaaattatttagaaataagttctccggatgggctgttgtgataccacttaaaatctctagagaactactgaacacctaaagattttctgtagcgtagatatttccccagaggcacgcgaactgtcagtctttcctaaggcccccgggagacgcaggcaatggggcctcgcaggccaggcttgcaccagcatgtcttgagttagaggacttaaaattatccagtttcttctgtgtttctacttgaattgtggaaaagctctattatccaattaacttctccataattattgttgtaatattattattgtttgtaaaacatggttcacataactagcttgtggaaaccagcaggtaaaatgaattcttaagttgacgcttttggttctgttgtaaagcaaagatgaataaaaatttccaatgtcttcaa

SEQ ID NO: 150726 - DNA, 1527 bp, Artificial Sequence
  derived and/or modified sequence
atggaggagggccccctgcccggcggcctgcccagccccgaggacgcaatggtgacagaactgctgtcacccgagggcccttttgcatccgagaatatcggcttgaaggcgcccgttaagtacgaagaagacgaatttcacgtatttaaagaagcttaccttggccctgcagaccctaaggagcctgtgctccacgctttcaaccctgcactgggcgccgactgtaaagggcaggttaaggccaagctcgccgggggtgactccgacggcggcgaactgctgggcgaataccccgggattccagaactttctgcactggaagacgttgcactcctgcaggccccccagcctccggcatgtaatgtgcactttctgagcagcctattaccggcccatagatcccctgccgtgttgccactcggggcatgggtactggaaggtgcgagccatcctggcgttcggatgatacctgtggaaattaaggaggctggcggaaccactacaagcaataaccctgaggaagccactttgcagaacctgttggcccaggagagctgttgtaagtttccaagctctcaagaactggaagacgcctcatgttgttcactcaagaaggactcgaaccctatggtcatctgccagcttaagggaggaacacagatgctctgtatcgataacagcaggactcgggaactcaaggctcttcatttagtgccacaataccaggaccaaaacaattacctacagagtgatgtgcctaagcccatgactgccctggtgggccgctttctccccgcttctaccaaactgaatttgatcacgcagcaacttgagggagccttaccttctgtcgtgaacggaagtgcatttccctcaggcagcaccctgcctggaccccccaaaattacactggccggatactgtgattgtttcgcctcaggtgatttttgtaataactgtaattgcaacaactgctgcaataacctgcaccacgacatcgagcgcttcaaagccatcaaagcgtgcttaggaaggaacccagaagctttccagccaaagataggcaaaggtcagctgggcaatgtcaaacctcagcataataaaggatgtaactgtaggagatctggctgcctgaagaactattgcgaatgttatgaggctcagatcatgtgtagcagcatttgtaaatgtatcggttgcaaaaattatgaggagagccccgagcggaagacactgatgagcatgcccaattacatgcagacaggggggctagaaggaagccactacctcccccccaccaagttctccggactgccaaggttttctcatgatcggaggccctcctcgtgtatttcctgggaagtggtggaagctacttgcgcctgcctcctggcacagggcgaagaagccgagaaggaacattgtagcaagtgtttggctgagcagatgatcctggaggaattcgggaggtgtctttcgcagatactccatactgaattcaagagtaagggtttgaaaatggagtag

SEQ ID NO: 150727 - DNA, 1527 bp, Artificial Sequence
  derived and/or modified sequence
atggaagagggacccctgcccggaggcctcccgtctccagaggacgctatggtcaccgagttactgtcacctgaaggcccttttgcctcggaaaacattggacttaaagcccctgtgaaatatgaggaggatgagtttcacgtcttcaaggaggcttatcttggaccagcagaccccaaggagcccgtgctgcacgcttttaaccctgcattaggagctgattgcaaagggcaggtgaaggcaaaactggccggaggcgactcagacggaggagaactgctaggcgagtacccaggtatacccgagctgtctgctctggaggacgtagcgttacttcaggcccctcagcctccagcctgcaacgttcacttcctctcatcactgcttccggctcaccgtagcccagccgtgctgccactgggtgcctgggtgctcgaaggtgcaagccaccccggtgtcaggatgatccccgtggaaatcaaagaggctggcggaaccaccacctctaacaaccccgaagaggccacactgcaaaacttactggcccaagagtcatgctgtaagttccccagctcccaggagctggaggatgcctcttgctgcagcctgaagaaagatagcaatcctatggtaatctgtcagctgaagggcggaacccaaatgctgtgtatcgacaatagtaggacaagggaactcaaggccttgcacctcgtcccgcaatatcaagaccaaaacaattaccttcaaagtgacgtacccaagcctatgacagccttggttgggaggttcttaccagcctcaactaagcttaatctcatcacacaacagcttgagggcgctctgccttccgtagtgaatggctcagctttcccatcaggctcaaccctgcctggccctccaaagataaccttggctggatattgcgattgtttcgcctccggggacttttgtaataactgcaactgcaataattgctgcaacaatctacaccacgacatcgagaggttcaaggctataaaggcctgtctggggcgaaatccagaggcatttcagcccaaaattggtaaaggacagttgggaaacgttaaaccacagcataacaaagggtgtaactgccggcgatccggatgcttgaagaattactgtgagtgttacgaagcccagatcatgtgctcatcaatctgcaagtgtattggctgtaagaactacgaggagagccccgagcgtaaaaccttgatgagcatgcccaattacatgcagacaggagggcttgaaggctcacattacctgcctccaactaagttctccgggctgcccagattttcgcatgaccgtaggccatcctcttgtattagctgggaggtggtggaggcaacctgcgcatgcctcctcgcccaaggagaggaggctgagaaggaacactgttctaaatgtctagcagagcagatgattctcgaggagttcggacggtgtcttagccaaatcctgcacacagagttcaagtccaaggggctaaagatggagtag

SEQ ID NO: 150728 - DNA, 1527 bp, Artificial Sequence
  derived and/or modified sequence
atggaggagggccccctgcccggcggcctgcccagccccgaggacgccatggtgaccgagctgctgagccccgagggccccttcgccagcgagaacatcggcctgaaggcccccgtgaagtacgaggaggacgagttccacgtgttcaaggaggcctacctgggccccgccgaccccaaggagcccgtgctgcacgccttcaaccccgccctgggcgccgactgcaagggccaggtgaaggccaagctggccggcggcgacagcgacggcggcgagctgctgggcgagtaccccggcatccccgagctgagcgccctggaggacgtggccctgctgcaggccccccagccccccgcctgcaacgtgcacttcctgagcagcctgctgcccgcccacagaagccccgccgtgctgcccctgggcgcctgggtgctggagggcgccagccaccccggcgtgagaatgatccccgtggagatcaaggaggccggcggcaccaccaccagcaacaaccccgaggaggccaccctgcagaacctgctggcccaggagagctgctgcaagttccccagcagccaggagctggaggacgccagctgctgcagcctgaagaaggacagcaaccccatggtgatctgccagctgaagggcggcacccagatgctgtgcatcgacaacagcagaaccagagagctgaaggccctgcacctggtgccccagtaccaggaccagaacaactacctgcagagcgacgtgcccaagcccatgaccgccctggtgggcagattcctgcccgccagcaccaagctgaacctgatcacccagcagctggagggcgccctgcccagcgtggtgaacggcagcgccttccccagcggcagcaccctgcccggcccccccaagatcaccctggccggctactgcgactgcttcgccagcggcgacttctgcaacaactgcaactgcaacaactgctgcaacaacctgcaccacgacatcgagagattcaaggccatcaaggcctgcctgggcagaaaccccgaggccttccagcccaagatcggcaagggccagctgggcaacgtgaagccccagcacaacaagggctgcaactgcagaagaagcggctgcctgaagaactactgcgagtgctacgaggcccagatcatgtgcagcagcatctgcaagtgcatcggctgcaagaactacgaggagagccccgagagaaagaccctgatgagcatgcccaactacatgcagaccggcggcctggagggcagccactacctgccccccaccaagttcagcggcctgcccagattcagccacgacagaagacccagcagctgcatcagctgggaggtggtggaggccacctgcgcctgcctgctggcccagggcgaggaggccgagaaggagcactgcagcaagtgcctggccgagcagatgatcctggaggagttcggcagatgcctgagccagatcctgcacaccgagttcaagagcaagggcctgaagatggagtag

SEQ ID NO: 150729 - protein, 911 aa, Artificial Sequence
  derived and/or modified sequence
MVDYHAANQSYQYGPSSAGNGAGGGGSMGDYMAQEDDWDRDLLLDPAWEKQQRKTFTAWCNSHLRKAGTQIENIDEDFRDGLKLMLLLEVISGERLPKPERGKMRVHKINNVNKALDFIASKGVKLVSIGAEEIVDGNAKMTLGMIWTIILRFAIQDISVEETSAKEGLLLWCQRKTAPYKNVNVQNFHISWKDGLAFNALIHRHRPELIEYDKLRKDDPVTNLNNAFEVAEKYLDIPKMLDAEDIVNTARPDEKAIMTYVSSFYHAFSGAQKAETAANRICKVLAVNQENEHLMEDYEKLASDLLEWIRRTIPWLEDRVPQKTIQEMQQKLEDFRDYRRVHKPPKVQEKCQLEINFNTLQTKLRLSNRPAFMPSEGKMVSDINNGWQHLEQAEKGYEEWLLNEIRRLERLDHLAEKFRQKASIHEAWTDGKEAMLKHRDYETATLSDIKALIRKHEAFESDLAAHQDRVEQIAAIAQELNELDYYDSHNVNTRCQKICDQWDALGSLTHSRREALEKTEKQLEAIDQLHLEYAKRAAPFNNWMESAMEDLQDMFIVHTIEEIEGLISAHDQFKSTLPDADREREAILAIHKEAQRIAESNHIKLSGSNPYTTVTPQIINSKWEKVQQLVPKRDHALLEEQSKQQSNEHLRRQFASQANVVGPWIQTKMEEIGRISIEMNGTLEDQLSHLKQYERSIVDYKPNLDLLEQQHQLIQEALIFDNKHTNYTMEHIRVGWEQLLTTIARTINEVENQILTRDAKGISQEQMQEFRASFNHFDKDHGGALGPEEFKACLISLGYDVENDRQGEAEFNRIMSLVDPNHSGLVTFQAFIDFMSRETTDTDTADQVIASFKVLAGDKNFITAEELRRELPPDQAEYCIARMAPYQGPDAVPGALDYKSFSTALYGESDL

SEQ ID NO: 150730 - protein, 692 aa, Artificial Sequence
  derived and/or modified sequence
MVDYHAANQSYQYGPSSAGNGAGGGGSMGDYMAQEDDWDRDLLLDPAWEKQQRKAETAANRICKVLAVNQENEHLMEDYEKLASDLLEWIRRTIPWLEDRVPQKTIQEMQQKLEDFRDYRRVHKPPKVQEKCQLEINFNTLQTKLRLSNRPAFMPSEGKMVSDINNGWQHLEQAEKGYEEWLLNEIRRLERLDHLAEKFRQKASIHEAWTDGKEAMLKHRDYETATLSDIKALIRKHEAFESDLAAHQDRVEQIAAIAQELNELDYYDSHNVNTRCQKICDQWDALGSLTHSRREALEKTEKQLEAIDQLHLEYAKRAAPFNNWMESAMEDLQDMFIVHTIEEIEGLISAHDQFKSTLPDADREREAILAIHKEAQRIAESNHIKLSGSNPYTTVTPQIINSKWEKVQQLVPKRDHALLEEQSKQQSNEHLRRQFASQANVVGPWIQTKMEEIGRISIEMNGTLEDQLSHLKQYERSIVDYKPNLDLLEQQHQLIQEALIFDNKHTNYTMEHIRVGWEQLLTTIARTINEVENQILTRDAKGISQEQMQEFRASFNHFDKDHGGALGPEEFKACLISLGYDVENDRQGEAEFNRIMSLVDPNHSGLVTFQAFIDFMSRETTDTDTADQVIASFKVLAGDKNFITAEELRRELPPDQAEYCIARMAPYQGPDAVPGALDYKSFSTALYGESDL

SEQ ID NO: 150731 - DNA, 2736 bp, Artificial Sequence
  derived and/or modified sequence
atggttgactaccacgcagctaatcagtcatatcagtacggaccctcttctgctggaaacggcgcaggcggggggggatccatgggcgattatatggcccaggaggacgactgggatcgcgatttattgctcgaccctgcctgggagaaacagcagcgcaaaacctttaccgcatggtgcaattcccacctgcggaaagccggcactcagattgaaaatattgacgaagactttcgggatggtttaaaactgatgttgctgctggaagtgatctccggggagcgtctcccgaaacccgaaagaggcaaaatgagagtgcacaaaatcaacaatgtgaacaaagccctggactttattgcgagcaaaggtgttaagctggtgagcataggtgccgaagagattgtagatggaaatgctaaaatgacccttgggatgatctggaccatcattttgcgatttgctatccaggatatttccgttgaagaaacctctgctaaggagggcctactgctctggtgccagaggaaaaccgccccttataaaaacgtgaacgtgcagaactttcatatctcttggaaagatggcctcgcattcaatgctttaatccatcgacaccggccagagctgattgaatatgacaaactcagaaaggatgacccagtgaccaatctgaacaacgctttcgaagtcgccgagaagtacctggacatcccgaagatgttagatgccgaggacatcgtcaatacagctagacctgacgagaaggccatcatgacgtacgtgtctagcttctaccacgccttctccggagcacagaaggccgagacagcagcaaaccgcatttgtaaagttctcgctgtgaatcaggagaatgagcatctgatggaagactacgagaaactcgcaagcgatttgcttgaatggattcggagaacaatcccctggctagaggatcgcgtccctcagaagactattcaagagatgcaacaaaagctggaagacttcagggattatcgccgcgtacataagcccccaaaggtccaggaaaagtgtcaattagaaataaacttcaatactctgcagacgaaactacgcctgtcaaaccgccccgctttcatgccaagcgagggcaagatggtatctgacataaacaatggttggcagcatctggagcaggccgaaaaaggctacgaagaatggctactcaatgaaatccggcgcttggagcgtctcgaccacctggccgagaaatttcggcagaaggctagcatccacgaagcttggacagatgggaaagaagccatgttaaagcaccgggactacgaaaccgcgactctcagtgacataaaggcccttattcgcaaacacgaggccttcgaaagtgacctggctgctcatcaggatcgagtggagcaaattgccgccatagcccaggagctcaacgaactcgattactacgatagccataatgtgaacacaagatgtcaaaaaatttgtgaccaatgggacgccttggggtctctcacgcactctaggcgggaggcgctggaaaagacagaaaaacagctcgaggccatcgatcaactccaccttgaatacgctaaacgcgcagcccccttcaacaactggatggagagtgctatggaggatctgcaggacatgttcatagtgcacacaatcgaggagatcgaaggtttgatctctgctcacgatcagttcaagtccacgctgccggatgccgatcgggagagggaggccattcttgctatccacaaggaagcccagcgcatcgcagaatcaaatcacattaaactgagcggcagcaacccttacaccaccgtaacccctcagatcatcaacagcaagtgggagaaagttcaacagctagtgcccaaacgcgaccacgcattgctggaagaacagtccaagcagcagtccaacgagcacctgcggcggcagtttgcaagccaggctaatgtggtagggccctggattcagactaagatggaggaaattggtagaattagcattgagatgaacgggaccttagaggaccagttgagtcacctaaaacagtatgagcggagcatcgtcgattataagccaaacctcgacctgctggagcagcagcatcagctgatacaggaggcgctgatctttgacaacaagcacacgaactatactatggagcatatccgggttggctgggagcagctgttgaccaccattgcacgcaccatcaacgaagtggagaatcagatcctgactcgagatgctaaaggcatcagccaagagcagatgcaagaattccgagcgtcgttcaaccacttcgataaggatcacggcggggcactgggacctgaagagttcaaggcttgcctgatatctctcgggtatgacgtcgaaaatgacaggcagggtgaggctgagttcaatcggatcatgagtctcgtggatcctaatcattctggactcgtgactttccaggccttcatcgactttatgagtagggagaccactgatacagatactgccgaccaggtcatcgcttctttcaaggtgctggccggcgataagaatttcattacagcagaggaactacggagggagctgccgcctgaccaggccgagtattgtatagcaaggatggctccttatcagggacccgacgccgtccccggcgccctcgattacaaatccttcagcaccgctctttatggagaatcggatctgtag

SEQ ID NO: 150732 - DNA, 2079 bp, Artificial Sequence
  derived and/or modified sequence
atggttgactatcacgctgcaaaccagtcataccaatatggaccaagttctgccggaaacggagcagggggggggggatcaatgggcgactatatggctcaggaggacgactgggatcgcgatctcttgctggatcctgcctgggagaaacagcagcgcaaagccgaaaccgcggctaaccgaatttgtaaagtactcgcagtcaaccaggaaaatgaacatctgatggaggattatgagaagctcgcatccgatctccttgaatggatcagaaggacgattccatggcttgaagacagagtacctcagaagacgatccaggaaatgcaacagaaactggaggatttcagggactatcgtcgcgtccacaagccacctaaggtgcaagagaagtgtcagctggaaattaattttaatacgctgcagacaaagcttaggttgagtaatcggcccgcgttcatgccaagtgaggggaaaatggtgtccgatattaacaatggctggcagcacctggaacaggcggaaaagggctatgaagagtggctcctgaatgagatccggagattagagcggctggaccacctggctgaaaagttcaggcaaaaggcttccattcatgaagcctggacagacggaaaagaagccatgctgaagcatagggactacgaaacagcgacactaagcgacattaaagctttgattcgaaagcacgaggcatttgaaagcgatcttgctgctcatcaggatcgggtggaacaaatcgctgctatcgcccaagaactgaacgagcttgactactacgactcacataatgtgaatacgaggtgtcagaagatctgcgaccaatgggacgcccttgggagcttgacccattcaagacgggaggctcttgagaagacagagaagcagctggaagccatagaccagttgcacctggagtacgccaagcgcgccgccccattcaataactggatggagagtgcaatggaggacctgcaggacatgttcattgtgcacacaatcgaagagatcgagggcctgatatccgcccatgaccagtttaagtctactcttccagatgcagatcgggagagggaagcaatcctagcaatccataaagaagcccagaggatcgccgagtcgaatcacattaagctgagcggaagcaatccctacacaacagtgactccacagataattaattcaaaatgggagaaggttcagcagctcgtgcccaagcgcgatcatgccctgttggaagagcaatctaaacaacagagtaacgaacacctaaggcggcagtttgcatcacaggcaaacgttgtcggtccctggatacagaccaaaatggaggagatcggacgtattagtatcgagatgaacgggaccttggaggatcaactatcgcacctgaagcaatacgaaaggtcgatcgtagactataaacccaatttggatttgctggagcagcaacatcagctgatccaggaagctctgatcttcgacaataaacacactaactatactatggaacacatcagagtcgggtgggaacagctgttgaccacaatagctaggacgattaacgaggtagagaatcagatactcacccgtgacgcaaaagggattagccaggagcagatgcaggaattcagagcttcatttaaccacttcgataaggatcacggcggcgccctgggcccagaggagttcaaagcctgtttaatttcgctggggtatgacgtggagaatgaccggcagggtgaggcggaatttaaccggattatgtccctggtggacccaaaccacagtggactcgttacttttcaggccttcatcgattttatgtctcgggaaactactgataccgatacagcagatcaggtaatcgcctcatttaaggtgttggccggtgacaagaatttcatcactgccgaggaattgcgaagagaacttccacctgaccaggccgaatactgtattgccagaatggccccctaccagggaccggacgctgtgcctggtgcccttgattacaaaagcttcagtacagctctctatggtgagagcgacctgtag

SEQ ID NO: 150733 - DNA, 1566 bp, Artificial Sequence
  derived and/or modified sequence
atggtcgactaccatgcggccaaccagtcgtaccagtacggcccaagctccgcagggaacggagccggcgggggcgggagcatgggagattatatggcgcaggaagacgattgggatcgagatctgctgcttgaccccgcttgggaaaaacagcagagaaagactttcacagcttggtgtaattcccacctgagaaaggccggcactcagatcgaaaacatagacgaagacttccgcgacggtctcaagctgatgctgctgttggaggtgcatgagcttgactattatgacagccataacgttaacacccgatgtcagaagatttgcgatcagtgggacgctctgggctctcttacgcattctcggagagaggcgctggaaaaaaccgaaaagcaactcgaagctatcgaccaacttcacctggagtacgctaaacgtgccgctcctttcaacaactggatggagagtgctatggaggatttgcaggatatgtttattgtgcacaccattgaagaaatcgagggactgatttccgcacacgaccagtttaagagcacgttgccggacgccgaccgagagcgagaggccattcttgccatccacaaagaagcccaacggatcgccgagtccaaccatatcaaactgagcgggtccaacccctataccaccgtcactcctcagataatcaactctaagtgggagaaagttcagcagcttgtccccaagcgggatcacgctctcctggaggaacagtcgaaacagcagagcaacgagcacctccgccggcaattcgcctcacaggctaacgtcgtcggtccgtggatccagactaagatggaggaaatcgggagaatatccatagagatgaatggcacactggaggatcagctgtctcatcttaaacagtacgagcgttctatcgtggactataaaccaaatcttgacctgctggaacaacaacaccaactcatacaagaggctctgatcttcgacaataagcacactaattacacgatggagcacattagagtggggtgggagcagctgcttaccactatcgctcggaccatcaatgaggtggaaaaccaaatactgacgagggacgcaaagggcatctcccaggagcagatgcaggaattccgcgccagcttcaaccatttcgacaaagaccatggcggagctctgggtccggaggaattcaaggcgtgccttatcagcctgggatatgacgtagagaacgaccgccaaggtgaggctgagtttaatagaataatgagtctcgtcgaccctaaccatagcggattagtcacctttcaggcctttattgattttatgagcagggagacaactgacacggataccgccgatcaggtgatcgcatccttcaaggtgctggcgggtgataagaattttatcacagctgaggaacttcggcgcgagctgcctcccgaccaggctgaatattgcatcgcaaggatggctccatatcaagggcccgatgctgtaccaggcgcccttgactacaagtcgtttagcactgctctttacggcgagtctgacctgtag

SEQ ID NO: 150734 - DNA, 1689 bp, Artificial Sequence
  derived and/or modified sequence
atggtggattatcatgccgctaaccagagttaccagtacggaccgagctcagcagggaacggtgccggcggcggaggaagtatgggcgattatatggcccaggaggatgattgggaccgggacttattgttagatcccgcctgggagaagcagcagaggaagacttttacagcctggtgtaacagtcacttgcggaaggccggaacacagatcgaaaatattgatgaggattttcgcgatggcctgaagctgatgctattgcttgaagtgataagcggcgagcgactgccaaaacccgagaggggcaagatgagggttcataaaatcaataatgtgaacaaagccctggacttcatcgcaagcaaaggtgttaaactggtgagcatcggggctgaggaaatagtcgacggaaatgccaagatgacacttggtatgatctggacaattatccttcggtttgcgatacaggatatttcagtcgaggaaacaagcgccaaagaggggctgcttttatggtgccagagaaagaccgcaccctacaaaaatgtgaacgtgcagaatttccacatctcttggaaggacggcttagctttcaacgccctgatacaccggcacaggcccgagctgatcgagtatgataagcttaggaaagacgaccctgtcaccaacttgaataacgccttcgaagtagcagagaagtacctggatattccaaaaatgctggatgcggaggatattgttaacaccgcccgccccgatgagaaagctataatgacatacgtgtcctccttctatcatgcattctctggagcacagaaagcagagactgcagcaaatcgtatttgcaaggttttggccgtgaatcaggagaacgaacatctcatggaagattacgaaaaactggccagcgacctgttggaatggatccggcgtaccattccctggctcgaagatcgggtgcctcaaaagactatccaggagatgcagcagaagttagaagatttccgggactatcgcagggttcacaaaccgccgaaggtgcaggaaaaatgccagcttgagattaactttaatacgctccagacgaaattgaggctgagtaaccgccccgcgttcatgccatccgaagggaagatggtgtcagacataaacaatggttggcagcacctcgaacaagctgagaagggctacgaggagtggctcctaaacgagatccgacggttggaaagactcgatcatctcgctgagaaattccgccagaaagccagcatacatgaggcatggacggatgggaaggaagcaatgcttaagcacagagattacgagacggcgacgttaagcgacatcaaagcactgattaggaaacacgaagctttcgagtccgacctcgccgcacaccaggatcgagtggagcagattgctgcaattgcacaggagctcaatgagctcgattactacgactcgcataatgtgaatacgccagatggtttgcaggaaggcccagggcagccccatagtcccatcccgcccctctgtatttatgccaagcacagtctgcagtctagcggggtgggagggtgggccggtagggggtggggacgattgtccccactgtcactttgtgggcttgctaggcgctttccgcgccccggatggggagatctgggcccggctcttctagtatggtag

SEQ ID NO: 150735 - DNA, 2736 bp, Artificial Sequence
  derived and/or modified sequence
atggtggactaccacgccgccaaccagagctaccagtatggccccagcagcgctggaaatggagctgggggcggcggctccatgggagactacatggcccaggaggatgactgggaccgggacctgctgctggaccctgcctgggagaagcagcagaggaagaccttcaccgcctggtgcaacagccacctgaggaaggccggcacccagatcgagaacattgatgaggacttcagagatggcctgaagctgatgctgctgctggaggtgatcagcggggagcggctgcccaagccagagcggggcaagatgagggtgcacaagatcaacaacgtgaacaaggccctggacttcatcgccagcaagggcgtgaagctggtgtccattggagctgaggagatcgtggatggaaatgccaagatgaccctgggcatgatctggaccatcatcctgcgctttgccatccaggacatctctgtggaggagaccagcgccaaggagggcctgctgctgtggtgccagaggaagacagccccctacaagaatgtgaatgtgcagaacttccacatctcctggaaggatggcctggccttcaatgccctgatccaccgccacaggcctgagctgattgaatatgacaagctgaggaaggatgatcctgtgaccaacctgaacaatgcctttgaggtggccgagaagtacctggacatccccaagatgctggatgctgaggacatcgtgaacacagcccggccagatgagaaggccatcatgacctacgtgtcctccttctaccacgccttcagcggggcccagaaggccgagacagctgccaaccgcatctgcaaggtgctggccgtgaaccaggagaatgagcacctgatggaggactatgagaagctggccagtgacctgctggagtggatccggaggaccatcccctggctggaggacagagtgccccagaagaccatccaggagatgcagcagaagctggaggacttccgggactacagaagagtgcacaagccacccaaggtgcaggagaagtgccagctggagatcaacttcaacaccctgcagaccaagctgcggctgagcaacagacctgccttcatgcccagcgagggcaagatggtgtctgacatcaacaacggctggcagcacctggagcaggccgagaagggctatgaggagtggctgctgaatgagatccggcggctggagcggctggaccacctggccgagaagttccggcagaaggccagcatccacgaggcctggacagatggcaaggaggccatgctgaagcaccgggactatgaaacagccaccctgagtgacatcaaggccctgatcaggaagcatgaggcctttgaaagtgacctggccgcccaccaggacagagtggagcagattgctgccatcgcccaggagctgaatgagctggactactatgacagccacaacgtgaacacccgctgccagaagatctgtgaccagtgggatgccctgggcagcctgacccacagccggcgggaggccctggagaagacagagaagcagctggaggccatcgaccagctgcacctggagtatgccaagagagctgcccccttcaacaactggatggagagcgccatggaggacctgcaggacatgttcatcgtgcacaccatcgaggagattgagggcctcatcagcgcccatgaccagttcaagagcaccctgcctgatgctgaccgggagcgggaggccatcctggccatccacaaggaggcccagagaattgctgagagcaaccacatcaagctgagcggcagcaacccctacaccaccgtgaccccccagatcatcaacagcaagtgggagaaggtgcagcagctggtgcccaagagggaccacgccctgctggaggagcagagcaagcagcagagcaatgagcacctgcggcggcagtttgccagccaggccaacgtggtgggcccctggatccagaccaagatggaggagatcggccgcatcagcattgagatgaatggcaccctggaggaccagctgagccacctgaagcagtatgaaagaagcatcgtggactacaagcccaacctggacctgctggagcagcagcaccagctgatccaggaggccctgatctttgacaacaagcacaccaactacaccatggagcacatccgggtgggctgggagcagctgctgaccaccatcgcccggaccatcaatgaggtggagaaccagatcctgaccagagatgccaagggcatcagccaggagcagatgcaggagttccgggccagcttcaaccactttgacaaggaccatggaggagccctgggccctgaggagttcaaggcctgcctgatcagcctgggctatgatgtggagaatgaccggcagggcgaggccgagttcaaccgcatcatgagcctggtggaccccaaccacagcggcctggtgaccttccaggccttcatcgacttcatgagccgggagaccacagacacagacacagctgaccaggtgattgccagcttcaaggtgctggccggggacaagaacttcatcacagctgaggagctgcggcgggagctgcccccagaccaggccgagtactgcatcgccaggatggccccctaccagggcccagatgctgtgcctggggccctggactacaagagcttcagcacagccctgtatggagagagtgacctgtag

SEQ ID NO: 150736 - DNA, 2079 bp, Artificial Sequence
  derived and/or modified sequence
atggtggactaccacgccgccaaccagagctaccagtatggccccagcagcgctggaaatggagctgggggcggcggctccatgggagactacatggcccaggaggatgactgggaccgggacctgctgctggaccctgcctgggagaagcagcagaggaaggccgagacagctgccaaccgcatctgcaaggtgctggccgtgaaccaggagaatgagcacctgatggaggactatgagaagctggccagtgacctgctggagtggatccggaggaccatcccctggctggaggacagagtgccccagaagaccatccaggagatgcagcagaagctggaggacttccgggactaccgccgggtgcacaagccacccaaggtgcaggagaagtgccagctggagatcaacttcaacaccctgcagaccaagctgcggctgagcaacagacctgccttcatgcccagcgagggcaagatggtgtctgacatcaacaacggctggcagcacctggagcaggccgagaagggctatgaggagtggctgctgaatgagatccggcggctggagcggctggaccacctggccgagaagttccggcagaaggccagcatccacgaggcctggacagatggcaaggaggccatgctgaagcaccgggactatgaaacagccaccctgagtgacatcaaggccctgatcaggaagcatgaggcctttgaaagtgacctggccgcccaccaggacagagtggagcagattgctgccatcgcccaggagctgaatgagctggactactatgacagccacaacgtgaacacccgctgccagaagatctgtgaccagtgggatgccctgggcagcctgacccacagcagaagagaggccctggagaagacagagaagcagctggaggccatcgaccagctgcacctggagtatgccaagagagctgcccccttcaacaactggatggagagcgccatggaggacctgcaggacatgtttattgtgcacaccatcgaggagattgagggcctcatcagcgcccatgaccagttcaagagcaccctgcctgatgctgaccgggagcgggaggccatcctggccatccacaaggaggcccagagaattgctgagagcaaccacatcaagctgagcggcagcaacccctacaccaccgtgaccccccagatcatcaacagcaagtgggagaaggtgcagcagctggtgcccaagagggaccacgccctgctggaggagcagagcaagcagcagagcaatgagcacctgcggcggcagtttgccagccaggccaacgtggtgggcccctggatccagaccaagatggaggagatcggccgcatcagcattgagatgaatggcaccctggaggaccagctgagccacctgaagcagtatgaaagaagcatcgtggactacaagcccaacctggacctgctggagcagcagcaccagctgatccaggaggccctgatctttgacaacaagcacaccaactacaccatggagcacatccgggtgggctgggagcagctgctgaccaccatcgcccggaccatcaatgaggtggagaaccagatcctgaccagagatgccaagggcatcagccaggagcagatgcaggagttccgggccagcttcaaccactttgacaaggaccacggcggggccctgggccctgaggagttcaaggcctgcctgatcagcctgggctatgatgtggagaatgaccggcagggcgaggccgagttcaaccgcatcatgagcctggtggaccccaaccacagcggcctggtgaccttccaggccttcatcgacttcatgagccgggagaccacagacacagacacagctgaccaggtgattgccagcttcaaggtgctggccggggacaagaacttcatcacagctgaggagctgcggcgggagctgcccccagaccaggccgagtactgcatcgccaggatggccccctaccagggcccagatgctgtgcctggggccctggactacaagagcttcagcacagccctgtatggagagagtgacctgtag

SEQ ID NO: 150737 - DNA, 1566 bp, Artificial Sequence
  derived and/or modified sequence
atggtggactaccacgccgccaaccagagctaccagtatggccccagcagcgctggaaatggagctgggggcggcggctccatgggagactacatggcccaggaggatgactgggaccgggacctgctgctggaccctgcctgggagaagcagcagaggaagaccttcaccgcctggtgcaacagccacctgaggaaggccggcacccagatcgagaacattgatgaggacttcagagatggcctgaagctgatgctgctgctggaggtgcatgagctggactactatgacagccacaacgtgaacacccgctgccagaagatctgtgaccagtgggatgccctgggcagcctgacccacagccggcgggaggccctggagaagacagagaagcagctggaggccatcgaccagctgcacctggagtatgccaagagagctgcccccttcaacaactggatggagagcgccatggaggacctgcaggacatgttcatcgtgcacaccatcgaggagattgagggcctcatcagcgcccatgaccagttcaagagcaccctgcctgatgctgaccgggagcgggaggccatcctggccatccacaaggaggcccagagaattgctgagagcaaccacatcaagctgagcggcagcaacccctacaccaccgtgaccccccagatcatcaacagcaagtgggagaaggtgcagcagctggtgcccaagagggaccacgccctgctggaggagcagagcaagcagcagagcaatgagcacctgcggcggcagtttgccagccaggccaacgtggtgggcccctggatccagaccaagatggaggagatcggccgcatcagcattgagatgaatggcaccctggaggaccagctgagccacctgaagcagtatgaaagaagcatcgtggactacaagcccaacctggacctgctggagcagcagcaccagctgatccaggaggccctgatctttgacaacaagcacaccaactacaccatggagcacatccgggtgggctgggagcagctgctgaccaccatcgcccggaccatcaatgaggtggagaaccagatcctgaccagagatgccaagggcatcagccaggagcagatgcaggagttccgggccagcttcaaccactttgacaaggaccatggaggagccctgggccctgaggagttcaaggcctgcctgatcagcctgggctatgatgtggagaatgaccggcagggcgaggccgagttcaaccgcatcatgagcctggtggaccccaaccacagcggcctggtgaccttccaggccttcatcgacttcatgagccgggagaccacagacacagacacagctgaccaggtgattgccagcttcaaggtgctggccggggacaagaacttcatcacagctgaggagctgcggcgggagctgcccccagaccaggccgagtactgcatcgccaggatggccccctaccagggcccagatgctgtgcctggggccctggactacaagagcttcagcacagccctgtatggagagagtgacctgtag

SEQ ID NO: 150738 - DNA, 1689 bp, Artificial Sequence
  derived and/or modified sequence
atggtggactaccacgccgccaaccagagctaccagtatggccccagcagcgctggaaatggagctgggggcggcggctccatgggagactacatggcccaggaggatgactgggaccgggacctgctgctggaccctgcctgggagaagcagcagaggaagaccttcaccgcctggtgcaacagccacctgaggaaggccggcacccagatcgagaacattgatgaggacttcagagatggcctgaagctgatgctgctgctggaggtgatcagcggggagcggctgcccaagccagagcggggcaagatgagggtgcacaagatcaacaacgtgaacaaggccctggacttcatcgccagcaagggcgtgaagctggtgtccattggagctgaggagatcgtggatggaaatgccaagatgaccctgggcatgatctggaccatcatcctgcgctttgccatccaggacatctctgtggaggagaccagcgccaaggagggcctgctgctgtggtgccagaggaagacagccccctacaagaatgtgaatgtgcagaacttccacatctcctggaaggatggcctggccttcaatgccctgatccaccgccacaggcctgagctgattgaatatgacaagctgaggaaggatgatcctgtgaccaacctgaacaatgcctttgaggtggccgagaagtacctggacatccccaagatgctggatgctgaggacatcgtgaacacagcccggccagatgagaaggccatcatgacctacgtgtcctccttctaccacgccttcagcggggcccagaaggccgagacagctgccaaccgcatctgcaaggtgctggccgtgaaccaggagaatgagcacctgatggaggactatgagaagctggccagtgacctgctggagtggatccggaggaccatcccctggctggaggacagagtgccccagaagaccatccaggagatgcagcagaagctggaggacttccgggactacagaagagtgcacaagccacccaaggtgcaggagaagtgccagctggagatcaacttcaacaccctgcagaccaagctgcggctgagcaacagacctgccttcatgcccagcgagggcaagatggtgtctgacatcaacaacggctggcagcacctggagcaggccgagaagggctatgaggagtggctgctgaatgagatccggcggctggagcggctggaccacctggccgagaagttccggcagaaggccagcatccacgaggcctggacagatggcaaggaggccatgctgaagcaccgggactatgaaacagccaccctgagtgacatcaaggccctgatcaggaagcatgaggcctttgaaagtgacctggccgcccaccaggacagagtggagcagattgctgccatcgcccaggagctgaatgagctggactactatgacagccacaacgtgaacaccccagatggcctgcaggagggccctggccagccccacagccccatcccccccctgtgcatctatgccaagcacagcctgcagagcagcggcgtgggcggctgggccggccggggctggggccgcctgagccccctgagcctgtgtggcctggcccggcgcttcccccggcccggctggggagacctgggccctgccctgctggtgtggtag

SEQ ID NO: 150739 - DNA, 4963 bp, Artificial Sequence
  derived and/or modified sequence
gcggcggcggctcgggcagaggggcgggagctgaggcgggagcggacaggctggtgggcgagcgagaggcggcggaatggtggactaccacgcggcgaaccagtcgtaccagtacggccccagcagcgcgggcaatggcgctggcggcgggggcagcatgggcgactacatggcccaggaggacgactgggaccgggacctgctgctggacccggcctgggagaagcagcagcgcaagaccttcacggcatggtgcaactcccacctgcggaaggcaggcacacagatcgagaacattgatgaggacttccgagacgggctcaagctcatgctgctcctggaggtcatatcaggggagcggttacctaagccggagcgggggaagatgagagtgcacaaaatcaacaatgtgaacaaagcgctggactttattgccagcaaaggcgtcaagctggtctccatcggggcagaagagattgtggacggcaacgcaaagatgaccctgggaatgatctggaccatcatccttaggttcgccatccaggacatctccgtggaagagacctcggccaaggaagggctccttctctggtgccagagaaagacagccccgtataagaacgtcaatgtgcagaacttccacatcagctggaaggatggtcttgccttcaatgccctgatccaccggcacagaccagagctgattgagtatgacaagctgaggaaggacgaccctgtcaccaacctgaacaatgccttcgaagtggctgagaaatacctcgacatccccaagatgctggatgcagaggacatcgtgaacacggcccggcccgacgagaaggccataatgacctatgtgtccagcttctaccatgccttttcaggagcgcagaaggctgaaactgccgccaaccggatctgtaaggtgctggctgtcaaccaagagaacgagcacctgatggaggactacgagaagctggccagcgacctcctggagtggatccggcgcaccatcccctggctggaggaccgtgtgccccaaaagactatccaggagatgcagcagaagctggaggacttccgcgactaccggcgtgtgcacaagccgcccaaggtgcaggagaagtgccagctggagatcaacttcaacacgctgcagaccaagctgcgcctcagcaaccggcccgccttcatgccctccgagggcaagatggtctcggacatcaacaatggctggcagcacttggagcaggctgagaagggctacgaggagtggctgctgaatgagatccgcaggctggagcggctcgaccacctggcagagaagttccggcagaaggcctccatccacgaggcctggactgacgggaaggaagccatgctgaagcaccgggactacgagacggccacactatcggacatcaaagccctcattcgcaagcacgaggccttcgagagcgacctggctgcgcaccaggaccgcgtggagcagatcgccgccattgcccaggagctcaacgagctggattactacgactcccacaatgtcaacacccggtgccagaagatctgtgaccagtgggacgccctcggctctctgacacatagtcgcagggaagccctggagaaaacagagaagcagctggaggccatcgaccagctgcacctggaatacgccaagcgcgcggcccccttcaacaactggatggagagcgccatggaggacctccaggacatgttcatcgtccataccatcgaggagattgagggcctgatctcagcccatgaccagttcaagtccaccctgccggacgccgatagggagcgcgaggccatcctggccatccacaaggaggcccagaggatcgctgagagcaaccacatcaagctgtcgggcagcaacccctacaccaccgtcaccccgcaaatcatcaactccaagtgggagaaggtgcagcagctggtgccaaaacgggaccatgccctcctggaggagcagagcaagcagcagtccaacgagcacctgcgccgccagttcgccagccaggccaatgttgtggggccctggatccagaccaagatggaggagatcgggcgcatctccattgagatgaacgggaccctggaggaccagctgagccacctgaagcagtatgaacgcagcatcgtggactacaagcccaacctggacctgctggagcagcagcaccagctcatccaggaggccctcatcttcgacaacaagcacaccaactataccatggagcacatccgcgtgggctgggagcagctgctcaccaccattgcccgcaccatcaacgaggtggagaaccagatcctcacccgcgacgccaagggcatcagccaggagcagatgcaggagttccgggcgtccttcaaccacttcgacaaggatcatggcggggcgctggggcccgaggagttcaaggcctgcctcatcagcctgggctacgacgtggagaacgaccggcagggtgaggccgagttcaaccgcatcatgagcctggtcgaccccaaccatagcggccttgtgaccttccaagccttcatcgacttcatgtcgcgggagaccaccgacacggacacggctgaccaggtcatcgcttccttcaaggtcttagcaggggacaagaacttcatcacagctgaggagctgcggagagagctgccccccgaccaggccgagtactgcatcgcccgcatggcgccataccagggccctgacgccgtgcccggtgccctcgactacaagtccttctccacggccttgtatggcgagagcgacctgtgaggccccagagacctgacccaacacccccgacggcctccaggaggggcctgggcagccccacagtcccattcctccactctgtatctatgcaaagcactctctgcagtcctccggggtgggtgggtgggcagggaggggctggggcaggctctctcctctctctctttgtgggttggccaggaggttcccccgaccaggttggggagacttggggccagcgcttctggtctggtaaatatgtatgatgtgttgtgcttttttaaccaaggaggggccagtggattcccacagcacaaccggtcccttccatgccctgggatgcctcaccacacccaggtctcttcctttgctctgaggtcccttcaaggcctccccaatccaggccaaagccccatgtgccttgtccaggaactgcctgggccatgcgaggggccagcagagggcgccaccaccacctgacggctggggacccacccagcccctctcccctctctgctccagactcacttgccattgccaggagatggccccaacaagcaccccgcttttgcagcagaggagctgagttggcagaccgggcccccctgaaccgcaccccatcccaccagccccggccttgctttgtctggcctcacgtgtctcagattttctaagaaccaaaaaaaaaaaaggaaaaaaaacacaaaacaacaaaaaccaaaaaaaaaaaaaatcacaaaaacaaaaaaactataaaaaagaaagaattaaaaactttcagagaattactatttactttattaacttacggatttattatataaatatatattcacctagcaacatatctctgccgtctctcctgctctcataatgaagacatagccgattctctgcccgggccccttgctgatgctcctccgggtctgcgtcgggcgtgggtctctggggaccctccagaggtggaggtgggctgatggcctggctgcctggtggttgatggttttgctccccctaccttttttttttgagtttattctgattgattttttttcttggtttctggataaaccaccctctggggacaggataataaaacatgtaatatttttaagaaggattcctgcagcatcatctttttttatttctcctgtgtctgtcctccaccttctaggagagccagggcagagctagcactgtcttaagctgtcaacgtggactagctcgtgtcatctgctcgagaagggctgtcgctgttcttgtttctgagtgaggagtacgcaggccagagtggtcacccggccgtgagcagtgagggccagagactagccccagacaggtggatgccagagagagtggcacccatgccaggcaaggcctagggaggtggtcttgctcagcaaccctgccctgagcagcaggtgcgcccatccggagatcctaggagaaggtggccacctccatccactaaggaagagaaggaagacagtggcttgaggcagggagctcgcaggacagagcctgagccaccctgtccctcccacctggctcacctgtctgtgggtcaggcagatgaccccctcacccccatccaggtgctggctgcagtggcctgtgcagagaggggcagggtgagtgcccaccagtccccgtaccccttccccccatgccccaccatgccggggtggtactcacagaagatgcaggtgaggtgggccacacaggacacgaaccgctcgaagtccacacgcagacggctatcccggtagcggctggtgagggtctgggtcagctggttgttcaggtggaagcctagggggaggctgcttctgagcccagtggcccacagggaacccaccttggcattgcatccccaccccacctcctcagggaggacatgaatgccacagggtgtcacaccccaactctgccccatcccggcagggtgagtacaggctgatcccttcaatcctctgggcctgtttcctcatccatcaaacggactaagacagccccgaccccatagggtgtgtgaagacagaacgctcaggacagcgtctgacacgtgactcgatgtgtgggtactgttactccttaaatcctgtggggctttctccttgccagtgggcactggaggatatttctgtgcagcaaaaaatatagtcaatccca

SEQ ID NO: 150740 - DNA, 2102 bp, Artificial Sequence
  derived and/or modified sequence
gcggcggaatggtggactaccacgcggcgaaccagtcgtaccagtacggccccagcagcgcgggcaatggcgctggcggcgggggcagcatgggcgactacatggcccaggaggacgactgggaccgggacctgctgctggacccggcctgggagaagcagcagcgcaaggctgaaactgccgccaaccggatctgtaaggtgctggctgtcaaccaagagaacgagcacctgatggaggactacgagaagctggccagcgacctcctggagtggatccggcgcaccatcccctggctggaggaccgtgtgccccaaaagactatccaggagatgcagcagaagctggaggacttccgcgactaccggcgtgtgcacaagccgcccaaggtgcaggagaagtgccagctggagatcaacttcaacacgctgcagaccaagctgcgcctcagcaaccggcccgccttcatgccctccgagggcaagatggtctcggacatcaacaatggctggcagcacttggagcaggctgagaagggctacgaggagtggctgctgaatgagatccgcaggctggagcggctcgaccacctggcagagaagttccggcagaaggcctccatccacgaggcctggactgacgggaaggaagccatgctgaagcaccgggactacgagacggccacactatcggacatcaaagccctcattcgcaagcacgaggccttcgagagcgacctggctgcgcaccaggaccgcgtggagcagatcgccgccattgcccaggagctcaacgagctggattactacgactcccacaatgtcaacacccggtgccagaagatctgtgaccagtgggacgccctcggctctctgacacatagtcgcagggaagccctggagaaaacagagaagcagctggaggccatcgaccagctgcacctggaatacgccaagcgcgcggcccccttcaacaactggatggagagcgccatggaggacctccaggacatgttcatcgtccataccatcgaggagattgagggcctgatctcagcccatgaccagttcaagtccaccctgccggacgccgatagggagcgcgaggccatcctggccatccacaaggaggcccagaggatcgctgagagcaaccacatcaagctgtcgggcagcaacccctacaccaccgtcaccccgcaaatcatcaactccaagtgggagaaggtgcagcagctggtgccaaaacgggaccatgccctcctggaggagcagagcaagcagcagtccaacgagcacctgcgccgccagttcgccagccaggccaatgttgtggggccctggatccagaccaagatggaggagatcgggcgcatctccattgagatgaacgggaccctggaggaccagctgagccacctgaagcagtatgaacgcagcatcgtggactacaagcccaacctggacctgctggagcagcagcaccagctcatccaggaggccctcatcttcgacaacaagcacaccaactataccatggagcacatccgcgtgggctgggagcagctgctcaccaccattgcccgcaccatcaacgaggtggagaaccagatcctcacccgcgacgccaagggcatcagccaggagcagatgcaggagttccgggcgtccttcaaccacttcgacaaggatcatggcggggcgctggggcccgaggagttcaaggcctgcctcatcagcctgggctacgacgtggagaacgaccggcagggtgaggccgagttcaaccgcatcatgagcctggtcgaccccaaccatagcggccttgtgaccttccaagccttcatcgacttcatgtcgcgggagaccaccgacacggacacggctgaccaggtcatcgcttccttcaaggtcttagcaggggacaagaacttcatcacagctgaggagctgcggagagagctgccccccgaccaggccgagtactgcatcgcccgcatggcgccataccagggccctgacgccgtgcccggtgccctcgactacaagtccttctccacggccttgtatggcgagagcgacctgtgaggccccagagacctg

SEQ ID NO: 150741 - DNA, 1625 bp, Artificial Sequence
  derived and/or modified sequence
agaggggcgggagctgaggcgggagcggacaggctggtgggcgagcgagaggcggcggaatggtggactaccacgcggcgaaccagtcgtaccagtacggccccagcagcgcgggcaatggcgctggcggcgggggcagcatgggcgactacatggcccaggaggacgactgggaccgggacctgctgctggacccggcctgggagaagcagcagcgcaagaccttcacggcatggtgcaactcccacctgcggaaggcaggcacacagatcgagaacattgatgaggacttccgagacgggctcaagctcatgctgctcctggaggttcacgagctggattactacgactcccacaatgtcaacacccggtgccagaagatctgtgaccagtgggacgccctcggctctctgacacatagtcgcagggaagccctggagaaaacagagaagcagctggaggccatcgaccagctgcacctggaatacgccaagcgcgcggcccccttcaacaactggatggagagcgccatggaggacctccaggacatgttcatcgtccataccatcgaggagattgagggcctgatctcagcccatgaccagttcaagtccaccctgccggacgccgatagggagcgcgaggccatcctggccatccacaaggaggcccagaggatcgctgagagcaaccacatcaagctgtcgggcagcaacccctacaccaccgtcaccccgcaaatcatcaactccaagtgggagaaggtgcagcagctggtgccaaaacgggaccatgccctcctggaggagcagagcaagcagcagtccaacgagcacctgcgccgccagttcgccagccaggccaatgttgtggggccctggatccagaccaagatggaggagatcgggcgcatctccattgagatgaacgggaccctggaggaccagctgagccacctgaagcagtatgaacgcagcatcgtggactacaagcccaacctggacctgctggagcagcagcaccagctcatccaggaggccctcatcttcgacaacaagcacaccaactataccatggagcacatccgcgtgggctgggagcagctgctcaccaccattgcccgcaccatcaacgaggtggagaaccagatcctcacccgcgacgccaagggcatcagccaggagcagatgcaggagttccgggcgtccttcaaccacttcgacaaggatcatggcggggcgctggggcccgaggagttcaaggcctgcctcatcagcctgggctacgacgtggagaacgaccggcagggtgaggccgagttcaaccgcatcatgagcctggtcgaccccaaccatagcggccttgtgaccttccaagccttcatcgacttcatgtcgcgggagaccaccgacacggacacggctgaccaggtcatcgcttccttcaaggtcttagcaggggacaagaacttcatcacagctgaggagctgcggagagagctgccccccgaccaggccgagtactgcatcgcccgcatggcgccataccagggccctgacgccgtgcccggtgccctcgactacaagtccttctccacggccttgtatggcgagagcgacctgtga

SEQ ID NO: 150742 - DNA, 2171 bp, Artificial Sequence
  derived and/or modified sequence
agaggggcgggagctgaggcgggagcggacaggctggtgggcgagcgagaggcggcggaatggtggactaccacgcggcgaaccagtcgtaccagtacggccccagcagcgcgggcaatggcgctggcggcgggggcagcatgggcgactacatggcccaggaggacgactgggaccgggacctgctgctggacccggcctgggagaagcagcagcgcaagaccttcacggcatggtgcaactcccacctgcggaaggcaggcacacagatcgagaacattgatgaggacttccgagacgggctcaagctcatgctgctcctggaggtcatatcaggggagcggttacctaagccggagcgggggaagatgagagtgcacaaaatcaacaatgtgaacaaagcgctggactttattgccagcaaaggcgtcaagctggtctccatcggggcagaagagattgtggacggcaacgcaaagatgaccctgggaatgatctggaccatcatccttaggttcgccatccaggacatctccgtggaagagacctcggccaaggaagggctccttctctggtgccagagaaagacagccccgtataagaacgtcaatgtgcagaacttccacatcagctggaaggatggtcttgccttcaatgccctgatccaccggcacagaccagagctgattgagtatgacaagctgaggaaggacgaccctgtcaccaacctgaacaatgccttcgaagtggctgagaaatacctcgacatccccaagatgctggatgcagaggacatcgtgaacacggcccggcccgacgagaaggccataatgacctatgtgtccagcttctaccatgccttttcaggagcgcagaaggctgaaactgccgccaaccggatctgtaaggtgctggctgtcaaccaagagaacgagcacctgatggaggactacgagaagctggccagcgacctcctggagtggatccggcgcaccatcccctggctggaggaccgtgtgccccaaaagactatccaggagatgcagcagaagctggaggacttccgcgactaccggcgtgtgcacaagccgcccaaggtgcaggagaagtgccagctggagatcaacttcaacacgctgcagaccaagctgcgcctcagcaaccggcccgccttcatgccctccgagggcaagatggtctcggacatcaacaatggctggcagcacttggagcaggctgagaagggctacgaggagtggctgctgaatgagatccgcaggctggagcggctcgaccacctggcagagaagttccggcagaaggcctccatccacgaggcctggactgacgggaaggaagccatgctgaagcaccgggactacgagacggccacactatcggacatcaaagccctcattcgcaagcacgaggccttcgagagcgacctggctgcgcaccaggaccgcgtggagcagatcgccgccattgcccaggagctcaacgagctggattactacgactcccacaatgtcaacacccccgacggcctccaggaggggcctgggcagccccacagtcccattcctccactctgtatctatgcaaagcactctctgcagtcctccggggtgggtgggtgggcagggaggggctggggcaggctctctcctctctctctttgtgggttggccaggaggttcccccgaccaggttggggagacttggggccagcgcttctggtctggtaaatatgtatgatgtgttgtgcttttttaaccaaggaggggccagtggattcccacagcacaaccggtcccttccatgccctgggatgcctcaccacacccaggtctcttcctttgctctgaggtcccttcaaggcctccccaatccaggccaaagccccatgtgccttgtccaggaactgcctgggccatgcgaggggccagcagagggcgccaccaccacctgacggctggggacccacccagcccctctcccctctctgctccagactcacttgccattgccaggagatggccccaacaagcaccccgcttttgcagcagaggagctgagttggcagaccgggcccccctgaaccgcaccccatcccaccagccccggccttgctttgtctggcctcacgtgtctcagattttctaagaacc

SEQ ID NO: 150743 - DNA, 2736 bp, Artificial Sequence
  derived and/or modified sequence
atggtggactaccacgccgccaaccagagctaccagtacggccccagcagtgcgggcaatggcgctggggggggcggatcaatgggcgactatatggcacaggaggatgactgggacagggaccttctgctcgaccctgcctgggagaagcagcaaagaaagacttttaccgcttggtgcaactctcatctccgaaaggccggtacgcagattgagaacatcgacgaggactttcgggacggattgaagcttatgctcctactggaagtgataagcggcgaaagactgccaaagccagagcgagggaagatgagggttcataagatcaacaacgtcaataaagccctggactttatcgcctctaaaggggttaagttggtgagtataggagcagaagagatcgttgacggcaatgccaaaatgaccctaggaatgatctggaccataatactcagatttgccattcaggatatcagcgtcgaggaaacgtccgctaaggagggcctcttactgtggtgtcaaagaaagaccgccccttacaagaatgttaacgtacagaatttccatatcagttggaaagatggactcgcattcaatgccctaattcacaggcatagacctgaattgattgagtacgacaaacttaggaaggatgatcctgtgacaaacctaaacaacgccttcgaggtagctgagaaatatctggatatccctaaaatgcttgatgcagaagacatagtgaataccgcccgaccggatgaaaaagcaataatgacctacgtgtcctcattctaccacgccttttctggcgcgcagaaggccgaaaccgcagccaacaggatctgcaaagtgcttgctgtaaatcaggaaaatgagcacctcatggaggattacgagaagctggctagcgatctcctcgaatggatcagacgcacgatcccatggttggaagaccgtgtccctcaaaaaactattcaggaaatgcagcagaagttagaggactttagagactacaggcgtgtgcacaagcctccaaaagtccaggaaaagtgccagttagaaatcaatttcaacaccttgcagactaagctgagattaagcaatcggccagcctttatgccttctgagggcaagatggttagcgacattaacaatggctggcaacacctggagcaggcggaaaagggctatgaagagtggctgctaaacgagatacgcaggcttgagcgcctggatcatttggcagaaaagttccgccagaaagcctctatacacgaggcctggaccgacggcaaggaggccatgctgaagcatcgggactacgaaacagcgaccctgtcggatattaaggctctaatcagaaaacacgaggcttttgagagcgacctcgcggcccaccaggaccgagtcgaacagatcgcggccattgcccaggagttaaatgagcttgactactacgactctcacaacgtcaacacacgctgccagaaaatctgtgatcaatgggacgctctgggatcccttactcactcgcggcgagaggctctggaaaagaccgaaaagcagctcgaggcaatagaccagctccacctggagtacgccaaacgtgcagcaccatttaacaactggatggagagcgctatggaggatttacaggatatgttcatcgtgcatacaattgaagagatcgaagggctgatctctgcacacgatcaattcaagtcaaccctgcccgatgccgacagagagagagaagccatccttgcaatccacaaggaagcccagcgtatcgccgaatctaaccacattaaattatctggcagcaacccctataccactgtgacccctcaaattatcaacagtaagtgggagaaggttcagcagctggttccaaagcgcgaccatgccctcctcgaggaacagtcaaaacagcagagtaacgaacatttgcgacgtcaatttgccagccaagccaacgtcgtcggcccatggatccagacaaagatggaagagatcgggagaatttccattgagatgaatggtactctcgaggaccaactgagccacctgaagcagtacgagcggtccattgtggattacaagccaaatcttgacctcctggaacaacagcatcagcttatccaggaagccctgatctttgataacaaacataccaattataccatggaacatattcgggtgggctgggaacagttgctgaccactatcgcacgtaccattaatgaagtagagaatcagatacttacccgggatgccaagggcatatctcaggaacagatgcaggagtttcgggcaagctttaaccacttcgataaggaccatggaggcgcccttgggcccgaggagtttaaggcgtgtctgatcagcctgggttacgacgtggagaacgataggcagggagaggccgagtttaaccgaataatgtctttggtggatcctaatcacagcggcctcgtgacattccaggcattcatcgactttatgtctagggagacaacagacaccgacaccgcagatcaagtgatcgcaagcttcaaggtgctggccggggacaagaattttattactgctgaagagctacggcgggaactcccacctgaccaggccgagtactgcatcgcacggatggccccatatcaaggacctgacgcagtgcctggcgcattggattataaaagcttttcgaccgccctttacggggagtctgatctgtag

SEQ ID NO: 150744 - DNA, 2079 bp, Artificial Sequence
  derived and/or modified sequence
atggtggactaccacgccgccaaccagagctaccagtacggcccctctagcgccggtaatggagctgggggcgggggatccatgggggattatatggcacaggaagacgactgggatcgtgatcttcttctggacccagcatgggaaaagcagcagagaaaagccgagaccgcagccaacaggatttgcaaggtgttggcagtgaatcaggaaaatgagcacctcatggaagactatgagaaactggcctcagacttactcgagtggatcagaagaactatcccttggttggaggaccgcgtgcctcagaagacaatacaggaaatgcagcagaagctcgaggattttagggactatcgtcgcgtacacaagccacccaaggtgcaggagaaatgtcagctggagatcaacttcaataccctacagaccaagctcaggctctcaaaccgccccgccttcatgccctcggaaggaaaaatggttagcgatataaacaatggttggcagcacttggaacaggcagagaaggggtacgaagagtggctgttgaatgagatcagaaggctggaacggctcgaccacctggctgagaagttccggcagaaagcctccatccacgaggcctggactgacggcaaagaggccatgctaaaacacagagattacgaaaccgcaactctcagcgacataaaggccttgattcggaagcacgaggccttcgagtccgaccttgcagcgcatcaggaccgggtggagcaaatcgcggccattgcgcaggagctcaatgaactagactactacgatagtcataatgtaaacacgcgctgccagaagatttgtgatcagtgggatgccctcgggagcttaacgcatagcagaagggaggccctggaaaagacggaaaaacagctagaagccattgaccaactccacctcgaatacgcaaaacgcgccgcaccatttaataactggatggagtccgcaatggaggatctgcaagatatgtttattgttcatacaatcgaggaaattgaaggccttattagcgcccacgaccagttcaaatccacattgccagatgctgatcgcgagcgcgaagctatccttgccatccacaaggaagcccagcggatcgctgagtccaatcacatcaagttgagtggctccaatccttatacaaccgtaacccctcaaattattaactcaaaatgggagaaggtccaacaactggtgccgaaacgtgaccatgctttattagaggaacaaagtaagcagcagagtaacgagcatcttcggaggcaatttgctagccaggccaacgtggtgggcccatggattcagacaaagatggaggagattggccgcatcagcattgagatgaatgggacacttgaggaccagctgtcacacctgaaacaatatgaacgatcaattgtggactacaaacccaacctggacttgctggagcagcagcaccagctcatccaggaggcccttatcttcgataacaagcatacaaactacacaatggaacacattcgggttggttgggagcagctactgaccaccattgctcggactatcaacgaagtagaaaaccagatactgactagggatgccaagggcattagccaggagcagatgcaggaattccgggctagtttcaatcactttgacaaagatcacgggggagcattagggcccgaagaatttaaggcctgtcttatttctctgggatacgacgtggaaaatgacaggcagggggaggcggagttcaaccgcattatgagccttgtggatccgaaccacagcgggttggttaccttccaagctttcatcgattttatgtcgcgagaaacaaccgatactgacaccgctgatcaggtcatcgccagcttcaaggtactggcaggcgataaaaatttcataaccgcagaggagctgagacgcgagctgcctcccgaccaagccgagtattgtatagctcgtatggctccttaccagggccccgacgctgtacccggagcactcgactataaaagcttcagcacagccctgtacggcgaaagcgacctttag

SEQ ID NO: 150745 - DNA, 1566 bp, Artificial Sequence
  derived and/or modified sequence
atggtggactaccacgccgccaaccagagctaccagtacggccccagcagtgccggaaacggggcaggaggaggggggtccatgggggactacatggctcaagaagacgactgggatagagatctgctgctggatccagcctgggagaaacagcaacggaagacgttcactgcctggtgtaattcacatctgcgaaaggctgggactcagatcgagaatattgacgaggatttccgagacggtctgaagttgatgctcctgttagaggtgcacgagttggattattacgattctcacaatgttaacacacgttgtcaaaaaatctgcgaccaatgggatgcactggggtctttgacacattcccgcagggaagctctcgaaaaaaccgagaaacagttggaggctatcgatcagctgcacctggagtatgctaaaagagctgctccatttaacaactggatggaaagcgccatggaagacttgcaagacatgtttatcgttcataccatcgaggagatcgaaggtctaatcagtgcccatgaccagttcaagtccactctgcccgatgccgatcgtgagcgtgaggccatcctggccatccacaaggaggcgcagcggatcgccgagtcaaatcacatcaagctctccgggtccaatccgtataccactgtaacaccacagattatcaattctaaatgggagaaggtacagcagttggtaccgaaaagggaccacgccctgctggaagagcagtcgaagcagcagagcaacgagcacttaaggcgccagtttgcctcgcaggccaatgtagtggggccctggattcaaaccaagatggaggagattggtcggatttctatcgaaatgaacggcaccctggaggaccaactgtcccatctaaagcagtacgagcgttctattgtggattacaagccgaacctagatttactggagcaacagcaccagctgattcaggaggcccttatctttgacaataaacataccaactacacgatggagcatattcgggttggctgggagcagctactgactactatcgccaggacaattaacgaagtcgagaaccaaatcctgacgcgagatgcgaaaggaatctcccaggaacagatgcaagaatttcgcgctagctttaaccattttgataaagaccatggaggcgctctcggacccgaggaattcaaagcatgtctgatctctctgggttatgacgtggaaaatgacagacagggagaggcagaatttaatagaatcatgagtctggtggacccgaaccatagcggtctggtgacatttcaggcctttatagactttatgagccgagaaacaactgacacggataccgctgaccaggtcatcgctagctttaaagttctggctggggataagaacttcataaccgctgaggaactgcgcagagagctcccgcccgaccaggctgaatattgcattgcccgaatggccccatatcagggcccagacgcagttcccggggcccttgactataagagcttttctaccgcactatacggagaatcagacctatag

SEQ ID NO: 150746 - DNA, 1689 bp, Artificial Sequence
  derived and/or modified sequence
atggtggactaccacgccgccaaccagagctaccagtacggccccagctcagccggtaacggggcaggcggcgggggctccatgggggattacatggcccaggaagacgactgggatcgggacctgctcctggatcccgcatgggagaaacagcagagaaagacttttacggcctggtgcaactcgcacctgcggaaagcgggaacgcagatcgagaacattgatgaagactttcgggacggtttgaagcttatgctcttgcttgaggtgattagcggggaaagactccctaagccagagcgggggaagatgagggtgcacaagataaacaacgtgaacaaggctctggactttatagcaagtaagggcgtcaaactggtgagtattggggctgaggagattgtggatggaaacgccaagatgactctgggcatgatctggacaataattctgcgcttcgcaatccaggatattagtgttgaagagacttccgctaaggaagggctgctgctatggtgccagcggaaaacagccccctacaagaatgtcaacgtgcagaatttccacatctcgtggaaggacgggctggcatttaatgccttaatccatagacaccggcccgagcttattgagtacgacaaactgcggaaggatgatcccgttacaaacctgaacaacgcgttcgaggtggctgaaaagtacctggacatacctaaaatgctggatgctgaagacattgtcaacacggcacgccctgacgagaaggcaataatgacgtatgtatcaagcttctaccatgcatttagcggcgcacaaaaggccgagacagctgctaatcggatctgtaaagttctggctgtcaaccaagaaaacgagcacctcatggaggactacgagaaattagcctctgatctgctggagtggatcagaagaacaataccctggctggaggaccgggtgccccagaaaacaatacaggaaatgcaacagaaactggaagatttccgtgactataggagggttcataagccacctaaggtgcaggagaagtgccaactagagattaactttaacactctgcagaccaaattaaggttaagcaacaggccagccttcatgccatcggagggcaagatggtctctgatatcaataatggctggcaacacttggagcaggccgaaaaaggttatgaggaatggttgctgaacgaaataaggcggctggaacggctagatcacctggctgagaagttccgccaaaaggccagcattcacgaagcctggacagacgggaaggaagctatgctgaagcatcgggactatgagaccgccacattatctgacattaaggccctaattcggaagcacgaggcatttgagagcgacctcgctgctcaccaagatcgcgtagagcaaattgcagccatagcccaggaactgaatgagctggactactacgattcccacaatgtcaatactcccgatggactgcaggaaggtcctggccaaccccatagtccaatcccacccctatgtatatacgcgaagcacagtcttcagagcagcggtgtaggtggatgggccggcagaggatggggacggctttcacctttatcactgtgcggacttgcccgacgattccctagaccaggctggggggatctcggccccgcattgcttgtttggtag

SEQ ID NO: 150747 - DNA, 2736 bp, Artificial Sequence
  derived and/or modified sequence
atggtggactatcatgctgccaaccaaagctaccagtacggaccaagctcagccggaaatggtgcaggaggaggagggtccatgggcgactacatggctcaagaggatgattgggaccgggatctgctcctagatcctgcctgggaaaaacagcagcgcaagacctttaccgcctggtgcaatagccatttgagaaaagccggaacccaaatcgaaaatatcgatgaggattttcgcgacggactgaagctgatgttgctcctggaagtgatatcaggagaacgcctaccaaaaccagaaagaggaaaaatgcgcgttcataaaattaataatgtcaacaaggctctcgacttcatcgctagcaagggtgtgaaactggtttctatcggagcggaagaaatcgtggacggcaacgccaaaatgacacttggaatgatctggaccataatactccggttcgccattcaagacatttccgtcgaagagacaagcgccaaagaggggctcctcttgtggtgtcagcgcaagacggccccttacaaaaatgttaacgtgcagaactttcatataagttggaaagacggcttggcattcaacgcactcatccacaggcatagacccgagctcattgaatacgacaaactgcgaaaggacgaccctgtcacgaacctaaacaatgcttttgaggtggccgagaaatatctggacatcccaaagatgttagatgcagaagacatcgtgaatacggccagacctgatgagaaggccatcatgacttacgtctcatccttctatcacgcgttctcaggagcccagaaggctgagactgctgcaaaccgcatctgcaaggtgctggctgtgaaccaggaaaatgagcacctgatggaggattacgagaagctagccagtgatctcctggaatggattcgacgtacaataccatggctcgaggacagggtcccgcagaagactatccaggagatgcagcagaagctggaagattttcgcgactatcgcagggtccacaaacctccgaaagtacaggaaaagtgccagctggaaatcaacttcaacacactgcagacgaaacttcgcctgtccaatagacctgcattcatgccatcggagggaaagatggtctccgatattaacaatggttggcagcatttggagcaagccgagaaaggatatgaggagtggctgctaaatgagatccggcgactggaaagactggaccatctggcagagaaattccggcaaaaagcatccatacacgaggcatggaccgacggtaaagaggccatgctcaaacatcgagattatgaaacagcgaccttgtctgacataaaggcattgatccgtaagcatgaagcctttgaatccgatctcgcagcacaccaggatagggttgaacagatagccgcaatcgctcaggagttgaacgaacttgactattacgacagccacaacgtgaataccagatgccagaagatttgtgatcagtgggatgctctcggttctctgacccatagtaggcgcgaagccctggaaaagaccgagaagcagctggaagctatagatcagctgcacctggagtacgctaaaagagccgctcctttcaataactggatggaaagcgccatggaagacctgcaggacatgttcattgtgcacactattgaggagatcgaaggcctgatttctgcgcacgatcagtttaagtcgaccctacctgatgccgacagggaacgggaagctatcctggccattcataaagaggcccaacggatcgctgagagcaaccacatcaagctgagcggttccaacccctatacaaccgtaacgccccagattataaacagtaagtgggaaaaggtgcagcaactggtgcccaaaagagatcacgctctcctagaggagcaatctaaacaacagtctaacgaacatctcaggcgccagttcgccagtcaggctaatgtcgtgggtccctggatccagacaaagatggaagagattggacgaatcagcattgaaatgaacggcaccttggaggatcagctttcccacctcaaacagtacgagagaagtatcgtggattacaagccaaacctcgacctcctcgagcagcagcatcagttgatacaggaagccctgatttttgacaacaagcacacaaactacaccatggagcacatacgtgtaggttgggagcagctgctgactaccatcgctaggaccattaatgaggtggagaatcagatcctcacaagagatgcaaaaggtatcagccaggagcagatgcaggagtttagagcttcatttaatcatttcgacaaagaccatggcggagctctcggcccagaggagtttaaagcttgtttgatttcccttgggtacgatgttgaaaatgatagacagggagaggccgaattcaacaggataatgtctctcgtggaccctaaccactcaggattggttaccttccaagcttttatcgacttcatgtctcgagaaactactgacacagacacagccgaccaagtgatagcctcctttaaggtgttggcaggcgataaaaatttcattacagctgaggagcttcgcagggaattgccaccggatcaggccgaatactgtattgccaggatggcaccttaccagggcccagacgctgtgcctggcgcactggactataagtctttttcaacggcactctatggtgaaagtgatctctag

SEQ ID NO: 150748 - DNA, 2079 bp, Artificial Sequence
  derived and/or modified sequence
atggtcgattaccacgcagcgaaccagtcgtatcagtatggccctagctcggctggcaatggtgcaggcggtggaggctctatgggcgactatatggcacaggaagatgactgggaccgcgacctccttttagacccggcttgggagaagcagcagcgcaaggcagagaccgctgctaatcggatctgcaaagtgctagccgtcaatcaggagaatgaacacctcatggaagattacgagaagctcgcctccgacctgttggagtggatccgccgaaccatcccctggcttgaggaccgggtgcctcagaagactatccaagaaatgcagcaaaagctggaggatttccgggactacaggagggtgcacaagcctcctaaggtgcaggagaagtgccagctagagatcaatttcaatactttgcaaacaaagcttcgtctttcgaataggcctgcatttatgccgtctgaaggaaagatggtatccgatattaataatggatggcagcatctagaacaagcagagaaggggtatgaagagtggttgctcaatgagatcaggcgccttgagcgactcgaccatctggccgaaaagtttcgacagaaagcatctattcatgaggcttggacggacggcaaggaggcgatgctgaagcatcgggactacgagacagcaactctgtccgacataaaggccctgatccggaagcacgaggcattcgagagcgacctcgcagctcaccaggacagagtggagcagattgctgcaattgcccaggagctgaacgaactcgattactacgacagccataatgtcaacacccgctgtcagaagatatgcgatcaatgggacgcactgggatctctgactcacagtcgcagagaggccctggaaaagactgagaagcaactcgaagcgattgatcagcttcatctcgaatacgccaagagggccgcacctttcaataattggatggaatccgctatggaagaccttcaggacatgtttattgtgcacactatagaggagatagaggggctcatctccgcacacgatcagtttaaatctacattacccgatgccgatcgggaacgggaagccattctggctatacacaaagaggcgcagcggattgccgagagtaaccatatcaagttatctgggtccaacccatataccacagtgacccctcagattatcaattcaaagtgggagaaagtgcagcagctagtgccaaaacgcgatcatgccctgttagaggagcaatcaaagcagcagagcaacgagcacctccggcgacagttcgcctctcaagcaaacgtcgtggggccttggatacagaccaagatggaagaaatagggaggatttccattgaaatgaatgggacactcgaggaccagttgagtcacttgaagcagtacgaacgctccatagtcgactacaagccgaatctggacctgctggagcagcagcatcagctgatccaggaggcccttatcttcgacaacaagcacacaaattacacaatggagcacattcgcgtgggctgggagcagctgctgaccacaatcgcacgtaccatcaatgaggtggaaaatcaaatcttgacaagagatgcaaagggaataagccaagagcaaatgcaggagtttagggcatcctttaaccactttgacaaggaccatggcggagccctgggtcccgaggagttcaaagcatgcctcatctcgctgggttatgatgtggagaacgacaggcagggtgaggccgaattcaaccggattatgagccttgtagaccccaatcattccggcttggtgacgtttcaggcatttatcgactttatgagcagagagaccacggataccgataccgcagatcaggttatcgcatcattcaaggtgctagcaggagataaaaatttcatcaccgctgaggaactcaggcgagaactgccgccagaccaggccgaatattgtatcgccaggatggccccttaccaaggccctgacgcagtgcccggtgcccttgactacaaatccttctccaccgccctgtatggggagagcgatttgtag

SEQ ID NO: 150749 - DNA, 1566 bp, Artificial Sequence
  derived and/or modified sequence
atggtcgactatcacgccgcaaaccaatcctaccagtacggaccatccagcgccggtaatggggcaggtggcggtgggagtatgggtgactatatggctcaagaggacgactgggaccgcgacttgcttcttgatcctgcctgggaaaagcaacagcgtaaaacctttaccgcctggtgcaactcgcacctgagaaaggccggtactcagattgaaaatattgatgaagacttcagagatggtctgaagctgatgctgcttctcgaggtgcatgaattggactattatgactcacacaacgtgaacacccgctgtcagaagatctgcgatcagtgggacgctctgggaagcttgacacacagccgccgagaggcccttgagaaaacggagaagcagctcgaagccatcgatcaactccatttggagtacgccaagcgggctgcccctttcaacaactggatggaatcggctatggaagatctgcaagatatgttcattgttcacacaatcgaagagatcgagggcttgatctcagcacacgaccagttcaaatccactcttccagacgcagatcgcgagcgtgaagccatcctagccattcacaaggaagcacagcgcatagccgagtccaaccatatcaagctgagcggaagcaatccttataccaccgtgaccccccagatcatcaatagcaagtgggaaaaggttcagcagctggttcccaagcgggatcacgctttgctggaagagcaatcaaagcaacagagcaatgagcacctcagacggcaatttgcctcacaagcaaatgtggtcgggccatggattcaaaccaagatggaggagatcggtaggatctcaattgaaatgaacgggaccttggaggaccagttatcacatctcaaacaatacgagcgaagcatcgttgattacaagccaaatctggacctgcttgaacagcagcatcagcttattcaggaggctttgatcttcgacaataagcacactaactacaccatggagcatatacgcgtgggatgggagcagctactgactaccattgcgcgaaccatcaacgaagtcgagaatcagatcctcacccgcgatgctaagggaatatcgcaggaacagatgcaagagtttagggcttcgttcaatcatttcgataaagatcacggcggtgcactggggccagaggagttcaaggcttgtctgatttcgctaggctatgacgtggagaacgacagacagggggaggctgagtttaatagaattatgtcgctagtagaccctaatcacagtgggcttgtcacctttcaggcgttcattgacttcatgagccgagagactacagatacggatacagcggaccaggttatcgcaagcttcaaggttttagccggagataagaacttcatcacggccgaggaactgagaagagagcttccacccgatcaggcggagtattgtatcgctcgcatggctccataccaggggcctgatgcagttcctggagccctcgactacaagagcttctccaccgcgctgtacggagaaagcgatctgtag

SEQ ID NO: 150750 - DNA, 1689 bp, Artificial Sequence
  derived and/or modified sequence
atggtcgactaccacgcggcaaatcagtcctaccagtatggtcccagctctgcaggcaacggtgctggtggaggtggatcaatgggggactatatggctcaggaagacgactgggatcgggacctgttgctagacccagcctgggagaagcagcagcggaaaacatttactgcctggtgcaacagtcaccttcgaaaagccggtactcagatcgagaacatcgacgaggactttagggatggtttaaagcttatgttacttctggaggtaatatctggcgaaaggttacctaagccggagcggggaaaaatgcgagttcacaaaatcaataatgtgaataaagccctggactttatcgcttccaaaggagtgaaactcgtatccataggcgctgaagagatcgtggacggcaacgccaagatgacacttgggatgatttggactattatacttcgatttgccatacaggatattagcgtggaggagacctcagcaaaagagggactactactctggtgccagcgcaagactgcaccttacaagaacgtgaacgtgcaaaacttccatatcagctggaaagacggcctggccttcaacgccctgattcatcgccaccgccctgagctgatagaatatgacaaactgaggaaagacgatcctgtgacaaacctcaacaatgcctttgaagtggctgaaaaatacttggacatccccaagatgctcgatgccgaagatatcgtgaatacagctcggcctgatgagaaggccatcatgacatatgtcagctctttttaccacgcattttctggagctcagaaggctgaaaccgccgcaaataggatctgtaaggtcctggccgtcaatcaggagaacgagcacctgatggaagactatgagaaactggcctctgatctcttagagtggataagacggaccataccctggctggaggatcgcgttccccagaaaaccatccaagagatgcagcagaagctggaggattttcgcgactaccgtagggtgcataaaccaccaaaggtgcaggaaaagtgccaactagagatcaactttaatacgcttcagactaaactgagactgtcaaacaggcctgcgttcatgccgtctgagggcaagatggtctccgacatcaacaacggctggcagcatctggaacaagccgaaaaggggtacgaggagtggctgctgaatgaaattagaaggctggaaagactggatcacctcgccgagaaattccggcagaaggcctcaatccacgaagcgtggacagatggcaaggaggccatgttgaagcaccgggactacgaaacagccacattgagcgacatcaaagccctgatcagaaagcatgaggcatttgagtccgatctcgcagcccaccaagatagagttgaacagattgcggctatcgcgcaagagctcaacgaattagactattatgattcccacaatgtcaacaccccagatggtctccaagaaggccctggtcaaccccactctcccatacctcccctgtgtatttacgctaaacatagcttgcagtcttctggggtcggaggatgggcgggacggggatggggaaggctgagcccgctgtcactgtgcggactggctcgcaggtttcccaggcccggatggggtgacttgggccctgctctcctcgtgtggtag

SEQ ID NO: 150751 - DNA, 2736 bp, Artificial Sequence
  derived and/or modified sequence
atggtggactaccacgccgccaaccagagctaccagtacggccccagcagcgccggcaacggcgccggcggcggcggcagcatgggcgactacatggcccaggaggacgactgggacagagacctgctgctggaccccgcctgggagaagcagcagagaaagaccttcaccgcctggtgcaacagccacctgagaaaggccggcacccagatcgagaacatcgacgaggacttcagagacggcctgaagctgatgctgctgctggaggtgatcagcggcgagagactgcccaagcccgagagaggcaagatgagagtgcacaagatcaacaacgtgaacaaggccctggacttcatcgccagcaagggcgtgaagctggtgagcatcggcgccgaggagatcgtggacggcaacgccaagatgaccctgggcatgatctggaccatcatcctgagattcgccatccaggacatcagcgtggaggagaccagcgccaaggagggcctgctgctgtggtgccagagaaagaccgccccctacaagaacgtgaacgtgcagaacttccacatcagctggaaggacggcctggccttcaacgccctgatccacagacacagacccgagctgatcgagtacgacaagctgagaaaggacgaccccgtgaccaacctgaacaacgccttcgaggtggccgagaagtacctggacatccccaagatgctggacgccgaggacatcgtgaacaccgccagacccgacgagaaggccatcatgacctacgtgagcagcttctaccacgccttcagcggcgcccagaaggccgagaccgccgccaacagaatctgcaaggtgctggccgtgaaccaggagaacgagcacctgatggaggactacgagaagctggccagcgacctgctggagtggatcagaagaaccatcccctggctggaggacagagtgccccagaagaccatccaggagatgcagcagaagctggaggacttcagagactacagaagagtgcacaagccccccaaggtgcaggagaagtgccagctggagatcaacttcaacaccctgcagaccaagctgagactgagcaacagacccgccttcatgcccagcgagggcaagatggtgagcgacatcaacaacggctggcagcacctggagcaggccgagaagggctacgaggagtggctgctgaacgagatcagaagactggagagactggaccacctggccgagaagttcagacagaaggccagcatccacgaggcctggaccgacggcaaggaggccatgctgaagcacagagactacgagaccgccaccctgagcgacatcaaggccctgatcagaaagcacgaggccttcgagagcgacctggccgcccaccaggacagagtggagcagatcgccgccatcgcccaggagctgaacgagctggactactacgacagccacaacgtgaacaccagatgccagaagatctgcgaccagtgggacgccctgggcagcctgacccacagcagaagagaggccctggagaagaccgagaagcagctggaggccatcgaccagctgcacctggagtacgccaagagagccgcccccttcaacaactggatggagagcgccatggaggacctgcaggacatgttcatcgtgcacaccatcgaggagatcgagggcctgatcagcgcccacgaccagttcaagagcaccctgcccgacgccgacagagagagagaggccatcctggccatccacaaggaggcccagagaatcgccgagagcaaccacatcaagctgagcggcagcaacccctacaccaccgtgaccccccagatcatcaacagcaagtgggagaaggtgcagcagctggtgcccaagagagaccacgccctgctggaggagcagagcaagcagcagagcaacgagcacctgagaagacagttcgccagccaggccaacgtggtgggcccctggatccagaccaagatggaggagatcggcagaatcagcatcgagatgaacggcaccctggaggaccagctgagccacctgaagcagtacgagagaagcatcgtggactacaagcccaacctggacctgctggagcagcagcaccagctgatccaggaggccctgatcttcgacaacaagcacaccaactacaccatggagcacatcagagtgggctgggagcagctgctgaccaccatcgccagaaccatcaacgaggtggagaaccagatcctgaccagagacgccaagggcatcagccaggagcagatgcaggagttcagagccagcttcaaccacttcgacaaggaccacggcggcgccctgggccccgaggagttcaaggcctgcctgatcagcctgggctacgacgtggagaacgacagacagggcgaggccgagttcaacagaatcatgagcctggtggaccccaaccacagcggcctggtgaccttccaggccttcatcgacttcatgagcagagagaccaccgacaccgacaccgccgaccaggtgatcgccagcttcaaggtgctggccggcgacaagaacttcatcaccgccgaggagctgagaagagagctgccccccgaccaggccgagtactgcatcgccagaatggccccctaccagggccccgacgccgtgcccggcgccctggactacaagagcttcagcaccgccctgtacggcgagagcgacctgtag

SEQ ID NO: 150752 - DNA, 2079 bp, Artificial Sequence
  derived and/or modified sequence
atggtggactaccacgccgccaaccagagctaccagtacggccccagcagcgccggcaacggcgccggcggcggcggcagcatgggcgactacatggcccaggaggacgactgggacagagacctgctgctggaccccgcctgggagaagcagcagagaaaggccgagaccgccgccaacagaatctgcaaggtgctggccgtgaaccaggagaacgagcacctgatggaggactacgagaagctggccagcgacctgctggagtggatcagaagaaccatcccctggctggaggacagagtgccccagaagaccatccaggagatgcagcagaagctggaggacttcagagactacagaagagtgcacaagccccccaaggtgcaggagaagtgccagctggagatcaacttcaacaccctgcagaccaagctgagactgagcaacagacccgccttcatgcccagcgagggcaagatggtgagcgacatcaacaacggctggcagcacctggagcaggccgagaagggctacgaggagtggctgctgaacgagatcagaagactggagagactggaccacctggccgagaagttcagacagaaggccagcatccacgaggcctggaccgacggcaaggaggccatgctgaagcacagagactacgagaccgccaccctgagcgacatcaaggccctgatcagaaagcacgaggccttcgagagcgacctggccgcccaccaggacagagtggagcagatcgccgccatcgcccaggagctgaacgagctggactactacgacagccacaacgtgaacaccagatgccagaagatctgcgaccagtgggacgccctgggcagcctgacccacagcagaagagaggccctggagaagaccgagaagcagctggaggccatcgaccagctgcacctggagtacgccaagagagccgcccccttcaacaactggatggagagcgccatggaggacctgcaggacatgttcatcgtgcacaccatcgaggagatcgagggcctgatcagcgcccacgaccagttcaagagcaccctgcccgacgccgacagagagagagaggccatcctggccatccacaaggaggcccagagaatcgccgagagcaaccacatcaagctgagcggcagcaacccctacaccaccgtgaccccccagatcatcaacagcaagtgggagaaggtgcagcagctggtgcccaagagagaccacgccctgctggaggagcagagcaagcagcagagcaacgagcacctgagaagacagttcgccagccaggccaacgtggtgggcccctggatccagaccaagatggaggagatcggcagaatcagcatcgagatgaacggcaccctggaggaccagctgagccacctgaagcagtacgagagaagcatcgtggactacaagcccaacctggacctgctggagcagcagcaccagctgatccaggaggccctgatcttcgacaacaagcacaccaactacaccatggagcacatcagagtgggctgggagcagctgctgaccaccatcgccagaaccatcaacgaggtggagaaccagatcctgaccagagacgccaagggcatcagccaggagcagatgcaggagttcagagccagcttcaaccacttcgacaaggaccacggcggcgccctgggccccgaggagttcaaggcctgcctgatcagcctgggctacgacgtggagaacgacagacagggcgaggccgagttcaacagaatcatgagcctggtggaccccaaccacagcggcctggtgaccttccaggccttcatcgacttcatgagcagagagaccaccgacaccgacaccgccgaccaggtgatcgccagcttcaaggtgctggccggcgacaagaacttcatcaccgccgaggagctgagaagagagctgccccccgaccaggccgagtactgcatcgccagaatggccccctaccagggccccgacgccgtgcccggcgccctggactacaagagcttcagcaccgccctgtacggcgagagcgacctgtag

SEQ ID NO: 150753 - DNA, 1566 bp, Artificial Sequence
  derived and/or modified sequence
atggtggactaccacgccgccaaccagagctaccagtacggccccagcagcgccggcaacggcgccggcggcggcggcagcatgggcgactacatggcccaggaggacgactgggacagagacctgctgctggaccccgcctgggagaagcagcagagaaagaccttcaccgcctggtgcaacagccacctgagaaaggccggcacccagatcgagaacatcgacgaggacttcagagacggcctgaagctgatgctgctgctggaggtgcacgagctggactactacgacagccacaacgtgaacaccagatgccagaagatctgcgaccagtgggacgccctgggcagcctgacccacagcagaagagaggccctggagaagaccgagaagcagctggaggccatcgaccagctgcacctggagtacgccaagagagccgcccccttcaacaactggatggagagcgccatggaggacctgcaggacatgttcatcgtgcacaccatcgaggagatcgagggcctgatcagcgcccacgaccagttcaagagcaccctgcccgacgccgacagagagagagaggccatcctggccatccacaaggaggcccagagaatcgccgagagcaaccacatcaagctgagcggcagcaacccctacaccaccgtgaccccccagatcatcaacagcaagtgggagaaggtgcagcagctggtgcccaagagagaccacgccctgctggaggagcagagcaagcagcagagcaacgagcacctgagaagacagttcgccagccaggccaacgtggtgggcccctggatccagaccaagatggaggagatcggcagaatcagcatcgagatgaacggcaccctggaggaccagctgagccacctgaagcagtacgagagaagcatcgtggactacaagcccaacctggacctgctggagcagcagcaccagctgatccaggaggccctgatcttcgacaacaagcacaccaactacaccatggagcacatcagagtgggctgggagcagctgctgaccaccatcgccagaaccatcaacgaggtggagaaccagatcctgaccagagacgccaagggcatcagccaggagcagatgcaggagttcagagccagcttcaaccacttcgacaaggaccacggcggcgccctgggccccgaggagttcaaggcctgcctgatcagcctgggctacgacgtggagaacgacagacagggcgaggccgagttcaacagaatcatgagcctggtggaccccaaccacagcggcctggtgaccttccaggccttcatcgacttcatgagcagagagaccaccgacaccgacaccgccgaccaggtgatcgccagcttcaaggtgctggccggcgacaagaacttcatcaccgccgaggagctgagaagagagctgccccccgaccaggccgagtactgcatcgccagaatggccccctaccagggccccgacgccgtgcccggcgccctggactacaagagcttcagcaccgccctgtacggcgagagcgacctgtag

SEQ ID NO: 150754 - DNA, 1689 bp, Artificial Sequence
  derived and/or modified sequence
atggtggactaccacgccgccaaccagagctaccagtacggccccagcagcgccggcaacggcgccggcggcggcggcagcatgggcgactacatggcccaggaggacgactgggacagagacctgctgctggaccccgcctgggagaagcagcagagaaagaccttcaccgcctggtgcaacagccacctgagaaaggccggcacccagatcgagaacatcgacgaggacttcagagacggcctgaagctgatgctgctgctggaggtgatcagcggcgagagactgcccaagcccgagagaggcaagatgagagtgcacaagatcaacaacgtgaacaaggccctggacttcatcgccagcaagggcgtgaagctggtgagcatcggcgccgaggagatcgtggacggcaacgccaagatgaccctgggcatgatctggaccatcatcctgagattcgccatccaggacatcagcgtggaggagaccagcgccaaggagggcctgctgctgtggtgccagagaaagaccgccccctacaagaacgtgaacgtgcagaacttccacatcagctggaaggacggcctggccttcaacgccctgatccacagacacagacccgagctgatcgagtacgacaagctgagaaaggacgaccccgtgaccaacctgaacaacgccttcgaggtggccgagaagtacctggacatccccaagatgctggacgccgaggacatcgtgaacaccgccagacccgacgagaaggccatcatgacctacgtgagcagcttctaccacgccttcagcggcgcccagaaggccgagaccgccgccaacagaatctgcaaggtgctggccgtgaaccaggagaacgagcacctgatggaggactacgagaagctggccagcgacctgctggagtggatcagaagaaccatcccctggctggaggacagagtgccccagaagaccatccaggagatgcagcagaagctggaggacttcagagactacagaagagtgcacaagccccccaaggtgcaggagaagtgccagctggagatcaacttcaacaccctgcagaccaagctgagactgagcaacagacccgccttcatgcccagcgagggcaagatggtgagcgacatcaacaacggctggcagcacctggagcaggccgagaagggctacgaggagtggctgctgaacgagatcagaagactggagagactggaccacctggccgagaagttcagacagaaggccagcatccacgaggcctggaccgacggcaaggaggccatgctgaagcacagagactacgagaccgccaccctgagcgacatcaaggccctgatcagaaagcacgaggccttcgagagcgacctggccgcccaccaggacagagtggagcagatcgccgccatcgcccaggagctgaacgagctggactactacgacagccacaacgtgaacacccccgacggcctgcaggagggccccggccagccccacagccccatcccccccctgtgcatctacgccaagcacagcctgcagagcagcggcgtgggcggctgggccggcagaggctggggcagactgagccccctgagcctgtgcggcctggccagaagattccccagacccggctggggcgacctgggccccgccctgctggtgtggtag

SEQ ID NO: 150755 - protein, 292 aa, Artificial Sequence
  derived and/or modified sequence
MGRQKELVSRCGEMLHIRYRLLRQALAECLGTLILVMFGCGSVAQVVLSRGTHGGFLTINLAFGFAVTLGILIAGQVSGAHLNPAVTFAMCFLAREPWIKLPIYTLAQTLGAFLGAGIVFGLYYDAIWHFADNQLFVSGPNGTAGIFATYPSGHLDMINGFFDQFIGTASLIVCVLAIVDPYNNPVPRGLEAFTVGLVVLVIGTSMGFNSGYAVNPARDFGPRLFTALAGWGSAVFTTGQHWWWVPIVSPLLGSIAGVFVYQLMIGCHLEQPPPSNEEENVKLAHVKHKEQI

SEQ ID NO: 150756 - DNA, 879 bp, Artificial Sequence
  derived and/or modified sequence
atggggaggcaaaaagagctggtctccaggtgcggagagatgcttcacattaggtatagattgttacgccaggcattggccgagtgtctgggcacacttatcctcgtgatgttcggatgcggttccgtggctcaggtagtattgtcccggggcacgcatgggggatttttgactattaaccttgcctttggcttcgctgttaccctgggaatcctgattgcaggacaggtgagcggggcgcacctgaaccctgccgtcacttttgccatgtgctttctggccagggaaccgtggattaaactaccaatctacacacttgctcagacactgggtgctttcttgggcgccggaattgtcttcggcttgtattacgacgccatttggcactttgccgataatcaactctttgtttccggtcccaacggcactgccggcatttttgcaacatacccttccggccacctcgatatgatcaacggattttttgaccagtttattggcacagcaagccttattgtttgtgtactggcaattgtggatccatataacaaccccgtacctaggggcctcgaagcatttacggtgggtctggtcgtccttgtaattggcacctccatggggtttaactcagggtacgctgtgaatcccgctcgggatttcgggcctagattgtttacagcccttgccgggtggggttcagccgtctttacaactggtcaacactggtggtgggtgcccatagtgtctccactcctcggaagcatcgcgggcgtgttcgtatatcagctgatgatcggatgtcacttagaacagcctccaccttctaatgaggaggaaaatgttaagctcgcacatgtgaagcacaaggagcagatttag

SEQ ID NO: 150757 - DNA, 879 bp, Artificial Sequence
  derived and/or modified sequence
atgggccggcagaaggagctggtgagccgctgtggggagatgctgcacatccgctaccgcctgctgcggcaggccctggccgagtgcctgggcaccctcatcctggtgatgtttggctgcggctctgtggcccaggtggtgctgagccggggcacccatggaggcttcctgaccatcaacctggcctttggatttgctgtgaccctgggcatcctgattgctggccaggtgtctggggcccacctgaacccagctgtgacctttgccatgtgcttcctggcccgggagccctggatcaagctgcccatctacaccctggcccagaccctgggcgccttcctgggcgccggcatcgtgtttggcctgtactatgatgccatctggcactttgctgacaaccagctgtttgtgtctggccccaatggaacagctggcatctttgccacctaccccagcggccacctggacatgatcaatggcttctttgaccagttcatcggcacagccagcctcatcgtgtgtgtgctggccatcgtggacccctacaacaaccctgtgccccggggcctggaggccttcaccgtgggcctggtggtgctggtgattggcacctccatgggcttcaacagcggctatgctgtgaacccagcccgggactttggccccaggctcttcaccgccctggccggctggggcagcgctgtgttcaccaccggccagcactggtggtgggtgcccatcgtgagccccctgctgggcagcattgctggggtgtttgtgtaccagctgatgattggctgccacctggagcagcccccacccagcaatgaggaggagaatgtgaagctggcccacgtgaagcacaaggagcagatctag

SEQ ID NO: 150758 - DNA, 879 bp, Artificial Sequence
  derived and/or modified sequence
atgggccggcagaaggagctggtgagccggtgcggcgagatgctgcatattcggtataggctcttaagacaggcactggcggagtgccttggtactttaatcttggtgatgtttggctgtggctccgtggcacaagtggtactgtctcgcgggacccatggcggatttttgacaatcaatctggccttcggttttgcggtaactctcgggatcctcatcgcagggcaggtctccggagcgcaccttaaccccgcggttacgttcgcaatgtgtttccttgccagggagccttggatcaaactgcccatctataccctcgcccaaaccttaggcgcttttctcggcgcaggaatcgtgttcggtttatattacgatgcgatctggcacttcgccgataaccaattgtttgtctcaggtcccaatggaaccgcaggaatcttcgccacataccccagtggacacctggacatgattaacggattcttcgatcagttcatcggtactgcttctctcattgtgtgtgttctggctatcgtcgacccctataataacccggtcccaaggggtctggaggcttttaccgttgggttagtcgtccttgttatcgggaccagtatgggctttaactctggctacgctgtcaacccggcacgtgattttggcccccggttgtttacagcactggcgggttggggatctgctgttttcaccacaggacagcattggtggtgggtcccgattgtgtcaccactgctcggatcgatagcgggtgtgtttgtctaccagctaatgattggatgccatctggagcagcctccaccttctaacgaggaagagaacgtgaagctggcgcacgtaaagcataaggagcaaatttag

SEQ ID NO: 150759 - DNA, 879 bp, Artificial Sequence
  derived and/or modified sequence
atgggaagacagaaggaactggtctcccgctgcggcgagatgctccatattaggtaccgcctcctgaggcaggccttggcagagtgcctcggaacattgattctggtaatgtttggctgtgggtcagtagctcaggtggtactatccagaggaacgcatggtgggttcctcacgatcaatcttgcgttcggcttcgctgtgaccctcgggatcctcattgcaggacaggttagtggagctcatctgaaccccgctgtcacctttgccatgtgttttctggcgagggaaccgtggataaagctgcccatctatacgctggcccagacattgggagctttcttaggagcagggattgtctttggtctttattacgatgcgatttggcactttgcagataaccagttattcgtgtctggaccaaacgggaccgccggaatctttgcaacttacccttcggggcatctggacatgataaatggattttttgaccaattcatcggaactgccagtcttatcgtctgcgtcctggccatagtcgacccctataacaacccagtccctcgcggattggaagcttttacggtcggcttggtcgttttagtgatcggaacaagcatggggtttaactccgggtacgcagtcaatccagcacgggatttcgggcctaggttatttacagccctcgctggctggggcagcgccgtcttcactacaggtcagcactggtggtgggtgccaattgtctcacccctactaggcagtattgccggagtcttcgtgtatcagctgatgatcggatgccacttggagcaacccccaccatccaacgaagaagagaacgtgaagctggcccatgtaaagcacaaggaacaaatatag

SEQ ID NO: 150760 - DNA, 1849 bp, Artificial Sequence
  derived and/or modified sequence
ccagcgctggaggccgctgctcgctgcgccaccgcctcccgccacccctgcccgcccgacagcgccgccgcctgccccgccatgggtcgacagaaggagctggtgtcccgctgcggggagatgctccacatccgctaccggctgctccgacaggcgctggccgagtgcctggggaccctcatcctggtgatgtttggctgtggctccgtggcccaggttgtgctcagccggggcacccacggtggtttcctcaccatcaacctggcctttggctttgctgtcactctgggcatcctcatcgctggccaggtctctggggcccacctgaaccctgccgtgacctttgccatgtgcttcctggctcgtgagccctggatcaagctgcccatctacaccctggcacagacgctgggagccttcttgggtgctggaatagtttttgggctgtattatgatgcaatctggcacttcgccgacaaccagctttttgtttcgggccccaatggcacagccggcatctttgctacctacccctctggacacttggatatgatcaatggcttctttgaccagttcataggcacagcctcccttatcgtgtgtgtgctggccattgttgacccctacaacaaccccgtcccccgaggcctggaggccttcaccgtgggcctggtggtcctggtcattggcacctccatgggcttcaactccggctatgccgtcaaccctgcccgggactttggcccccgcctttttacagcccttgcgggctggggctctgcagtcttcacgaccggccagcattggtggtgggtgcccatcgtgtccccactcctgggctccattgcgggtgtcttcgtgtaccagctgatgatcggctgccacctggagcagcccccaccctccaacgaggaagagaatgtgaagctggcccatgtgaagcacaaggagcagatctgagtgggcaggggccatctccccactccgctgccctggccttgagcatccactgactgtccaagggccactcccaagaagcccccttcacgatccaccctttcaggctaaggagctccctatctaccctcaccccacgagacagccccttcaggatttccactggaccttgcccaaatagcaccttaggccactgcccctaagctggggtggaaccggaatttgggtcaatacatccttttgtctcccaagggaagagaatgggcagcaggtatgtgtgtgtgtgcatgtgtgtgcatgtgtgtgcatgtgtgtgcaggggtgtgtgtgtgtggggggggttcccagatattcagggcaagggaccagtcggaagggattctggctattgggggagcccagagacaggggaaggcagcctgtccatctgtgcataaggagaggaaagttccagggtgtgtatgtttcaggggcttcacatggaggagctgcagatagatatgtgtttctgtgtatgtgtatgtctgcctttttttctaagtgggggcttctacaggcttttgggaagtagggtggatgtgggtagggctgggaggagggggccacagcttaggtttggagctctggatgtacatacataagtaggagcagtgggacgtgtttctgtcataatgcaggcatgaagggtggagtgaagtcaggtcataagtttcatgtttgcttttgttttgttttgtttttaatgtatgtagcagatgttacagtcttagggatccgggatgggagaccccactttagaaagggtcgtcactcctttaatcctctactcaacaatgtactcttttacttttatattaaaaaaaataaaataaatatgtgcctaaaacctcca

SEQ ID NO: 150761 - DNA, 879 bp, Artificial Sequence
  derived and/or modified sequence
atgggcagacagaaggagctggtgagcagatgcggcgagatgctgcacatcagatacagactgctgagacaggccctggccgagtgcctgggcaccctgatcctggtgatgttcggctgcggcagcgtggcccaggtggtgctgagcagaggcacccacggcggcttcctgaccatcaacctggccttcggcttcgccgtgaccctgggcatcctgatcgccggccaggtgagcggcgcccacctgaaccccgccgtgaccttcgccatgtgcttcctggccagagagccctggatcaagctgcccatctacaccctggcccagaccctgggcgccttcctgggcgccggcatcgtgttcggcctgtactacgacgccatctggcacttcgccgacaaccagctgttcgtgagcggccccaacggcaccgccggcatcttcgccacctaccccagcggccacctggacatgatcaacggcttcttcgaccagttcatcggcaccgccagcctgatcgtgtgcgtgctggccatcgtggacccctacaacaaccccgtgcccagaggcctggaggccttcaccgtgggcctggtggtgctggtgatcggcaccagcatgggcttcaacagcggctacgccgtgaaccccgccagagacttcggccccagactgttcaccgccctggccggctggggcagcgccgtgttcaccaccggccagcactggtggtgggtgcccatcgtgagccccctgctgggcagcatcgccggcgtgttcgtgtaccagctgatgatcggctgccacctggagcagcccccccccagcaacgaggaggagaacgtgaagctggcccacgtgaagcacaaggagcagatctag

SEQ ID NO: 150762 - DNA, 1017 bp, Artificial Sequence
  derived and/or modified sequence
atgaccaccaccctggtgagcgccaccatcttcgacctgagcgaggtgctgtgcaagggcaacaagatgctgaactacagcgcccccagcgccggcggctgcctgctggacagaaaggccgtgggcacccccgccggcggcggcttccccagaagacacagcgtgaccctgcccagcagcaagttccaccagaaccagctgctgagcagcctgaagggcgagcccgcccccgccctgagcagcagagacagcagattcagagacagaagcttcagcgagggcggcgagagactgctgcccacccagaagcagcccggcggcggccaggtgaacagcagcagatacaagaccgagctgtgcagacccttcgaggagaacggcgcctgcaagtacggcgacaagtgccagttcgcccacggcatccacgagctgagaagcctgaccagacaccccaagtacaagaccgagctgtgcagaaccttccacaccatcggcttctgcccctacggccccagatgccacttcatccacaacgccgaggagagaagagccctggccggcgccagagacctgagcgccgacagacccagactgcagcacagcttcagcttcgccggcttccccagcgccgccgccaccgccgccgccaccggcctgctggacagccccaccagcatcacccccccccccatcctgagcgccgacgacctgctgggcagccccaccctgcccgacggcaccaacaaccccttcgccttcagcagccaggagctggccagcctgttcgcccccagcatgggcctgcccggcggcggcagccccaccaccttcctgttcagacccatgagcgagagcccccacatgttcgacagcccccccagcccccaggacagcctgagcgaccaggagggctacctgagcagcagcagcagcagccacagcggcagcgacagccccaccctggacaacagcagaagactgcccatcttcagcagactgagcatcagcgacgactag

SEQ ID NO: 150763 - DNA, 966 bp, Artificial Sequence
  derived and/or modified sequence
atgaccaccaccctggtgagcgccaccatcttcgacctgagcgaggtgctgtgcaagggcaacaagatgctgaactacagcgcccccagcgccggcggctgcctgctggacagaaaggccgtgggcacccccgccggcggcggcttccccagaagacacagcgtgaccctgcccagcagcaagttccaccagaaccagctgctgagcagcctgaagggcgagcccgcccccgccctgagcagcagagacagcagattcagagacagaagcttcagcgagggcggcgagagactgctgcccacccagaagcagcccttcgaggagaacggcgcctgcaagtacggcgacaagtgccagttcgcccacggcatccacgagctgagaagcctgaccagacaccccaagtacaagaccgagctgtgcagaaccttccacaccatcggcttctgcccctacggccccagatgccacttcatccacaacgccgaggagagaagagccctggccggcgccagagacctgagcgccgacagacccagactgcagcacagcttcagcttcgccggcttccccagcgccgccgccaccgccgccgccaccggcctgctggacagccccaccagcatcacccccccccccatcctgagcgccgacgacctgctgggcagccccaccctgcccgacggcaccaacaaccccttcgccttcagcagccaggagctggccagcctgttcgcccccagcatgggcctgcccggcggcggcagccccaccaccttcctgttcagacccatgagcgagagcccccacatgttcgacagcccccccagcccccaggacagcctgagcgaccaggagggctacctgagcagcagcagcagcagccacagcggcagcgacagccccaccctggacaacagcagaagactgcccatcttcagcagactgagcatcagcgacgactag

SEQ ID NO: 150764 - DNA, 1017 bp, Artificial Sequence
  derived and/or modified sequence
atgacaacgaccctggtatccgccacaatcttcgatctatctgaggtgttgtgcaaagggaacaaaatgctgaactattccgccccttcagcaggcggttgtctgttggacagaaaagctgtagggactccggccggaggcggatttccgagacgacatagtgtaactcttcccagctcgaagtttcatcagaatcagttgctgtcatccctgaaaggcgagcctgcgcccgctctttcttcaagagatagccgctttcgcgaccgcagtttcagtgaaggaggagaacggctactgcccacccagaaacagcccggtggcgggcaggtaaattcgagccggtataagacagagctctgtcgaccctttgaagagaacggtgcctgtaagtacggagataagtgccagttcgctcacggcattcatgaactcaggagcctcactcgccaccccaagtataaaaccgagctttgtagaactttccacacaattggcttctgtccttacggaccacggtgtcatttcatccacaacgctgaggaacgccgcgccttggcaggggcaagggacctgagcgccgataggcccaggcttcagcatagcttttctttcgccgggtttccatccgccgccgctaccgcagcagccactggcctgttggactcgcccacctccatcacaccccccccaatactgagtgccgacgacctacttggctcacctactctgcccgacggtaccaataacccattcgccttctctagccaggaactcgcttctctgttcgcccccagcatgggactccctggcggagggagccccacaactttcctgtttcggcccatgtcagagtctccacatatgtttgacagtccaccttctccccaggatagcctctcagaccaagaaggatatctatcctcctcaagttctagccactccggcagcgattctcctactctcgacaactcccgacggctcccgatattttccagattgtcaattagcgatgattag

SEQ ID NO: 150765 - DNA, 966 bp, Artificial Sequence
  derived and/or modified sequence
atgaccacaaccttggtgtcagccactattttcgatttgtctgaggtgctgtgcaagggaaataaaatgctgaactattctgccccatcagcaggcggctgcctgctggatcgcaaagcagtagggaccccggccggtggtgggtttccacgtagacattctgttactcttccttcgtcaaaatttcaccagaaccagttgctatctagtttaaagggagaaccggctccagcactgtccagtcgcgacagccggtttagggacaggtccttctccgaaggtggggagcggcttctgcccacgcagaaacagccctttgaagagaatggtgcttgcaaatatggggacaaatgtcagtttgctcacggtatccacgagctgaggtctctcacacgacatccaaaatataagactgagctctgtcggacatttcataccatcggcttctgcccctacgggccaaggtgtcattttatccacaatgctgaagagcggagagcgcttgccggtgcgcgcgacttaagtgctgatcgtcctcggcttcagcactctttttctttcgccggatttccgtctgccgccgctaccgccgcagcaactggcttacttgacagccctactagtattacacccccacctatcctgtcggctgacgaccttctgggctctccaacactccctgatggcactaataatccttttgcattttccagccaagagctggcttcccttttcgccccttctatgggcctgccaggtggcggctcccctacaacgtttctcttccggccaatgagtgaatccccccacatgttcgattcccctcctagccctcaggacagtctgtcagaccaggaaggttacttgagttctagtagttcatcccatagcgggagcgactcacccacgcttgacaactctagaagactgccaatcttctcacgattgtccatcagtgacgattag

SEQ ID NO: 150766 - DNA, 1017 bp, Artificial Sequence
  derived and/or modified sequence
atgaccacgacgctggtgagcgcaaccatcttcgacctttctgaagtgttgtgtaaggggaataagatgctgaactatagtgccccctcagccggcggctgtcttttggatagaaaggccgtgggaacccctgctggcggtggattcccacgccggcacagtgtgactctaccaagttctaaattccaccagaaccagctccttagttctctcaagggagagccagcccctgccctctcctcacgtgattcgaggtttagggacaggagctttagtgaggggggcgagcggctgttgcccacacaaaagcagccaggaggcggccaggtgaacagtagtcgatacaagaccgagctatgtcgcccattcgaggaaaacggcgcttgcaaatatggggacaagtgtcagtttgcacacggcatccacgaactccggagcctgactaggcaccctaaatataagactgagttgtgtaggacatttcatacaattggattctgtccttacggtcccagatgccattttatccacaacgcggaggaacgacgcgcactcgccggggctcgggatctctcagcagatagaccgagacttcagcattccttctctttcgccggattcccttcggccgccgcaacagcggctgcaactggcctcctggacagccctacgtctataactccacctccaatcctctcagctgatgacctcctcggctctccaaccctgcctgatggaactaacaatccgttcgctttcagttcccaggagctggcctctctgtttgctcccagcatggggttgcctggcggcggctcaccaaccaccttccttttcaggcctatgtcagagtcaccccatatgtttgacagccctcccagcccgcaagattcactcagtgatcaggagggttatctcagcagttctagctccagtcattctggaagcgactctcctactctggacaactcccggcgcctgccaatatttagccgcctctctatttcggacgattag

SEQ ID NO: 150767 - DNA, 1017 bp, Artificial Sequence
  derived and/or modified sequence
atgaccaccaccctggtgtctgccaccatctttgacctgtctgaggtgctgtgcaagggcaacaagatgctgaactacagcgcccccagcgctgggggctgcctgctggacaggaaggctgtgggcaccccagctgggggcggcttccccaggaggcacagcgtgaccctgcccagcagcaagttccaccagaaccagctgctgagcagcctgaagggggagcccgccccagccctgagcagccgggacagccgcttccgggacaggagcttcagcgagggcggggagcggctgctgcccacccagaagcagcccggcggcggccaggtgaacagcagccgctacaagacagagctgtgccggccctttgaagaaaatggagcctgcaagtatggagacaagtgccagtttgcccacggcatccacgagctgcggagcctgaccaggcaccccaagtacaagacagagctgtgcaggaccttccacaccatcggcttctgcccctacggcccccgctgccacttcatccacaatgctgaggagcggcgggccctggccggggcccgggacctgtctgctgaccggccccggctgcagcacagcttctcctttgctggcttccccagcgctgctgccacagctgctgccaccggcctgctggacagccccaccagcatcaccccaccacccatcctgtctgcagatgacctgctgggcagccccaccctgcctgatggcaccaacaacccctttgccttcagcagccaggagctggccagcctgtttgcccccagcatgggcctgcccggcggcggcagccccaccaccttcctgttccggcccatgtctgagagcccccacatgtttgacagcccccccagcccccaggacagcctgagtgaccaggagggctacctgagcagcagcagcagcagccacagcggcagtgacagccccaccctggacaacagccggcggctgcccatcttcagccggctgagcatcagtgatgactag

SEQ ID NO: 150768 - DNA, 966 bp, Artificial Sequence
  derived and/or modified sequence
atgaccaccaccctggtgtctgccaccatctttgacctgtctgaggtgctgtgcaagggcaacaagatgctgaactacagcgcccccagcgctgggggctgcctgctggacaggaaggctgtgggcaccccagctgggggcggcttccccaggaggcacagcgtgaccctgcccagcagcaagttccaccagaaccagctgctgagcagcctgaagggggagcccgccccagccctgagcagccgggacagccgcttccgggacaggagcttcagcgagggcggggagcggctgctgcccacccagaagcagccctttgaggagaatggagcctgcaagtacggggacaagtgccagtttgcccacggcatccacgagctgcggagcctgaccaggcaccccaagtacaagacagagctgtgcaggaccttccacaccatcggcttctgcccctacggcccccgctgccacttcatccacaatgctgaggagcggcgggccctggccggggcccgggacctgtctgctgaccggccccggctgcagcacagcttctcctttgctggcttccccagcgctgctgccacagctgctgccaccggcctgctggacagccccaccagcatcaccccaccacccatcctgtctgcagatgacctgctgggcagccccaccctgcctgatggcaccaacaacccctttgccttcagcagccaggagctggccagcctgtttgcccccagcatgggcctgcccggcggcggcagccccaccaccttcctgttccggcccatgtctgagagcccccacatgtttgacagcccccccagcccccaggacagcctgagtgaccaggagggctacctgagcagcagcagcagcagccacagcggcagtgacagccccaccctggacaacagccggcggctgcccatcttcagccggctgagcatcagtgatgactag

SEQ ID NO: 150769 - DNA, 1017 bp, Artificial Sequence
  derived and/or modified sequence
atgaccaccaccctggtgagcgccaccatcttcgacctgagcgaggtgttgtgcaaaggaaacaagatgctgaattatagtgctccatcagctggcggatgccttctggataggaaagccgttgggactcctgccggtgggggctttccacggagacattctgtaaccctgcccagctccaaattccatcagaaccagctgttgagctccctgaagggcgaaccagcaccagctttgtcttccagagacagccgcttccgggaccgatctttcagcgagggaggggagagactcctccctactcaaaaacagccaggcggtggtcaggtgaactctagccgctacaaaactgagctttgcaggccgtttgaggagaatggagcatgcaaatatggagacaagtgccagttcgctcacgggattcatgaactacgaagcctcactagacatcccaagtataagaccgagttgtgtcgtacattccatacaataggtttttgcccttacggacctaggtgccatttcatccataacgccgaggagagacgtgcacttgcgggagctcgcgatctctctgccgaccgaccacggttgcagcactcattctcttttgccggattcccatcagctgccgccaccgcagctgctactggactgctggactcacccacaagcataactcctcccccaattctgtctgccgatgatctcctgggatcccccaccctgcctgatggcacgaataatccgtttgctttttccagccaggagttggccagtctttttgcgccttctatgggcctccctgggggaggatctcccactacatttctgttcagacccatgtctgaatctccacacatgtttgattctccccctagccctcaggatagcttgagcgaccaggaagggtacttgtctagcagctcaagttctcacagtgggagcgattccccaacactcgacaattcaaggcgtctgcctatattttcgcggctgtcaatcagcgacgattag

SEQ ID NO: 150770 - DNA, 966 bp, Artificial Sequence
  derived and/or modified sequence
atgaccaccaccctggtgagcgccaccatcttcgacctgagcgaggtcctgtgcaaggggaacaagatgcttaactatagcgcgccctccgccggcggatgtctcctagaccggaaagcagtaggaacaccggcggggggcgggtttcctcgacgtcactctgtgacacttcctagcagcaagttccatcaaaatcagctcttgagcagcctgaagggtgaaccagctcctgcattgtcttctcgcgattctaggttccgtgaccgtagcttctcagaagggggtgagcggctcctgcccacccagaaacaaccctttgaagagaacggcgcgtgcaaatatggtgataagtgtcagtttgctcacggtatccacgagttgagaagcctcacccgacatcctaaatataagaccgaactgtgccggacattccatacaataggtttctgcccctacgggccccgatgccatttcatccacaatgcggaagagagacgggcactcgccggagcccgggacttgtcagctgacagaccgcgcctccagcacagcttcagttttgctggtttccctagtgccgcggctacagccgcggccactggcctgctggattcgcctacttcaattactcctccccccatcctctctgccgatgaccttctggggtcccctacattgccggacggtacgaacaacccatttgctttctcctcgcaggagctggctagtttgttcgccccgagtatgggcctgccaggaggcgggtcccctacaacatttctcttccgcccaatgagtgaaagcccacacatgttcgattctccgccatcaccccaggacagcttaagtgatcaggaaggctatttatccagttcttcatcttcacatagtgggtcagacagtcctactctggataacagcagacgcctgcccatcttttctcgtctgtccatatccgatgactag

SEQ ID NO: 150771 - DNA, 1017 bp, Artificial Sequence
  derived and/or modified sequence
atgaccaccaccctggtgagcgccaccatcttcgacctgagcgaggtgctgtgtaaaggaaataaaatgttgaattactctgctccttcggcgggtggatgccttttggacaggaaggcagtgggtacgcctgccggcggtgggtttccccgccggcactctgtgacccttccatctagcaagttccaccagaatcagctcttgtcgtctctgaaaggggaacccgctccagcccttagtagcagagactctcggttccgggacagaagcttttccgaaggtggtgagaggctgctacctacacagaagcagcctggcggtggccaggtaaatagctctcgctataagacagagctatgccgacctttcgaggaaaacggggcctgtaagtacggagataagtgccagtttgctcatggtattcacgagcttcgctctttaacgcgccatcctaagtataagactgagctatgtcgcacctttcacacgattggtttttgcccctatggcccccggtgccatttcatccataacgccgaagaaagacgggcactcgcgggcgccagagatctttctgccgatcgtcccagactgcagcactcattttctttcgccggattccctagtgcagcggctacagcagccgccaccggcttgctcgattcacctacatccattacccctccccccatactcagtgccgatgacctgctgggatccccaaccttaccagatgggactaataatccattcgcctttagctctcaagaactcgctagcttgtttgcacccagcatgggactgccgggtggcggctctcccaccaccttcttgttccgtcctatgtctgaatcccctcacatgttcgattcccccccaagcccacaggattcactgtctgatcaggagggctatctgtcttcttctagcagtagccattcagggtccgacagtcccaccttggacaacagtaggcgacttcctatattttcccgcttgagcatttctgacgattag

SEQ ID NO: 150772 - DNA, 1017 bp, Artificial Sequence
  derived and/or modified sequence
atgaccactacgctggtgtctgctactatcttcgatctcagcgaagtgttatgcaaagggaacaaaatgctgaactatagcgcccctagtgcaggaggctgcttactcgacagaaaagccgttgggactccagccggaggtggcttcccacggaggcattccgtgaccctgccttcatctaagttccaccagaaccaattgctgtcttccctcaagggcgaacctgctccagcactgagctcaagagattctcgcttccgggaccggagcttctccgaagggggagagagactgctacctacccagaagcaaccaggaggaggccaggtgaacagcagtagatacaaaaccgagctgtgcaggcctttcgaagagaatggcgcttgtaagtacggggataagtgtcaattcgcacacggtatccacgaactcaggagtctgacaagacacccgaaatacaaaacggagctctgtcggacatttcacaccatcggcttttgtccttatggccctaggtgtcattttatccacaacgccgaagagcggcgtgcgctggccggagcaagagacctgtctgccgaccgcccacgcctacagcactctttctccttcgcaggttttccaagtgccgcagcaactgccgctgcgactggcctgctcgacagcccgacatccattacaccccctcccattctctctgccgacgaccttctgggatcacccactctgccagacggcactaacaatccctttgcgttttctagccaggagttagcctccctgttcgcgccatctatgggcctcccaggcggtggtagtcccacaacattcctgtttagacccatgagcgagagcccacacatgttcgattcgcctccctcccctcaggatagcttgtctgatcaggagggctacctgtcctcatctagcagcagtcacagcggatccgactcacctaccctggacaattccagaaggttgccaattttttctcgcctgagcatctcggacgactag

SEQ ID NO: 150773 - DNA, 966 bp, Artificial Sequence
  derived and/or modified sequence
atgactacgacgctagtgagtgccaccatcttcgacctatctgaggtgctttgcaagggtaataagatgctgaactatagcgccccatctgcagggggttgcctgctagatcggaaggctgtcggcacaccagccggagggggattccccagaagacattctgttacgctgccttcatcaaaatttcatcaaaatcagctgttgagcagtttgaaaggcgaacccgcacctgccttgagttccagagatagtagattccgagaccggtccttcagtgaaggaggggagcggttactgcccacccagaaacaacctttcgaagaaaacggcgcatgcaaatatggggataaatgtcagtttgctcacggaatccacgagttgaggagcctcacacggcatcctaaatataagacagaactgtgccgaacatttcatacgattgggttttgtccctacggccctcgctgccactttatccataatgccgaggagcgccgagctctcgctggggctcgcgatctctccgccgacagaccacgactgcaacactccttcagttttgcagggttcccatctgcagcagcgactgcagccgctacggggctcctggactctcctaccagtatcactccaccgcctattctctcagctgacgatttgctcggaagcccaacactgccagatggcacaaacaatccattcgcatttagcagtcaagagctggcatccctgttcgccccatccatggggctcccgggtggcggttcccccacaactttcctgttcaggccaatgtccgagtccccgcacatgttcgattcccccccaagcccccaggattcattatctgatcaggagggctacctcagttccagcagcagttcccattcaggaagcgattctcctactctggataatagccggagattacctatatttagccgcctctctataagcgacgactag

SEQ ID NO: 150774 - DNA, 1017 bp, Artificial Sequence
  derived and/or modified sequence
atgactacaacactggtctcagctaccatcttcgatttgtcagaggtcctctgcaaagggaacaagatgctgaactactcagcgccatctgcaggtggatgtctgcttgaccgcaaggcagtcggcacaccagcaggaggcggattccctcggcgtcacagcgtcaccctcccctcgagcaagttccaccaaaaccagttattgagcagcttgaaaggcgagccagcccctgctctctctagccgagacagtcgctttcgggataggagtttctctgaaggcggagagagattgctgcctacccagaaacagcccggagggggtcaggtgaattcaagtaggtacaaaaccgagctgtgtcgacccttcgaggagaacggtgcatgcaaatatggcgataaatgccagttcgcccatgggatacatgaacttcgttccctgacccgccaccccaagtacaagacagagttgtgtcggacattccacacaatcgggttttgcccctacggtccaaggtgtcatttcattcataatgcagaagaacgcagggccctggctggggctcgcgacctgtctgctgataggcccaggctgcagcatagcttttcctttgcaggcttccccagcgctgccgctaccgcagcggctaccggactgctggattcccccacctcaatcactccccctccgatcctgtcagccgatgaccttctgggaagtcctaccctccctgacggcactaataaccctttcgccttttcctcacaggagttggcttccctattcgcgccaagcatgggccttccgggtgggggaagccctaccacatttctatttcgccctatgagcgagtcccctcacatgttcgacagtccgccttctccccaagacagcctttcggaccaggagggatacctgtctagttcttccagctcacactcaggaagcgacagccccacccttgacaactctaggcggctccccatcttctcccgcctgtccattagtgatgactag

SEQ ID NO: 150775 - protein, 166 aa, Artificial Sequence
  derived and/or modified sequence
MAATMFRATLRGWRTGVQRGCGLRLLSQTQGPPDYPRFVESVDEYQFVERLLPATRIPDPPKHEHYPTPSGWQPPRDPPPNLPYFVRRSRMHNIPVYKDITHGNRQMTVIRKVEGDIWALQKDVEDFLSPLLGKTPVTQVNEVTGTLRIKGYFDQELKAWLLEKGF

SEQ ID NO: 150776 - DNA, 501 bp, Artificial Sequence
  derived and/or modified sequence
atggctgctaccatgttccgggcaacactgaggggatggcgtaccggtgttcagaggggctgcgggctaaggttgctttctcagactcaggggcccccagattatccaaggtttgtggaatctgtagacgaataccagtttgttgaacgtctgctgcccgctactcgcattcccgacccccctaagcacgaacactacccgactccatcaggttggcagcctcctcgggaccccccgcccaacctaccttatttcgtcagaaggtccagaatgcacaacatccccgtgtataaggacataacacacggaaatagacagatgaccgttatccggaaagtggaaggtgacatttgggctttgcagaaggacgttgaggactttctctcacccttgttgggaaagaccccggtcactcaagtcaatgaggtgacaggaacactccggattaagggttattttgatcaagagcttaaggcttggcttctcgagaaaggattttag

SEQ ID NO: 150777 - DNA, 501 bp, Artificial Sequence
  derived and/or modified sequence
atggccgctaccatgttcagggctactctaagggggtggcggacgggagtgcaacgtggctgcggcctccggctgctttctcagacacagggtcctcctgattacccgagatttgtcgaaagtgtggacgagtatcagttcgtcgaacgattgctgcctgcaactcggattccagatcctcccaagcacgagcactaccctacacctagcggctggcagccgccacgcgatccgcccccaaatttgccttatttcgtgagacgcagtagaatgcataacatcccagtctataaggatattacacacggtaatcgtcagatgacggtgatccgcaaagtggagggcgatatatgggccctccaaaaagacgttgaggatttcctaagccctctgcttgggaaaactccggttacacaagtgaacgaggtcaccggcacgctgagaattaaggggtacttcgaccaggagctgaaggcttggttgttagaaaaaggattttag

SEQ ID NO: 150778 - DNA, 501 bp, Artificial Sequence
  derived and/or modified sequence
atggccgccaccatgttccgggccaccctgcggggctggaggactggagtgcagaggggctgcggcctgcggctgctgagccagacccagggccccccagactaccccaggtttgtggagagcgtggatgagtaccagtttgtggagcggctgctgcctgccacccgcatcccagacccccccaagcatgagcactaccccacccccagcggctggcagcccccccgggaccccccacccaacctgccctactttgtgagaagaagcaggatgcacaacatccctgtgtacaaggacatcacccacggcaaccggcagatgaccgtcatcaggaaggtggagggggacatctgggccctgcagaaggatgtggaggacttcctgagccccctgctgggcaagacccctgtgacccaggtgaatgaggtgacaggcaccctgcgcatcaagggctactttgaccaggagctgaaggcctggctgctggagaagggcttctag

SEQ ID NO: 150779 - DNA, 2019 bp, Artificial Sequence
  derived and/or modified sequence
gctggcgtagcaggtaaagatggcagctaccatgttccgggctacgctgcggggatggagaaccggtgtccagcggggctgcgggctacggctgttgagccagacccagggccctccagattaccccaggtttgtggagtctgtggatgaatatcagtttgtggagcgcctgttaccggctaccaggatcccagatcccccaaagcatgaacattatcctacccctagtggctggcagcctcccagagaccccccacccaacctgccttactttgtacgacgctctcggatgcacaacatccccgtctacaaggacatcacgcatggcaaccggcagatgactgtgatccggaaagtggaaggggacatctgggccctgcagaaagacgtggaagattttctgagcccgctgctggggaagacacctgtcacccaggtcaatgaggtgacaggtaccctacggatcaagggctactttgaccaggagcttaaagcctggctcttggagaaaggcttctgaggcccagccgagcagcctgcttgtcagcatgccctgtggatcaagtctagggggcctcaggaggagggaggtgggtgttggagcccctgagacaggggatacagaaactagggctaaaggactttggggtcaggccttgcttgcataaaggagaaaacaactctatgtacatgctgggggagagtgcctaatgtgggagaccaaatagggatcaccaggctaatggggggcgtcagcagctttctctccctcctatcttggcctgttcttttttgttttttgagacggagtctcactctgttgcccagggtggagtgcagtggcatgatcttggctcactgcaacttccacctctgggatcaagggattctcctgcctcagcctcttgagtagctgggattacaggcgcccaccaccacagcctgctaatttttgtatttttagtagagatggggtttcaccatgttggccaggctggtctcaaactcctgactcgaagtgatccgcccaccttggcctcccaaagcgttgggattataggcatgagccatgtgcctggtccaccttggcctgttttgtttttctttccttgggctcagcaattcaaattctagttgttatttggtggaagcagtagcccaaccccagtttaggggaaggtagcacagggcagagccactgggcactttgtttccttggccctccgaagctcactgttgcaaatacccccaagcctttgctctaggccagatcttgtttggtgcaggtgatggagaacacagatgactcgggcatgggtcttggagatcttctgttcaaagtacagtgctggcactggggcacagagtgcccacgttagccccgggctctgatagagaggtaggaggcacgttcttggtcactgttccattgcagaccagacttgctggcctgaccacaagggagtggctgggaactcacagccagcatagggacatccccctgcagccttctgacctgcaatcaaggctggggaggggtttgcaggcaggaatatgctgacctttcaccctgccatcccatcccaaccccagctcactagccttcatatatgccttatacttggagtcacaggggccaaaggcctgagaccccaccctgcccccaaactggctaagacagctttcagttcctgactccccaacttggtctctgccctgaagcagggcactgaactctgggctgcttctctgtgtgtaaaatgggcacatcttcctaatctgttaatggtcagtggtgtccccaaggatagtgctggcttccatggaaaccctcactcctggagattccattccattttcaagtgtacagccacagcaaggagcccgacactgatttgatcgattctgtgacacaaaccccaccaattgttaatgcaagtttttatttggctgtatatacaatttaagctattaaaatttgtacaatatttacaaattaaataatcatctgaaactgtc

SEQ ID NO: 150780 - DNA, 1906 bp, Artificial Sequence
  derived and/or modified sequence
gcacagaaggctggcgtagcaggtaaagatggcagctaccatgttccgggctacgctgcggggatggagaaccggtgtccagcggggctgcgggctacggctgttgagccagacccagggccctccagattaccccaggtttgtggagtctgtggatgaatatcagtttgtggagcgcctgttaccggctaccaggatcccagatcccccaaagcatgaacattatcctacccctagtggctggcagcctcccagagaccccccacccaacctgccttactttgtacgacgctctcggatgcacaacatccccgtctacaaggacatcacgcatggcaaccggcagatgactgtgatccggaaagtggaaggggacatctgggccctgcagaaagacgtggaagattttctgagcccgctgctggggaagacacctgtcacccaggtcaatgaggtgacaggtaccctacggatcaagggctactttgaccaggagcttaaagcctggctcttggagaaaggcttctgaggcccagccgagcagcctgcttgtcagcatgccctgtggatcaagtctagggggcctcaggaggagggagtgcctaatgtgggagaccaaatagggatcaccaggctaatggggggcgtcagcagctttctctccctcctatcttggcctgttcttttttgttttttgagacggagtctcactctgttgcccagggtggagtgcagtggcatgatcttggctcactgcaacttccacctctgggatcaagggattctcctgcctcagcctcttgagtagctgggattacaggcgcccaccaccacagcctgctaatttttgtatttttagtagagatggggtttcaccatgttggccaggctggtctcaaactcctgactcgaagtgatccgcccaccttggcctcccaaagcgttgggattataggcatgagccatgtgcctggtccaccttggcctgttttgtttttctttccttgggctcagcaattcaaattctagttgttatttggtggaagcagtagcccaaccccagtttaggggaaggtagcacagggcagagccactgggcactttgtttccttggccctccgaagctcactgttgcaaatacccccaagcctttgctctaggccagatcttgtttggtgcaggtgatggagaacacagatgactcgggcatgggtcttggagatcttctgttcaaagtacagtgctggcactggggcacagagtgcccacgttagccccgggctctgatagagaggtaggaggcacgttcttggtcactgttccattgcagaccagacttgctggcctgaccacaagggagtggctgggaactcacagccagcatagggacatccccctgcagccttctgacctgcaatcaaggctggggaggggtttgcaggcaggaatatgctgacctttcaccctgccatcccatcccaaccccagctcactagccttcatatatgccttatacttggagtcacaggggccaaaggcctgagaccccaccctgcccccaaactggctaagacagctttcagttcctgactccccaacttggtctctgccctgaagcagggcactgaactctgggctgcttctctgtgtgtaaaatgggcacatcttcctaatctgttaatggtcagtggtgtccccaaggatagtgctggcttccatggaaaccctcactcctggagattccattccattttcaagtgtacagccacagcaaggagcccgacactgatttgatcgattctgtgacacaaaccccaccaattgttaatgcaagtttttatttggctgtatatacaatttaagctattaaaatttgtacaatatttacaaattaaataatcatctg

SEQ ID NO: 150781 - DNA, 501 bp, Artificial Sequence
  derived and/or modified sequence
atggccgccaccatgttccgggccaccctgcggggctggcggaccggtgttcagagagggtgcggtctccgcttattgagtcaaacacagggacccccagattacccccggtttgtggaaagtgttgatgagtatcagtttgtggaaagattgctccccgcaactcgcattccggaccccccaaagcatgaacactatcccaccccttccggatggcagccccctagggacccacctcctaatttgccttatttcgtacgccgaagccggatgcacaatatcccagtctataaggatattactcacgggaaccgccagatgactgtgatacgcaaagtagaaggagatatctgggccctgcagaaagatgtggaagatttcctaagtccactgttggggaagactcccgtgacgcaggtcaacgaggtgacgggaacacttcggattaaggggtatttcgaccaggagctgaaagcatggctcctagaaaaaggcttctag

SEQ ID NO: 150782 - DNA, 501 bp, Artificial Sequence
  derived and/or modified sequence
atggccgccaccatgttccgggccaccctgcggggctggcggaccggcgtacagcggggctgtgggcttagactgctatcccagacacagggccctccagactacccccgcttcgtggagagtgtcgatgagtaccagttcgtcgagcggttactgcctgccacaagaattccagacccccccaaacacgagcattatccgacaccctctggatggcagcctcccagggatccaccgcccaacctcccttacttcgtgcggaggagccgcatgcacaacattcctgtttacaaggatattacacacggcaatcgtcagatgacagtcatccgtaaggttgagggggacatttgggctctccaaaaggacgtggaggactttctaagccctctgctcgggaagacacctgtgacacaggtcaatgaagtaactggcacgttaagaattaaaggctatttcgatcaagaactaaaagcatggctactggagaagggcttctag

SEQ ID NO: 150783 - DNA, 501 bp, Artificial Sequence
  derived and/or modified sequence
atggcagcaactatgttccgcgcaacgctgcgcggatggagaacgggggtgcagagagggtgcgggctccgactgctgagtcaaacccagggacctcctgactacccacgcttcgtggaaagtgttgacgagtaccaatttgtggagcgcctgttgcctgccactcggatccccgatcctcctaagcacgaacattacccgacaccatcaggctggcagccccctagggaccctccacccaacctgccatacttcgtccggaggtcgcgtatgcacaacatacccgtgtataaggacatcacccacggtaatcggcagatgacagtgattcgtaaggtggagggtgatatttgggcgctccagaaagatgtcgaagatttcttgtcacctctcctcgggaaaaccccagttacacaggttaacgaggtgacagggacactgagaatcaagggatacttcgaccaggaactgaaagcctggctactcgagaaaggattctag

SEQ ID NO: 150784 - DNA, 501 bp, Artificial Sequence
  derived and/or modified sequence
atggccgcaaccatgtttcgggcaacactccggggttggcgcacaggcgtgcagagaggctgcggacttcgactgttgtcacaaacccaaggtccaccggactacccccgatttgtggaatccgtcgacgagtatcagttcgttgagcggctgctgcccgcaacaagaattccagatccaccaaagcacgaacactaccccaccccctctggatggcaaccacctcgcgatcctccccctaatctgccatacttcgtgcgacggtctagaatgcataatatccccgtgtacaaggacatcacccacggaaatagacagatgactgtgataagaaaggtggagggagatatatgggctctgcagaaagacgttgaggacttcctgtccccactgttgggcaaaacccccgtgactcaggttaatgaggtgacaggaacgctgcgaattaaagggtatttcgatcaggagttaaaagcctggctgctggagaaaggcttttag

SEQ ID NO: 150785 - DNA, 501 bp, Artificial Sequence
  derived and/or modified sequence
atggccgccaccatgttcagagccaccctgagaggctggagaaccggcgtgcagagaggctgcggcctgagactgctgagccagacccagggcccccccgactaccccagattcgtggagagcgtggacgagtaccagttcgtggagagactgctgcccgccaccagaatccccgacccccccaagcacgagcactaccccacccccagcggctggcagccccccagagaccccccccccaacctgccctacttcgtgagaagaagcagaatgcacaacatccccgtgtacaaggacatcacccacggcaacagacagatgaccgtgatcagaaaggtggagggcgacatctgggccctgcagaaggacgtggaggacttcctgagccccctgctgggcaagacccccgtgacccaggtgaacgaggtgaccggcaccctgagaatcaagggctacttcgaccaggagctgaaggcctggctgctggagaagggcttctag

SEQ ID NO: 150786 - protein, 256 aa, Artificial Sequence
  derived and/or modified sequence
MKLTRKMVLTRAKASELHSVRKLNCWGSRLTDISICQEMPSLEVITLSVNSISTLEPVSRCQRLSELYLRRNRIPSLAELFYLKGLPRLRVLWLAENPCCGTSPHRYRMTVLRTLPRLQKLDNQAVTEEELSRALSEGEEITAAPEREGTGHGGPKLCCTLSSLSSAAETGRDPLDSEEEATSGAQDERGLKPPSRGQFPSLSARDASSSHRGRNVLTAILLLLRELDAEGLEAVQQTVGSRLQALRGEEVQEHAE

SEQ ID NO: 150787 - DNA, 771 bp, Artificial Sequence
  derived and/or modified sequence
atgaaactcacccggaaaatggtgctcaccagggctaaggcatcagagctgcatagcgtgcggaagttgaattgctggggatctcgactgaccgatatcagcatctgccaggaaatgcccagtctcgaagtgattactttgtctgtaaacagcataagcacgctggagcctgtgagcaggtgtcagcgactgagcgaactgtacctcagacgaaacaggattccctcgctggctgaattgttctatctgaaagggctgcctcgattacgtgtgctgtggctggccgaaaacccttgttgtggtacatcccctcataggtatagaatgaccgtgctgagaacactccccaggctgcagaagctggacaatcaggccgtcacagaggaggaactgagcagagctctgtccgagggcgaggaaatcacagccgcacctgagcgcgaaggcactgggcacggtgggcccaaattatgttgcaccttgagcagtttgtccagcgccgccgaaaccggcagagatcccctggactcagaggaagaggctacttcaggggcgcaagatgagcgtggtctgaaaccaccatctcggggccagtttccatctctttccgctagggatgcctccagttctcacaggggaagaaatgtactgactgccattctgttacttctgcgagaactcgatgcggaagggttggaggccgttcagcagacagtagggagcagattgcaggcactgcgcggggaggaagtacaggagcatgccgagtag

SEQ ID NO: 150788 - DNA, 771 bp, Artificial Sequence
  derived and/or modified sequence
atgaagctgaccaggaagatggtgctgacccgggccaaggccagcgagctgcacagcgtgaggaagctgaactgctggggcagccggctgacagacatcagcatctgccaggagatgcccagcctggaggtgatcaccctgtctgtgaacagcatcagcaccctggagcctgtgagccgctgccagaggctgtctgagctgtacctgcggaggaaccgcatccccagcctggccgagctgttctacctgaagggcctgccccggctgcgggtgctgtggctggccgagaacccctgctgcggcaccagcccccaccgctacaggatgacagtgctgcggaccctgccccggctgcagaagctggacaaccaggccgtgacagaggaggagctgagccgggccctgtctgagggggaggagatcacagctgcccctgagcgggagggcaccggccacggcggccccaagctgtgctgcaccctgagcagcctgagcagcgctgctgagaccggccgggaccccctggacagcgaggaggaggccaccagcggggcccaggatgagcggggcctgaagccacccagccggggccagttccccagcctgagcgccagagatgccagcagcagccaccggggcagaaatgtgctgacagccatcctgctgctgctgcgggagctggatgctgagggcctggaggccgtgcagcagacagtgggcagccggctgcaggccctgcggggggaggaggtgcaggagcacgccgagtag

SEQ ID NO: 150789 - DNA, 771 bp, Artificial Sequence
  derived and/or modified sequence
atgaagctgacccggaagatggtgctgacccgggccaaggccagcgagttacactccgtgcggaaactgaactgctggggttccagattgaccgatatcagtatttgtcaggagatgccatcccttgaggtgatcactctgtccgtcaattccatctcaacactggagccggtgagcagatgtcagcggctctccgagctgtatctcaggaggaatcggattcctagcttggcggaactgttctacctaaagggcttacctcgactgcgcgttctgtggctcgcagagaacccttgctgcgggactagccctcaccgatacaggatgacagtgcttcgtacactcccccggctgcagaaactcgataaccaggccgtgacagaggaggagctctcccgggcactttcagagggggaagagatcactgcggctcctgaaagggaaggaacaggccatggcggacctaagctgtgttgcaccctgtcatccttgtcctccgcagccgagacaggacgggatcccttggacagtgaggaagaagcaacctctggcgctcaggacgaacgggggctcaaaccaccatcccgaggccagttccccagccttagcgctagggacgcaagcagcagccaccgcgggcggaatgtgttgacagctatcctcctgctgctgagggagctggacgccgaaggtctggaagctgtgcagcaaactgtagggtcccgattgcaagcgcttagaggtgaggaggtgcaggagcacgcagagtag

SEQ ID NO: 150790 - DNA, 771 bp, Artificial Sequence
  derived and/or modified sequence
atgaaacttactcggaaaatggtgctgacaagggctaaagcctctgagctccattcagttcgcaaactgaactgctggggatcccgcctcactgacattagcatctgtcaggagatgccttcgctagaggtgataacgctgtcggtgaacagtataagcacactggagcctgtatcgcgctgccagcgactgtccgagctttacttacgcagaaacaggatcccaagcctggcagaactcttctatctgaaagggctgccaagactgcgtgtgttatggttagccgaaaatccatgctgcggaaccagcccacacagatacaggatgacagtgctaagaactctgcctcgcctccaaaagctcgataatcaggccgttactgaggaggagctaagcagagctttgagtgagggcgaggaaattacggcagcaccagaacgggaaggcactggtcacggcggacctaagttgtgctgcacattatcatctctatctagcgccgcagagacggggcgtgatcccctcgactcagaagaggaggctacctccggcgctcaggacgaacggggtctgaaaccaccaagcagaggccaatttcccagcctcagtgcgagagacgcgtctagcagccatcggggaagaaacgttttgactgccatactgttactcctgcgagagctagatgccgaagggcttgaggccgtacagcagactgtcggctcaagactccaggcactgcggggagaggaagtgcaagagcacgcagagtag

SEQ ID NO: 150791 - DNA, 2233 bp, Artificial Sequence
  derived and/or modified sequence
atgagcaggagcagagccaacgtgtcagcggcgcccaagcggccccagcgggctcgcgtcgccccgctctcctcaccgagccgccaatcggctcaggatccgcccctgacgacgcgggccccgcccctggagacacgcgccgcgcagtcgtcacccgcccgggatcaggaggccgggggcgcccgccggtcgggcctgggcggccgccatgaagctgacgcggaagatggttctgacccgggccaaggcctcggagctgcacagcgtgcgcaagctcaactgctggggcagccgcctcacagatatctccatttgccaggagatgcccagcctggaggtgatcacgctcagtgtcaacagcatctccaccctggagcctgtgagccggtgccagcgcctgagtgagctgtacctgcggaggaaccgcatccccagcctggctgagctcttctacctgaaggggctgccgcgtctgcgggtgctgtggctggccgagaacccgtgctgcggcaccagcccccaccgctaccgcatgaccgtgctgcgcaccctgccgcgcctacagaagctggacaaccaggctgtgacggaggaggagctgtcccgtgcactgagtgagggagaggagatcactgcggccccagagagagagggcacaggccacggcggccccaagctatgctgcacactgagctccctcagctccgctgctgagactggccgggacccgctggacagcgaggaggaggcaaccagcggcgcccaggatgaacgtggcctgaagccgccttcccggggccagtttccttccctctcagccagggatgcctcgagcagccacaggggcaggaacgtcctgactgccatcctgctgctgctgcgggagctggatgcagaggggctggaggccgtgcagcagactgtgggcagccggctgcaggccctgcgtggggaagaggtgcaggagcacgccgagtgaccgcaggacctgaacgccgctccagcctccacggggaccccagcgtcttccccagcccccgggagctggagggtggctgccatggccgcagccccggccccacacaaaagcctccccggtttgccacatcggccgagggcaggagtgggtgttaggtactggctaaccggggcggtggagatgcctgtctacaccagtcctgtccccaggactccccttctgtggtctggaggttctaggctggcctgggctcttaaagggaggattttgcaggctgtcctccctaataaaagattttcccaaggttgatctggaggtgacgtttcccaaggcatggttgtgacagtcttcctgaaagcaagggccgtttctccacagaatgaggaggtcttcacggatggctttgccgattccagcccttggtccttggatagatttctgttgggcaagggagacttcgagaatgctggcacccatagcgacatctgccctgagctgctcagcaggcaggcagcagcctcccgcacccatgggagagagttttgttttcttggccgggctgggcaggtgcgccttcctttctctctcctgtgaagaactgcaggagggccctcagctgtgaggttgtggatgaacaggcctgttcgccctggggtccgggcctggcacaggaagcagctagactaggggagtccttggagcatctgagaggggttttctttcctctgggaagagtcgcaagtcttatgaggatgccacaatctgggcagtgacccgtggccctggggaccttcctagtgccccccaaaaccaaggaagcattcacgtgagatggggagtcagccttccagctggtgtgtaggaaagccaggtccctgggcccttgtcccatgtggggttgagatccagatctccatgagatattcccatcctccgccgagcggtgatgcgtgaccgtgtgtgcaggccgctgttctcccaagctcggggccatgccgtgccaccgtcaccagagccagctgcagcactggggcagccactgtcgccggacttggggaagcccagggtgaagacagtcactcatccgtgcaagctctccagaagggatgcaagctctccagaaggggtgtgatctctgagcagtggggagtggagtcaccactcgggacatagagggtggacagttcaggcctgtgtctgcctccttgggactgtggagtgggtgccctcagtaaagcgctttgttggaatggt

SEQ ID NO: 150792 - DNA, 1187 bp, Artificial Sequence
  derived and/or modified sequence
gtcacccaggggccacagggcctccgagcatcaggccgctcgtgtgtggggccatttctgtcacatctcgggagggacaggaccccaggggtgttgaccgagctcaggtgcgtggtgcctgcacgcctgactgcactggagcggagcaggaagcctcgaggccgcggacgcggtcggtacatcacgctgctgcctgtgcctgaggcagaccccatcctggaaagagtcccacagccggagttttgctcttgtgtcaacagcatctccaccctggagcctgtgagccggtgccagcgcctgagtgagctgtacctgcggaggaaccgcatccccagcctggctgagctcttctacctgaaggggctgccgcgtctgcgggtgctgtggctggccgagaacccgtgctgcggcaccagcccccaccgctaccgcatgaccgtgctgcgcaccctgccgcgcctacagaagctggacaaccaggctgtgacggaggaggagctgtcccgtgcactgagtgagggagaggagatcactgcggccccagagagagagggcacaggccacggcggccccaagctatgctgcacactgagctccctcagctccgctgctgagactggccgggacccgctggacagcgaggaggaggcaaccagcggcgcccaggatgaacgtggcctgaagccgccttcccggggccagtttccttccctctcagccagggatgcctcgagcagccacaggggcaggaacgtcctgactgccatcctgctgctgctgcgggagctggatgcagaggggctggaggccgtgcagcagactgtgggcagccggctgcaggccctgcgtggggaagaggtgcaggagcacgccgagtgaccgcaggacctgaacgccgctccagcctccacggggaccccagcgtcttccccagcccccgggagctggagggtggctgccatggccgcagccccggccccacacaaaagcctccccggtttgccacatcggccgagggcaggagtgggtgttaggtactggctaaccggggcggtggagatgcctgtctacaccagtcctgtccccaggactccccttctgtggtctggaggttctaggctggcctgggctcttaaagggaggattttgcaggctgtcctccctaataaaagattttcccaaggttg

SEQ ID NO: 150793 - DNA, 771 bp, Artificial Sequence
  derived and/or modified sequence
atgaagctgaccagaaagatggtgctgaccagagccaaggccagcgagctgcacagcgtgagaaagctgaactgctggggcagcagactgaccgacatcagcatctgccaggagatgcccagcctggaggtgatcaccctgagcgtgaacagcatcagcaccctggagcccgtgagcagatgccagagactgagcgagctgtacctgagaagaaacagaatccccagcctggccgagctgttctacctgaagggcctgcccagactgagagtgctgtggctggccgagaacccctgctgcggcaccagcccccacagatacagaatgaccgtgctgagaaccctgcccagactgcagaagctggacaaccaggccgtgaccgaggaggagctgagcagagccctgagcgagggcgaggagatcaccgccgcccccgagagagagggcaccggccacggcggccccaagctgtgctgcaccctgagcagcctgagcagcgccgccgagaccggcagagaccccctggacagcgaggaggaggccaccagcggcgcccaggacgagagaggcctgaagccccccagcagaggccagttccccagcctgagcgccagagacgccagcagcagccacagaggcagaaacgtgctgaccgccatcctgctgctgctgagagagctggacgccgagggcctggaggccgtgcagcagaccgtgggcagcagactgcaggccctgagaggcgaggaggtgcaggagcacgccgagtag

SEQ ID NO: 150794 - protein, 261 aa, Artificial Sequence
  derived and/or modified sequence
MAESHLQSSLITASQFFEIWLHFDADGSGYLEGKELQNLIQELQQARKKAGLELSPEMKTFVDQYGQRDDGKIGIVELAHVLPTEENFLLLFRCQQLKSCEEFMKTWRKYDTDHSGFIETEELKNFLKDLLEKANKTVDDTKLAEYTDLMLKLFDSNNDGKLELTEMARLLPVQENFLLKFQGIKMCGKEFNKAFELYDQDGNGYIDENELDALLKDLCEKNKQDLDINNITTYKKNIMALSDGGKLYRTDLALILCAGDN

SEQ ID NO: 150795 - protein, 204 aa, Artificial Sequence
  derived and/or modified sequence
MKTFVDQYGQRDDGKIGIVELAHVLPTEENFLLLFRCQQLKSCEEFMKTWRKYDTDHSGFIETEELKNFLKDLLEKANKTVDDTKLAEYTDLMLKLFDSNNDGKLELTEMARLLPVQENFLLKFQGIKMCGKEFNKAFELYDQDGNGYIDENELDALLKDLCEKNKQDLDINNITTYKKNIMALSDGGKLYRTDLALILCAGDN

SEQ ID NO: 150796 - DNA, 786 bp, Artificial Sequence
  derived and/or modified sequence
atggcagaatcccacttgcagagctcactgattactgcgtcacagtttttcgagatctggttacactttgatgccgatggcagcggctatttagaggggaaggaattgcagaaccttattcaggagctgcagcaggctcggaaaaaggcgggacttgagctttcacctgagatgaaaacctttgtggatcagtatggccagagggacgatggcaagatcggaatagtggaactggctcacgtgctaccgacagaagagaactttctgctcctattccgctgccagcagctcaaatcatgcgaggagttcatgaagacctggcgcaaatacgatactgaccatagcggttttatcgagactgaggagctgaaaaacttcctgaaggatctcctggaaaaagccaacaagaccgtggatgacacgaaattggccgaatacacagatctgatgctcaaactattcgactctaacaatgatggaaagttggagctgaccgaaatggcgcgactattgcccgttcaggagaatttcctgctgaagttccaggggataaaaatgtgtggcaaggaattcaacaaagccttcgagctatatgaccaagatggcaatgggtatatcgacgagaatgaactggacgctctgctcaaggacctgtgcgagaaaaataaacaggatctggatattaataacatcacaacatataagaaaaatatcatggccctctcagatggcgggaaactctatcggacagacctggccttgattttgtgcgcgggcgataattag

SEQ ID NO: 150797 - DNA, 615 bp, Artificial Sequence
  derived and/or modified sequence
atgaaaacatttgtggaccagtacggacaaagggatgacggcaagattggcattgtagagctggctcacgtgttgccaacggaggagaactttctgctgctgttccggtgccaacagctaaagagctgcgaggagtttatgaagacttggagaaagtacgatacagatcatagcggctttattgagacggaagaactgaagaatttccttaaagatctgctggagaaagcaaacaaaactgtggatgacacaaaactcgccgagtacacagatttaatgcttaagctctttgactctaacaacgatggcaagctcgaactgaccgaaatggcgcgcttactcccagtgcaggagaattttctcctgaagttccaagggataaagatgtgcggaaaggaatttaacaaagcttttgaactgtatgatcaagatggaaatggctacatcgacgaaaatgagctcgacgcactgcttaaggatttatgtgagaagaacaaacaggaccttgacatcaacaacattactacctataagaaaaacatcatggccctaagtgatggaggcaagttataccgcacggacctcgcgctgattctctgtgccggggacaactag

SEQ ID NO: 150798 - DNA, 786 bp, Artificial Sequence
  derived and/or modified sequence
atggccgagagccacctgcagagcagcctcatcacagccagccagttctttgagatctggctgcactttgatgctgatggcagcggctacctggagggcaaggagctgcagaacctgatccaggagctgcagcaggccaggaagaaggccggcctggagctgagccctgagatgaagacctttgtggaccagtatggccagagagatgatggcaagattggaattgtggagctggcccacgtgctgcccacagaggagaacttcctgctgctcttccgctgccagcagctgaagagctgtgaggagttcatgaagacctggaggaaatatgacacagaccacagcggcttcatcgagacagaggagctgaagaacttcctgaaggacctgctggagaaggccaacaagacagtggatgacaccaagctggccgagtacacagacctgatgctgaagctgtttgacagcaacaatgatggcaagctggagctgacagagatggcccggctgctgcctgtgcaggagaacttcctgctgaagttccagggcatcaagatgtgtgggaaggagttcaacaaggcctttgagctgtatgaccaggatggaaatggctacattgatgaaaatgagctggatgccctgctgaaggacctgtgtgagaagaacaagcaggacctggacatcaacaacatcaccacctacaagaagaacatcatggccctgagtgatggcggcaagctgtacagaacagacctggccctgatcctgtgtgccggggacaactag

SEQ ID NO: 150799 - DNA, 615 bp, Artificial Sequence
  derived and/or modified sequence
atgaagacctttgtggaccagtatggccagagagatgatggcaagattggcatcgtggagctggcccacgtgctgcccacagaggagaacttcctgctgctcttccgctgccagcagctgaagagctgtgaggagttcatgaagacctggaggaaatatgacacagaccacagcggcttcattgaaacagaggagctgaagaacttcctgaaggacctgctggagaaggccaacaagacagtggatgacaccaagctggccgagtacacagacctgatgctgaagctgtttgacagcaacaatgatggcaagctggagctgacagagatggcccggctgctgcctgtgcaggagaacttcctgctgaagttccagggcatcaagatgtgtgggaaggagttcaacaaggcctttgagctgtatgaccaggatggaaatggctacattgatgaaaatgagctggatgccctgctgaaggacctgtgtgagaagaacaagcaggacctggacatcaacaacatcaccacctacaagaagaacatcatggccctgagtgatggcggcaagctgtacagaacagacctggccctgatcctgtgtgccggggacaactag

SEQ ID NO: 150800 - DNA, 786 bp, Artificial Sequence
  derived and/or modified sequence
atggccgagagccacctgcagagcagcctgatcaccgccagccagttttttgagatctggctgcatttcgacgctgacgggagcggttatctcgagggcaaagaacttcagaatctcattcaggaattgcaacaagcacgcaaaaaagccggcctggaactgagtcccgagatgaagacatttgtggatcaatacggccagagggatgacggtaaaatcgggattgtcgagctggcccatgtgcttcctaccgaggagaacttcctgctgctgttcagatgtcaacagttgaagtcctgtgaagagttcatgaaaacctggcgtaagtacgatacagaccacagtggcttcatcgagactgaagaactcaagaactttcttaaagaccttctagagaaggcaaataaaacagtagatgacaccaagctggcggagtatactgatctaatgctcaaactttttgacagcaataacgacgggaagctggagctcaccgaaatggctaggcttctccccgttcaagaaaatttcctcctgaagtttcaagggataaagatgtgcggtaaagagttcaacaaagctttcgagctgtatgatcaggatgggaatggctatatcgatgagaatgagctagacgcacttcttaaagacctctgtgagaaaaacaagcaggacctagatataaacaatatcaccacctacaagaaaaacattatggccctgtcagacggtggaaaactctaccgcacggacctggcactgatcttatgcgcgggtgacaattag

SEQ ID NO: 150801 - DNA, 615 bp, Artificial Sequence
  derived and/or modified sequence
atgaagaccttcgtggaccagtacggccagcgggacgacggcaagataggaatcgtcgagttggcacatgtgttaccaacagaagaaaactttttgctgctctttcggtgtcagcagctcaaatcttgcgaggagttcatgaagacctggcggaagtatgataccgaccatagcgggtttatcgaaacagaagagttgaagaattttctgaaagacctgctggaaaaagcgaacaagactgtggatgacaccaagttggcagaatacaccgacttgatgctcaagcttttcgactctaataacgacggtaagctcgagcttactgagatggcaaggctgttgcccgtacaggaaaattttctgcttaagttccagggtataaagatgtgtgggaaagagtttaacaaggcgtttgaattgtatgatcaagacggtaatggctacatcgatgagaacgagttggacgccctgcttaaagacttgtgcgagaagaataaacaagacctggacatcaataacatcacaacgtacaagaagaacatcatggcactatcagatggcgggaagttatacaggaccgatttagccctgatactgtgcgctggggataactag

SEQ ID NO: 150802 - DNA, 786 bp, Artificial Sequence
  derived and/or modified sequence
atggcagaatcccatttgcaatcctctctcattaccgccagccaattctttgaaatctggctgcactttgatgctgacggctcgggatatctcgagggtaaagagctgcagaatcttatccaggagctgcagcaggctaggaagaaggctgggttggaattgagcccagaaatgaagacattcgtcgatcagtacggacagcgggacgacggcaagattggcatcgttgagcttgcgcatgtgctgcccacagaggagaacttcttgcttttgttccggtgccagcagcttaaatcatgcgaggagttcatgaagacttggcggaagtatgatacagaccactcaggctttatagaaacggaggaactgaagaacttcttaaaggacctccttgagaaggccaacaaaactgttgatgatacaaagcttgcagaatataccgatctcatgctaaaattattcgattcaaacaatgatggcaagctggaattgacagagatggctcgcctcttgccagtgcaggaaaatttcctcttgaaatttcaggggatcaaaatgtgtggcaaggagtttaacaaggcatttgaactgtatgatcaggacggtaatggctatattgacgagaatgagttagatgcgttactgaaagacctgtgcgagaaaaacaagcaggacctggatattaacaacattactacatacaaaaagaacatcatggcactctcagacggaggaaagttgtacagaaccgatctcgccctgatcttatgtgccggtgacaactag

SEQ ID NO: 150803 - DNA, 615 bp, Artificial Sequence
  derived and/or modified sequence
atgaagacgttcgtggatcaatatgggcagcgtgacgatggcaagatcggcatcgtcgaactggctcatgtcctcccaaccgaggaaaattttctcctgctgtttcggtgtcaacagttaaagtcatgtgaagagtttatgaagacctggaggaagtacgacaccgaccactcaggattcatcgaaacggaagagctaaagaacttcctcaaagacctgctggagaaggctaacaaaaccgtggatgacaccaagcttgccgagtacactgatctcatgctaaagctgttcgattcgaataatgatgggaagctggagctcacagaaatggcacgactgctgccagtgcaagaaaactttctgctgaaatttcaggggatcaaaatgtgcggaaaagagttcaacaaggcctttgagctgtatgaccaggatggaaacgggtatatcgacgagaatgagttagacgctttactaaaagacctatgcgagaaaaataagcaggacttagatatcaataacattactacttataaaaagaatattatggcactgagcgacggtggcaaactgtatcgtacggatttagcccttattctgtgcgccggtgacaactag

SEQ ID NO: 150804 - DNA, 2533 bp, Artificial Sequence
  derived and/or modified sequence
agggagagaactctggaggaacgctgagctgagcagcaccgaggacagcgcccggcagcgcccgcgcccaggtctccctccgcagccctgactcgcgcacacgctgagcttttgctcactccccctcgcgcggacacagacacacgcatattcacacacccagacacacaccccgctgtacaatggcagaatcccacctgcagtcatccctcatcacagcctcacagtttttcgagatctggctccatttcgacgctgacggaagtggttacctggaaggaaaggagctgcagaacttgatccaggagctccagcaggcgcgaaagaaggctggattggagttatcacctgaaatgaaaacttttgtggatcagtatgggcaaagagatgatggaaaaataggaattgtagagttggctcacgtattacccacagaagagaatttcctgctgctcttccgatgccagcagctgaagtcctgtgaggaattcatgaagacatggagaaaatatgatactgaccacagtggcttcatagaaactgaggagcttaagaactttctaaaggacctgctagaaaaagcaaacaagactgttgatgacacaaaattagccgagtatacagacctaatgctgaaactatttgattcaaataatgatgggaagctggaattaactgagatggccaggttactaccagtgcaggagaattttcttcttaaattccagggaatcaaaatgtgtgggaaagagttcaataaggcttttgagctgtatgatcaggacggcaatggatacatagatgaaaatgaactggatgctttactgaaggatctgtgcgagaagaataaacaggatctggatattaataatattacaacatacaagaagaacataatggctttgtcggatggagggaagctgtaccgaacggatcttgctcttattctctgtgctggggataactagagttggtggccgcaaccacttgctagtgatacactgtatctaaaaaataactgtgcactataagggagtaggctgtattttcttttatatctgtaaatttaactgcatatagataattatccaggatgtgtggctcattcttttcagcttgtttctatactgtttgtaatatacagtttttgtaaccatatgattgaaaagaagaaagtctatgcttaggccagtcagtacacccaattttaaaaaataacatattcttgctttcacaaatatagttgaacaagatttccctaaaaattccaccaggattaatctctaaaattctagtctctgatttgcaaatgcacatttgtcactgaataatggaattatgtataacaagccaaacattcttattttagacaaccatagaactgtcccacaaaatatttctaagcttatttctaactattaggaggaatgtgcttttccatctaaaatactcaccaaaatatagttaattgtggctttatgaagttaacagtctcattacagatttagtttaccaatcaacagcatgtctactgcttggatccatacaaaactatcggttcaagttgatgtgacaagggaagggagcaccagatgacacataaatctgtctgattctatgcctgtatttccaacaaacttactgtcagagaatatgacctaaatccattttctaaactgttttcatgtgttgcaaattattctagtcaactgctgttttatgtcatactctgtgtaatctctgattaaatttaatatactgcatatcctggtgtctagtttgcatacttcctggattttctttctatgtagaactgttcatttccaccaagggtatctgctgcctctgaaaatatttttttctagctataacaactctattttttactacataattaaattttaatgtaaaattcatagcatcctgattattgaatgttatatcatcaatacttttgtgtattctgtggattctatatttcatattgagatcagcattcaaaatagttctatttctatctgcaaatagtttcaaatgagtttaaaaaaataacatctgaaaagaaatgctaatgtaatcatttatcttatctagcaagaagattctaaaacattctttaacatacatctaagtcagtttcacatatttgtagctagaatatcctatactggttatagttgatatgtaacagttggtgattttagatttctttgattgtgaaacagggagctatgagagatgtgtccatgtgaaatttacagttactgcctaggagttaatgatcgttctgggtcagcttgaatgtccccattctataaattcaacacttattttctgaattcataaaaataaccaaaaaatgtgagctataatgtttccctcaagaacaaacagaaacgagatttgccaaaaactaaaattcaacaaatgatgttgagtgggagattggctttgcctttagcgtgtaaatggaagcactgccattagactgaatttaactactaagaataaataaagaagaaaataaccttaa

SEQ ID NO: 150805 - DNA, 1490 bp, Artificial Sequence
  derived and/or modified sequence
aagaaacagatctgcagattatggatctcttactctatcaccaattattattgttgtgatgttgatgtagttggggagatgagaaaacatcttgtcctcactaagggagttatcacctgaaatgaaaacttttgtggatcagtatgggcaaagagatgatggaaaaataggaattgtagagttggctcacgtattacccacagaagagaatttcctgctgctcttccgatgccagcagctgaagtcctgtgaggaattcatgaagacatggagaaaatatgatactgaccacagtggcttcatagaaactgaggagcttaagaactttctaaaggacctgctagaaaaagcaaacaagactgttgatgacacaaaattagccgagtatacagacctaatgctgaaactatttgattcaaataatgatgggaagctggaattaactgagatggccaggttactaccagtgcaggagaattttcttcttaaattccagggaatcaaaatgtgtgggaaagagttcaataaggcttttgagctgtatgatcaggacggcaatggatacatagatgaaaatgaactggatgctttactgaaggatctgtgcgagaagaataaacaggatctggatattaataatattacaacatacaagaagaacataatggctttgtcggatggagggaagctgtaccgaacggatcttgctcttattctctgtgctggggataactagagttggtggccgcaaccacttgctagtgatacactgtatctaaaaaataactgtgcactataagggagtaggctgtattttcttttatatctgtaaatttaactgcatatagataattatccaggatgtgtggctcattcttttcagcttgtttctatactgtttgtaatatacagtttttgtaaccatatgattgaaaagaagaaagtctatgcttaggccagtcagtacacccaattttaaaaaataacatattcttgctttcacaaatatagttgaacaagatttccctaaaaattccaccaggattaatctctaaaattctagtctctgatttgcaaatgcacatttgtcactgaataatggaattatgtataacaagccaaacattcttattttagacaaccatagaactgtcccacaaaatatttctaagcttatttctaactattaggaggaatgtgcttttccatctaaaatactcaccaaaatatagttaattgtggctttatgaagttaacagtctcattacagatttagtttaccaatcaacagcatgtctactgcttggatccatacaaaactatcggttcaagttgatgtgacaagggaagggagcaccagatgacacataaatctgtctgattctatgcctgtatttccaacaaacttactgtcagagaatatgacctaaatccattttctaaactgttttcatgtgttgcaaattattctagtcaactgctgttttatg

SEQ ID NO: 150806 - DNA, 786 bp, Artificial Sequence
  derived and/or modified sequence
atggccgagagccacctgcagagcagcctgatcaccgccagccagttcttcgagatctggctgcacttcgacgccgacggcagcggctacctggagggcaaggagctgcagaacctgatccaggagctgcagcaggccagaaagaaggccggcctggagctgagccccgagatgaagaccttcgtggaccagtacggccagagagacgacggcaagatcggcatcgtggagctggcccacgtgctgcccaccgaggagaacttcctgctgctgttcagatgccagcagctgaagagctgcgaggagttcatgaagacctggagaaagtacgacaccgaccacagcggcttcatcgagaccgaggagctgaagaacttcctgaaggacctgctggagaaggccaacaagaccgtggacgacaccaagctggccgagtacaccgacctgatgctgaagctgttcgacagcaacaacgacggcaagctggagctgaccgagatggccagactgctgcccgtgcaggagaacttcctgctgaagttccagggcatcaagatgtgcggcaaggagttcaacaaggccttcgagctgtacgaccaggacggcaacggctacatcgacgagaacgagctggacgccctgctgaaggacctgtgcgagaagaacaagcaggacctggacatcaacaacatcaccacctacaagaagaacatcatggccctgagcgacggcggcaagctgtacagaaccgacctggccctgatcctgtgcgccggcgacaactag

SEQ ID NO: 150807 - DNA, 615 bp, Artificial Sequence
  derived and/or modified sequence
atgaagaccttcgtggaccagtacggccagagagacgacggcaagatcggcatcgtggagctggcccacgtgctgcccaccgaggagaacttcctgctgctgttcagatgccagcagctgaagagctgcgaggagttcatgaagacctggagaaagtacgacaccgaccacagcggcttcatcgagaccgaggagctgaagaacttcctgaaggacctgctggagaaggccaacaagaccgtggacgacaccaagctggccgagtacaccgacctgatgctgaagctgttcgacagcaacaacgacggcaagctggagctgaccgagatggccagactgctgcccgtgcaggagaacttcctgctgaagttccagggcatcaagatgtgcggcaaggagttcaacaaggccttcgagctgtacgaccaggacggcaacggctacatcgacgagaacgagctggacgccctgctgaaggacctgtgcgagaagaacaagcaggacctggacatcaacaacatcaccacctacaagaagaacatcatggccctgagcgacggcggcaagctgtacagaaccgacctggccctgatcctgtgcgccggcgacaactag

SEQ ID NO: 150808 - protein, 210 aa, Artificial Sequence
  derived and/or modified sequence
MRPRLWLLLAAQLTVLHGNSVLQQTPAYIKVQTNKMVMLSCEAKISLSNMRIYWLRQRQAPSSDSHHEFLALWDSAKGTIHGEEVEQEKIAVFRDASRFILNLTSVKPEDSGIYFCMIVGSPELTFGKGTQLSVVDFLPTTAQPTKKSTLKKRVCRLPRPETQKGPLCSPITLGLLVAGVLVLLVSLGVAIHLCCRRRRARLRFMKQFYK

SEQ ID NO: 150809 - protein, 207 aa, Artificial Sequence
  derived and/or modified sequence
MRPRLWLLLAAQLTVLHGNSVLQQTPAYIKVQTNKMVMLSCEAKISLSNMRIYWLRQRQAPSSDSHHEFLALWDSAKGTIHGEEVEQEKIAVFRDASRFILNLTSVKPEDSGIYFCMIVGSPELTFGKGTQLSVVDFLPTTAQPTKKSTLKKRVCRLPRPETQKGPLCSPITLGLLVAGVLVLLVSLGVAIHLCCRRRRARLRFMKQ

SEQ ID NO: 150810 - DNA, 633 bp, Artificial Sequence
  derived and/or modified sequence
atgcgccctcggctctggctcctcctggccgcccagctgaccgtactgcacggtaattccgtgctgcagcagactcctgcatacatcaaagtccagactaacaagatggtcatgctctcctgcgaagctaagatttcgctgtccaacatgaggatctactggttgcgccagagacaagccccatcgtcggactctcaccacgagttcctcgcattgtgggatagcgcaaaaggcaccatccacggtgaggaagtggaacaagaaaaaatcgccgtatttagagacgcgagtcgtttcatattaaatcttacctctgttaaaccggaagatagcgggatttacttctgcatgatcgtgggctccccggagctgacatttgggaagggcacacagttgagtgtggtggacttcctgcccactacagcccagccaacaaaaaagagtactttgaagaaaagagtgtgccgactgccaaggcctgaaactcagaagggacctctgtgctctccaattactcttggactgctcgttgctggcgtgctggtgctgctcgtctcactgggcgtggctatccatctgtgttgccggcgcaggagggcccggctaagattcatgaagcaattctacaagtag

SEQ ID NO: 150811 - DNA, 624 bp, Artificial Sequence
  derived and/or modified sequence
atgagaccaaggctgtggcttcttttagcagcgcagctaacagtgcttcacggcaattctgtgctgcagcagactcccgcctacatcaaagttcagactaacaagatggttatgttatcctgtgaagctaagatatcgttatcaaacatgcgcatctactggctccggcaaagacaggcgccaagttcagactcccaccatgaatttctggcgttgtgggactctgcaaagggaacaattcatggggaggaggttgaacaggaaaaaatcgccgtgtttcgcgatgcttcccggtttatcttaaacctgacctcggtaaagccggaagactcaggaatctacttttgcatgatcgtggggagccccgagcttaccttcggtaaaggcactcagctgagcgtggtcgatttcctgcccaccaccgcacagccaactaagaagtctactttgaaaaaacgtgtgtgcagacttccaaggccagaaactcagaagggacctctgtgtagtcctatcacactgggacttttggtggccggcgtgctggtcctgctggtgtctctcggcgtggcaatccatttgtgctgcaggcgacgacgcgcacggcttcgctttatgaagcaatag

SEQ ID NO: 150812 - DNA, 633 bp, Artificial Sequence
  derived and/or modified sequence
atgaggccccggctgtggctgctgctggccgcccagctgactgtgctgcacggcaacagcgtgctgcagcagaccccagcctacatcaaggtgcagaccaacaagatggtgatgctgagctgtgaggccaagatcagcctgagcaacatgaggatctactggctgcggcagaggcaggcccccagcagtgacagccaccacgagttcctggccctgtgggacagcgccaagggcaccatccatggagaggaggtggagcaggagaagattgctgtgttcagagatgccagccgcttcatcctgaacctgacctctgtgaagccagaagattctggcatctacttctgcatgattgtgggcagccctgagctgaccttcggcaagggcacccagctgtctgtggtggacttcctgcccaccacagcccagcccaccaagaagagcaccctgaagaagagggtgtgccgcctgcccaggcctgagacccagaagggccccctgtgcagccccatcaccctgggcctgctggtggccggcgtgctggtgctgctggtgtccctgggcgtggccatccacctgtgctgcagaagaagaagagcccggctgcgcttcatgaagcagttctacaagtag

SEQ ID NO: 150813 - DNA, 624 bp, Artificial Sequence
  derived and/or modified sequence
atgaggccccggctgtggctgctgctggccgcccagctgactgtgctgcacggcaacagcgtgctgcagcagaccccagcctacatcaaggtgcagaccaacaagatggtgatgctgagctgtgaggccaagatcagcctgagcaacatgaggatctactggctgcggcagaggcaggcccccagcagtgacagccaccacgagttcctggccctgtgggacagcgccaagggcaccatccatggagaggaggtggagcaggagaagattgctgtgttcagagatgccagccgcttcatcctgaacctgacctctgtgaagccagaagattctggcatctacttctgcatgattgtgggcagccctgagctgaccttcggcaagggcacccagctgtctgtggtggacttcctgcccaccacagcccagcccaccaagaagagcaccctgaagaagagggtgtgccgcctgcccaggcctgagacccagaagggccccctgtgcagccccatcaccctgggcctgctggtggccggcgtgctggtgctgctggtgtccctgggcgtggccatccacctgtgctgcagaagaagaagagcccggctgcgcttcatgaagcagtag

SEQ ID NO: 150814 - DNA, 633 bp, Artificial Sequence
  derived and/or modified sequence
atgcggccccggctgtggctgctgctggccgcccagctgaccgtgctccacggaaactcggtcttgcagcaaacacccgcctacattaaagtgcaaaccaacaaaatggtcatgctctcgtgcgaggctaaaatctctctgagcaacatgcgcatttactggctgcgccagcggcaggccccaagttccgatagtcaccacgaatttctagccctctgggattctgcaaaagggactatccacggagaagaagtcgaacaggagaaaattgctgtcttcagagatgcttccagatttattctcaatctgacctcggtgaagccagaagacagtgggatctacttctgcatgatcgtgggatctcccgagttgactttcgggaaagggacccagctgagcgttgtggacttcctgccaactaccgcccagcccactaagaagagtaccctcaaaaaacgcgtttgcagactccctcggccagagactcagaagggcccgctgtgtagccctatcactctgggtctgctagtggctggggtattggtgcttctagtaagcctcggcgtggctattcacctgtgttgtaggaggcgtcgggctaggcttaggtttatgaagcaattctacaaatag

SEQ ID NO: 150815 - DNA, 624 bp, Artificial Sequence
  derived and/or modified sequence
atgcggccccggctgtggctgctgctggccgcccagctgaccgtgttgcacggcaattccgtccttcagcaaactcctgcctatatcaaggtacagaccaataaaatggtcatgctaagctgcgaggctaaaatcagtctgtcgaacatgcgtatctactggctccgacagagacaagcaccttcatcagacagtcatcacgaattcctggccctctgggacagcgctaaaggtaccatacacggtgaggaagttgaacaggaaaagattgccgtctttcgtgatgcctcacgcttcattctaaatctaacaagtgtgaaaccagaggatagcggtatttatttttgcatgattgtgggaagccccgaactgacattcggtaagggaacacagttatcagtagtagattttcttcctaccactgctcagcctacgaagaagagtactctaaaaaagagagtgtgcaggctgccgcggccggaaacacagaaagggcccttgtgcagccctattacccttggcctcttggtcgccggtgtgctagttcttctggtaagcctgggcgtagctattcacctgtgctgcaggcgtcggcgtgcccgactgcggttcatgaaacagtag

SEQ ID NO: 150816 - DNA, 633 bp, Artificial Sequence
  derived and/or modified sequence
atgaggccccgattatggttgcttctggccgcacaactcaccgttcttcatggaaactcagtcctgcaacagaccccagcctacatcaaagtgcaaacaaataaaatggttatgctgtcatgcgaggccaagattagcctcagtaatatgcgaatttactggctgagacagcgccaggccccatcaagtgactcccaccatgaatttctcgcactgtgggacagcgcgaaaggtacaatccatggtgaggaagtcgaacaggagaagatcgctgtcttccgcgacgcctcccggtttattttgaatctgacttctgttaagccagaagattcaggaatttacttttgtatgatcgtcggttcacccgaattgacgtttggcaagggcacccagcttagtgttgtagacttcctgcctactaccgcccagccaacaaaaaagtctaccttgaaaaagagggtgtgcaggttgcccaggcccgaaactcagaaaggaccgttgtgtagtccaattacactcggcctgttggtggccggtgtcctggtgctgctggtttcccttggggtggctattcacttgtgttgtagaagacggagggccaggcttaggttcatgaagcaattctacaagtag

SEQ ID NO: 150817 - DNA, 624 bp, Artificial Sequence
  derived and/or modified sequence
atgcggccaaggctttggctgctgctggcggcacagctcaccgtgctgcacggaaattccgttctacagcaaactcccgcttatatcaaggttcagaccaacaaaatggtcatgctttcctgcgaggccaagatctctttaagcaacatgagaatttattggctgcgacagagacaggcccctagctccgattcacatcacgagttcctcgctctgtgggacagcgccaagggaactattcatggtgaagaggtggaacaggagaagattgctgtgttcagggacgcttctcgtttcatacttaatctgactagcgtgaagcccgaagacagcgggatttatttctgtatgattgtgggaagccccgagctgacttttgggaaaggaactcagttaagcgtcgtggactttctccccaccaccgcccagcccactaagaagtccactttgaaaaagagggtttgcaggctaccacggccagaaacacagaaggggcctctatgcagcccaattacgttgggcctgttggttgcgggagtcctggtcttgttggtgtctctgggagtcgccattcatctgtgctgtcgacgcaggcgagccagattgaggtttatgaaacagtag

SEQ ID NO: 150818 - DNA, 1417 bp, Artificial Sequence
  derived and/or modified sequence
accccagccgcgactgtctccgccgagcccccggggccaggtgtcccgggcgcgccacgatgcggccgcggctgtggctcctcttggccgcgcagctgacagttctccatggcaactcagtcctccagcagacccctgcatacataaaggtgcaaaccaacaagatggtgatgctgtcctgcgaggctaaaatctccctcagtaacatgcgcatctactggctgagacagcgccaggcaccgagcagtgacagtcaccacgagttcctggccctctgggattccgcaaaagggactatccacggtgaagaggtggaacaggagaagatagctgtgtttcgggatgcaagccggttcattctcaatctcacaagcgtgaagccggaagacagtggcatctacttctgcatgatcgtcgggagccccgagctgaccttcgggaagggaactcagctgagtgtggttgatttccttcccaccactgcccagcccaccaagaagtccaccctcaagaagagagtgtgccggttacccaggccagagacccagaagggcccactttgtagccccatcacccttggcctgctggtggctggcgtcctggttctgctggtttccctgggagtggccatccacctgtgctgccggcggaggagagcccggcttcgtttcatgaaacaattttacaaatgagcagagaatacggttttggtgtcctgctacaaaaagacatcggtcagtaacgagcacgatgtggaaaaatgagagaagggacacattcaaccctggagagttcaatggctgctgaagctgcctgcttttcactgctgcaaggcctttctgtgtgtgatgtgcatgggagcaacttgttcgtgggtcatcgggaatactagggagaaggtttcattgcccccagggcacttcacagagtgtgctggaggactgagtaagaaatgctgcccatgccaccgcttccggctcctgtgctttccctgaactgggacctttagtggtggccatttagccaccatctttgcaggttgctttgccctggtagggcagtaacattgggtcctgggtctttcatggggtgatgctgggctggctccctcttggtcttcccaggctggggctgaccttcctcgcagagaggccaggtgcaggttgggaatgaggcttgctgagaggggctgtccagttcccagaaggcatatcagtctctgagggcttcctttggggccgggaacttgcgggtttgaggataggagttcacttcatcttctcagctcccatttctactcttaagtttctcagctcccatttctactctcccatggcttaatgcttctttcattttctgtttgttttatacaaatgtcttagttgtacaaataaagtcccaggttaaagataacaaa

SEQ ID NO: 150819 - DNA, 1526 bp, Artificial Sequence
  derived and/or modified sequence
gtcccgggcgcgccacgatgcggccgcggctgtggctcctcttggccgcgcagctgacagttctccatggcaactcagtcctccagcagacccctgcatacataaaggtgcaaaccaacaagatggtgatgctgtcctgcgaggctaaaatctccctcagtaacatgcgcatctactggctgagacagcgccaggcaccgagcagtgacagtcaccacgagttcctggccctctgggattccgcaaaagggactatccacggtgaagaggtggaacaggagaagatagctgtgtttcgggatgcaagccggttcattctcaatctcacaagcgtgaagccggaagacagtggcatctacttctgcatgatcgtcgggagccccgagctgaccttcgggaagggaactcagctgagtgtggttgatttccttcccaccactgcccagcccaccaagaagtccaccctcaagaagagagtgtgccggttacccaggccagagacccagaagggcccactttgtagccccatcacccttggcctgctggtggctggcgtcctggttctgctggtttccctgggagtggccatccacctgtgctgccggcggaggagagcccggcttcgtttcatgaaacagtaagtgtataacctgggtgtggccttgggttcctcagcccctgctgcagcttgcagcctctaactgcagcgaggagccaaagtcagacctcatcttccaaagatcatagactcggccgggcatagtagtgcacacctgtagtcacagctactcgggaggctgaagcaggaggatcacttgagcccaggagttcaaggctgcagtgagctatgatggtaccactgcactccagcctgggcaacagagtgagactccatctaaaaaaaaaaattacagactgtataaatagatggggtgatagagttcaggaacctaagagataacctaaacaatggacaaacaaaatgtatttttgaatactctaaaattgtaaatagccatataaattcatattactatatgctctgcattgttgtacacattatatttatatcgagagtggcttaaacatgcctgctggattttatgggcaattttcaatgatattttaattgtgtacaattttcaccttgtgtgttggatttagaagctgccccctacccaagagataataacttgagtgtagctgtctcaggccagacctctagaaagttccattcaaggccgggtgcagtggctcaagcctgtaatcccagcactttgggaggcccaaggcaggtagatcgcctgaggtcaggagtttgagaccagcctggccaacatggtgaaaccccatctctactaaaaatacaaaaaattaactggacgtggtggcaggcgcctatgtaatcccagctactcgagaggctgaggtaagagaatcacttgaaccccggaggcagaggttgcaatgagcagagatcacaccattccgctgcagcctgggcaacaagagtgaaactctgtctc

SEQ ID NO: 150820 - DNA, 633 bp, Artificial Sequence
  derived and/or modified sequence
atgagacccagactgtggctgctgctggccgcccagctgaccgtgctgcacggcaacagcgtgctgcagcagacccccgcctacatcaaggtgcagaccaacaagatggtgatgctgagctgcgaggccaagatcagcctgagcaacatgagaatctactggctgagacagagacaggcccccagcagcgacagccaccacgagttcctggccctgtgggacagcgccaagggcaccatccacggcgaggaggtggagcaggagaagatcgccgtgttcagagacgccagcagattcatcctgaacctgaccagcgtgaagcccgaggacagcggcatctacttctgcatgatcgtgggcagccccgagctgaccttcggcaagggcacccagctgagcgtggtggacttcctgcccaccaccgcccagcccaccaagaagagcaccctgaagaagagagtgtgcagactgcccagacccgagacccagaagggccccctgtgcagccccatcaccctgggcctgctggtggccggcgtgctggtgctgctggtgagcctgggcgtggccatccacctgtgctgcagaagaagaagagccagactgagattcatgaagcagttctacaagtag

SEQ ID NO: 150821 - DNA, 624 bp, Artificial Sequence
  derived and/or modified sequence
atgagacccagactgtggctgctgctggccgcccagctgaccgtgctgcacggcaacagcgtgctgcagcagacccccgcctacatcaaggtgcagaccaacaagatggtgatgctgagctgcgaggccaagatcagcctgagcaacatgagaatctactggctgagacagagacaggcccccagcagcgacagccaccacgagttcctggccctgtgggacagcgccaagggcaccatccacggcgaggaggtggagcaggagaagatcgccgtgttcagagacgccagcagattcatcctgaacctgaccagcgtgaagcccgaggacagcggcatctacttctgcatgatcgtgggcagccccgagctgaccttcggcaagggcacccagctgagcgtggtggacttcctgcccaccaccgcccagcccaccaagaagagcaccctgaagaagagagtgtgcagactgcccagacccgagacccagaagggccccctgtgcagccccatcaccctgggcctgctggtggccggcgtgctggtgctgctggtgagcctgggcgtggccatccacctgtgctgcagaagaagaagagccagactgagattcatgaagcagtag

SEQ ID NO: 150822 - protein, 814 aa, Artificial Sequence
  derived and/or modified sequence
MDAAFLLVLGLLAQSLCLSLGVPGWRRPTTLYPWRRAPALSRVRRAWVIPPISVSENHKRLPYPLVQIKSDKQQLGSVIYSIQGPGVDEEPRGVFSIDKFTGKVFLNAMLDREKTDRFRLRAFALDLGGSTLEDPTDLEIVVVDQNDNRPAFLQEAFTGRVLEGAVPGTYVTRAEATDADDPETDNAALRFSILQQGSPELFSIDELTGEIRTVQVGLDREVVAVYNLTLQVADMSGDGLTATASAIITLDDINDNAPEFTRDEFFMEAIEAVSGVDVGRLEVEDRDLPGSPNWVARFTILEGDPDGQFTIRTDPKTNEGVLSIVKALDYESCEHYELKVSVQNEAPLQAAALRAERGQAKVRVHVQDTNEPPVFQENPLRTSLAEGAPPGTLVATFSARDPDTEQLQRLSYSKDYDPEDWLQVDAATGRIQTQHVLSPASPFLKGGWYRAIVLAQDDASQPRTATGTLSIEILEVNDHAPVLAPPPPGSLCSEPHQGPGLLLGATDEDLPPHGAPFHFQLSPRLPELGRNWSLSQVNVSHARLRPRHQVPEGLHRLSLLLRDSGQPPQQREQPLNVTVCRCGKDGVCLPGAAALLAGGTGLSLGALVIVLASALLLLVLVLLVALRARFWKQSRGKGLLHGPQDDLRDNVLNYDEQGGGEEDQDAYDISQLRHPTALSLPLGPPPLRRDAPQGRLHPQPPRVLPTSPLDIADFINDGLEAADSDPSVPPYDTALIYDYEGDGSVAGTLSSILSSQGDEDQDYDYLRDWGPRFARLADMYGHPCGLEYGARWDHQAREGLSPGALLPRHRGRTA

SEQ ID NO: 150823 - DNA, 2445 bp, Artificial Sequence
  derived and/or modified sequence
atggatgccgcattcctcctggtgcttggtctgctggcgcagtcactgtgcctgagcttgggagttcccgggtggcggcgacctaccacgctttatccatggaggcgggcaccagctctcagccgcgtgcggcgcgcatgggtaatccctcccattagcgtttcagagaatcacaagcgattgccttatcctctggtccagatcaaaagtgacaagcaacaactgggttcggtgatatattcaatccaaggtcccggtgtagacgaggagccgcgcggcgtgttctcaatcgacaagttcaccggtaaagtattcctcaatgccatgctagaccgggaaaagaccgacagattcaggttacgcgctttcgcgcttgatctgggcgggtcaaccttagaggacccaaccgatctcgaaattgtagttgttgatcagaatgacaaccggcccgcttttcttcaggaagcctttactgggagagtcttggagggagcagttccaggcacctatgttactagggcagaggccaccgatgccgatgatccggagacagacaatgccgcattacgattctccattttacagcagggctctccagaacttttcagcattgatgagctgactggtgaaatcaggaccgtgcaggtgggcctggatagagaagttgtggctgtttacaacttaaccctgcaggtagctgatatgtcaggcgacgggctgacagcaaccgcctctgccataataactctggacgatatcaacgataacgcccccgaattcacgcgcgacgagtttttcatggaggctattgaggccgtgagcggagtggacgtgggaaggctagaagtggaggaccgggatttgccagggagccctaactgggtcgcccggttcactatcctggagggagatcctgatggccagtttacaatacgaaccgacccgaagaccaacgagggagttctgtctatcgttaaagctcttgactacgagtcttgcgagcattacgagctgaaggttagcgtacagaacgaagcaccactccaggctgcagccctgagagccgagcggggtcaggctaaggtgagagttcacgtccaagatactaatgagccccccgtgtttcaggagaaccccttacggaccagcctcgctgaaggtgccccgccaggcaccctggtggcgacctttagtgcccgggaccctgacactgagcagctgcagcggctgtcttactccaaggactatgatccggaggactggctgcaggtggacgcggccaccggaaggatccaaacacagcacgtcctctcccccgcgtctccctttttgaaaggcgggtggtatcgcgccattgtcctggcccaggacgacgcgagtcagccccgaacagcaacaggtacccttagcatcgagattttggaagtaaacgaccatgcccctgtgttggctccccccccccccggctctctgtgcagcgaaccccatcagggacccggtttgcttctcggagccacagacgaggatctccccccccacggcgcgcctttccacttccagttatcacccaggctgccggagttaggtcgcaattggtctctatcacaagtgaatgtctcacatgctcgactgagaccacggcatcaggttcccgagggcctgcacaggctgagcctcctcctcagggacagcgggcagcctccgcaacagagggagcaaccacttaatgtgaccgtgtgtcgctgcggcaaggacggcgtttgccttcccggcgctgccgctctcctggccggcggcacaggcttatccctgggggcgctagttattgtgctcgcgtcagcactattgttgctcgtgctggtcttgctggtggccctacgcgctcgcttttggaagcagagccggggaaagggtctcttgcacgggccccaggacgatctaagggacaacgtcctcaactatgacgagcagggtggaggggaagaggaccaagatgcatacgatattagtcagctgaggcaccctaccgccctgagcctgcccctaggcccccccccattgcgacgcgatgccccccaggggaggttgcaccctcagcccccaagggtgcttcctacctctcctttggacatcgccgactttatcaatgatggcctagaagccgccgactctgacccatcagtgcccccttatgatacggcgcttatttatgactacgaaggcgacggaagcgttgccggcacacttagctctatcctgagttcccagggggatgaagatcaggattacgactacctgcgggactggggcccaagatttgcgcggctggcagatatgtatgggcacccatgcggactggagtacggagcccgttgggaccaccaggccagagagggcctatcccctggcgccctcttgcctcggcaccgaggacgaaccgcatag

SEQ ID NO: 150824 - DNA, 2445 bp, Artificial Sequence
  derived and/or modified sequence
atggatgctgccttcctgctggtgctgggcctgctggcccagagcctgtgcctgagcctgggcgtgcccggctggaggcggcccaccaccctgtacccctggaggcgggccccagccctgagccgggtgcggcgggcctgggtgatcccccccatctctgtgtctgagaaccacaagaggctgccctaccccctggtgcagatcaagagtgacaagcagcagctgggcagcgtcatctacagcatccagggccctggggtggatgaggagccccggggcgtcttcagcattgacaagttcaccgggaaggtgttcctgaatgccatgctggaccgggagaagacagaccgcttccggctgcgggcctttgccctggacctgggcggcagcaccctggaggaccccacagacctggagatcgtggtggtggaccagaatgacaacagacctgccttcctgcaggaggccttcaccggccgggtgctggagggcgctgtgcccggcacctacgtgaccagggctgaggccacagatgctgatgatcctgagacagacaatgctgccctgcgcttcagcatcctgcagcagggcagccctgagctgttcagcattgatgagctgaccggggagatcagaacagtgcaggtgggcctggaccgggaggtggtggccgtgtacaacctgaccctgcaggtggccgacatgtctggagatggcctgacagccacagccagcgccatcatcaccctggatgacatcaatgacaatgcccctgagttcaccagagatgagttcttcatggaggccatcgaggccgtgtctggagtggatgtgggccgcctggaggtggaggaccgggacctgcccggcagccccaactgggtggcccgcttcaccatcctggagggggaccctgatggccagttcaccatcagaacagaccccaagaccaatgaaggagtgctgagcatcgtgaaggccctggactatgagagctgtgagcactatgagctgaaggtgtctgtgcagaatgaggcccccctgcaggccgccgccctgcgggcagagcggggccaggccaaggtgcgggtgcacgtgcaggacaccaatgagccccctgtgttccaggagaaccccctgcggaccagcctggccgagggcgcccctcctggcaccctggtggccaccttcagcgcccgggaccctgacacagagcagctgcagaggctgagctacagcaaggactatgaccctgaggactggctgcaggtggatgctgccaccggccgcatccagacccagcacgtgctgagccctgccagccccttcctgaagggcggctggtaccgggccatcgtgctggcccaggatgatgccagccagcccaggacagccaccggcaccctgagcattgagatcctggaggtgaatgaccacgcccctgtgctggcccctcctcctcctggcagcctgtgcagcgagccccaccagggccctggcctgctgctgggcgccacagatgaggacctgccccctcatggagcccccttccacttccagctgagcccccggctgcctgagctgggcaggaactggagcctgagccaggtgaatgtgtcccatgcccggctgcggcccaggcaccaggtgcctgagggcctgcaccggctgagcctgctgctgcgggacagcggccagcccccccagcagcgggagcagcccctgaatgtgacagtgtgccgctgtgggaaggatggagtgtgcctgcccggggctgctgccctgctggccggcggcaccggcctgagcctgggcgccctggtgattgtgctggccagcgccctgctgctgctggtgctggtgctgctggtggccctgcgggcccgcttctggaagcagagccggggcaagggcctgctgcacggcccccaggatgacctgcgggacaacgtgctgaactatgatgagcagggcggcggggaggaggaccaggatgcctatgacatcagccagctgcggcaccccacagccctgagcctgcccctgggccccccacccctgcggagagatgccccccagggccgcctgcacccccagcccccccgggtgctgcccaccagccccctggacattgctgacttcatcaatgatggcctggaggccgctgacagcgaccccagcgtgcccccctatgacacagccctgatctatgactatgaaggagatggctctgtggccggcaccctgagcagcatcctgagcagccagggagatgaggaccaggactatgactacctgcgggactggggccccaggtttgcccggctggccgacatgtatggccacccctgtggcctggagtatggagcccgctgggaccaccaggcccgggagggcctgagccctggggccctgctgcccaggcaccggggccgcacagcctag

SEQ ID NO: 150825 - DNA, 2445 bp, Artificial Sequence
  derived and/or modified sequence
atggacgccgccttcctgctggtgctgggcctgctggcccagagcttatgcctctccctaggagttcccggctggcgcagacccactaccctttatccgtggcgacgcgcaccagcactgtcgcgcgtcagaagggcctgggtgatccctccgatctcagtgagcgagaaccataaaagacttccttatcccctggtccagattaaaagcgacaagcagcaattaggctcagtgatttattcaattcagggcccaggggtcgacgaagaacctcgcggagtcttcagcattgacaaattcacaggcaaggtgtttctcaatgcgatgcttgaccgagaaaaaaccgaccgcttccgcctgagggctttcgctctcgatcttggaggctcgacgctggaggatccaacggacctggagatagttgtcgtcgaccagaatgacaacagacctgccttcttacaggaggcctttaccgggagggtactagaaggtgctgttcctggcacatatgtgacacgcgccgaagctaccgacgccgatgaccccgagacggacaacgcggccctccgcttcagcatccttcagcagggatcccctgagctcttcagtattgacgagctgacaggggaaattagaaccgtacaggtgggcctcgacagggaggtagtggccgtttacaatctaactcttcaggtggctgatatgtccggggatggcttaacagccactgctagcgctataataaccctggacgatattaacgataatgcacctgagtttaccagagatgaattcttcatggaggcgattgaagcagtgtccggggtggatgtggggagactcgaagtcgaggatagagacctgccaggctcacctaactgggtagcacgtttcactatacttgagggcgatcccgacggccagtttacaatacggacagaccccaagactaacgaaggagtcctttccattgtgaaggccctggactacgagtcttgtgaacattacgaattgaaagtctcggtgcagaacgaggctcccctgcaggcagctgctctgcgggcagaacggggacaagccaaggtcagagtacacgtgcaggacacgaacgagcctcctgtattccaggagaaccccctgcgcaccagtttagccgaaggcgccccccccgggacactggtcgcgacattttctgctagagaccccgataccgagcaattacagagactctcttattccaaggactatgacccggaagactggctgcaggtggatgctgcaacagggcgaattcagactcagcatgtcctgagtccggcgtctccatttttaaaggggggatggtatagagccattgttctggcccaagacgatgcaagccagcctcgtaccgcaaccggcacattgtctattgaaattctggaggtaaatgaccacgctcccgtcctggctccgccccccccaggaagcctgtgctctgagccacaccagggtcccggattactgctcggggcgaccgatgaggatctgcccccacatggggcaccttttcattttcagttgtcgccccgtctgcccgaattgggtaggaattggtcactgtcacaagtgaatgtcagtcatgcaaggttgcggcctcggcaccaagttcccgagggcctgcaccgtctgtctctgttgctgagagattccggccaaccaccccagcaacgcgaacagcctttgaacgtgaccgtttgtcgctgcggcaaggatggcgtgtgtctgcctggcgccgctgccctgttagccggtggtaccggactttctctgggggcccttgtaattgtcctggcgagcgccttactgctgctggtgctggtgctgctggtggcactgcgagctcgattttggaagcaatcccgcggcaagggccttctgcacggccctcaggacgatctcagagacaatgtgctgaattatgatgaacagggaggcggggaagaagaccaggatgcctatgacattagccaactacggcatcctaccgccctatctctccctctgggccccccaccattaagacgggatgctccccaaggaaggctccatccccagccacccagagtcctccctacaagccctctcgatatagcagatttcatcaatgatggactggaggccgcagacagtgatcctagcgttcccccatacgataccgctcttatttacgattatgagggagacggctcagttgccgggacgttgagttccattctgtcctcccagggcgatgaagatcaggactatgactacctgcgtgactggggccctagattcgcacggctcgcagatatgtacggacatccatgcgggctagaatatggggctcgctgggatcaccaggcgagagaaggcctgtcgccaggtgccctgctcccgcgccatagggggagaacggcatag

SEQ ID NO: 150826 - DNA, 2445 bp, Artificial Sequence
  derived and/or modified sequence
atggacgcagctttcctcctggtgctaggcttactggcacaatcgttatgcctgagtttgggggtgcccggatggcgcagacctactaccctatatccatggcgacgtgcaccggctttatcccgggtgagaagggcgtgggttattccacctatttccgtgagtgaaaaccacaagaggctgccgtaccccttggtccaaatcaagtccgataaacaacagctcgggtcagtaatctatagtatccaggggcctggggtggatgaggaaccacgcggtgtctttagcatagacaagtttaccggtaaggtctttctcaatgctatgctagaccgggaaaagactgatcggtttagactgcgggctttcgctctggatcttggaggcagtacccttgaggaccctacggatctggagattgtggtggttgatcaaaacgataaccgaccggctttcttgcaggaggccttcactggcagagttctcgagggggctgtgcccggaacctacgttacccgagccgaggcaaccgatgccgacgatccggagaccgacaatgcggcactgagattctccatattacagcagggctcgcctgagctgttcagcatagatgagttgacaggagagatccggactgttcaagtcggcctagaccgagaagtggtggcggtctataatctcacccttcaggttgctgatatgtcaggtgacggactaaccgcaaccgcttctgctatcatcacacttgacgatatcaatgacaatgcacccgagttcactcgagacgagtttttcatggaggcaattgaagccgtctccggggtagatgttggcagactggaagtcgaagacagagacctccctggctcccctaactgggtggccagattcaccattctggagggcgatccggacgggcaattcacgattcgaacagacccaaagactaacgagggcgtgctctccattgttaaagcgttagactatgaatcatgtgagcattacgagctgaaggttagcgtgcagaatgaggctcccctgcaggctgcagcactgcgtgccgagcggggacaagctaaagttcgggtgcacgtgcaggatacaaatgagcccccagttttccaggagaatcctttgcggacgagtttggcggaaggggcacctcccggaaccctggtggccaccttttcagcgagggatccagatacagagcaactccaacggttgtcatatagtaaggactacgaccctgaagactggctgcaggttgacgccgcaacagggaggattcagactcagcacgtactgagcccagcctcaccattcctcaaaggagggtggtacagggctatagttcttgctcaggatgatgcctcacagcccaggacggctactggaaccttgtccattgaaattcttgaggtcaacgaccatgccccagtgctagctccccctccccctggaagcttgtgctccgaaccgcaccaaggcccaggtctactgctaggggctacggacgaagatttaccacctcacggtgcgcctttccacttccagctctctcctcgcctgccagaactggggcgaaactggtctctcagccaggtaaacgtgtcccacgccaggctgaggcctcggcaccaagttccagaaggactgcacaggctttcactgctgctcagagattcaggccagcctccccaacaacgcgaacagcccctgaatgtaactgtgtgcagatgcggtaaggatggagtctgtctgcctggcgctgctgctttactggctggcggtactggcctctctcttggggcactcgtcattgtactcgctagtgccctgctgttgttggtgctcgtgcttctggtcgccctcagggccagattctggaaacagtccagggggaaggggctgttgcatggccctcaggacgacttacgagacaatgtcctgaattacgacgagcagggcggtggcgaggaggatcaggacgcctacgacatttcgcagctgcggcacccaacagctctgagcttgcccctgggccctcctccccttaggagggacgcaccccagggtcggctccaccctcagccccctcgcgtacttcccacatcgcccctagacattgccgactttataaatgacgggctagaagcagccgattctgacccatcagtgcccccatacgacaccgctttaatctatgattatgagggcgacggcagcgtcgccggaaccctgagcagtatcctttcctcccagggtgacgaggaccaggactatgattatttacgtgactgggggccacgattcgccagactcgccgacatgtacgggcacccctgtggattagagtacggcgcacgctgggaccaccaggcccgagaaggcctctcacccggagcccttttgcccagacaccgcggacgcacagcatag

SEQ ID NO: 150827 - DNA, 2847 bp, Artificial Sequence
  derived and/or modified sequence
actcagcctggacgcgcttcttcgggtcgcgggtgcactccggcccggctcccgcctcggccccgatggacgccgcgttcctcctcgtcctcgggctgttggcccagagcctctgcctgtctttgggggttcctggatggaggaggcccaccaccctgtacccctggcgccgggcgcctgccctgagccgcgtgcggagggcctgggtcatccccccgatcagcgtatccgagaaccacaagcgtctcccctaccccctggttcagatcaagtcggacaagcagcagctgggcagcgtcatctacagcatccagggacccggcgtggatgaggagccccggggcgtcttctctatcgacaagttcacagggaaggtcttcctcaatgccatgctggaccgcgagaagactgatcgcttcaggctaagagcgtttgccctggacctgggaggatccaccctggaggaccccacggacctggagattgtagttgtggatcagaatgacaaccggccagccttcctgcaggaggcgttcactggccgcgtgctggagggtgcagtcccaggcacctatgtgaccagggcagaggccacagatgccgacgaccccgagacggacaacgcagcgctgcggttctccatcctgcagcagggcagccccgagctcttcagcatcgacgagctcacaggagagatccgcacagtgcaagtggggctggaccgcgaggtggtcgcggtgtacaatctgaccctgcaggtggcggacatgtctggagacggcctcacagccactgcctcagccatcatcacccttgatgacatcaatgacaatgcccccgagttcaccagggatgagttcttcatggaggccatagaggccgtcagcggagtggatgtgggacgcctggaagtggaggacagggacctgccaggctccccaaactgggtggccaggttcaccatcctggaaggcgaccccgatgggcagttcaccatccgcacggaccccaagaccaacgagggtgttctgtccattgtgaaggccctggactatgagagctgtgaacactacgaactcaaagtgtcggtgcagaatgaggccccgctgcaggcggctgcccttagggctgagcggggccaggccaaggtccgcgtgcatgtgcaggacaccaacgagccccccgtgttccaggagaacccacttcggaccagcctagcagagggggcacccccaggcactctggtggccaccttctctgcccgggaccctgacacagagcagctgcagaggctcagctactccaaggactacgacccggaagactggctgcaagtggacgcagccactggccggatccagacccagcacgtgctcagcccggcgtcccccttcctcaagggcggctggtacagagccatcgtcctggcccaggatgacgcctcccagccccgcaccgccaccggcaccctgtccatcgagatcctggaggtgaacgaccatgcacctgtgctggccccgccgccgccgggcagcctgtgcagcgagccacaccaaggcccaggcctcctcctgggcgccacggatgaggacctgcccccccacggggcccccttccacttccagctgagccccaggctcccagagctcggccggaactggagcctcagccaggtcaacgtgagccacgcgcgcctgcggccgcgacaccaggtccccgaaggcctgcaccgcctcagcctgctgctccgggactcggggcagccgccccagcagcgcgagcagcctctgaacgtgaccgtgtgccgctgcggcaaggacggcgtctgcctgccgggggccgcagcgctgctggcggggggcacaggcctcagcctgggcgcactggtcatcgtgctggccagcgccctcctgctgctggtgctggtcctgctcgtggcactccgggcgcggttctggaagcagtctcggggcaaggggctgctgcacggcccccaggacgaccttcgagacaatgtcctcaactacgatgagcaaggaggcggggaggaggaccaggacgcctacgacatcagccagctgcgtcacccgacagcgctgagcctgcctctgggaccgccgccacttcgcagagatgccccgcagggccgcctgcacccccagccaccccgagtgctgcccaccagccccctggacatcgccgacttcatcaatgatggcttggaggctgcagatagtgaccccagtgtgccgccttacgacacagccctcatctatgactacgagggtgacggctcggtggcggggacgctgagctccatcctgtccagccagggcgatgaggaccaggactacgactacctcagagactgggggccccgcttcgcccggctggcagacatgtatgggcacccgtgcgggttggagtacggggccagatgggaccaccaggccagggagggtctttctcctggggcactgctacccagacacagaggccggacagcctgaccctggggcgcaactggacatgccactccccggcctcgtggcagtgatggcccctgcagaggcagcctgaggtcaccgggcccgacccccctgggcctggggcagcctccttcctgtaggcgagggcccaagtctgggggcagaacctgagtgtggatggggcggccaggaagaggccccttcctgccggggtgggaagagtttctctccatcggccccatgcgggtcacctccctagtcccacctttgcctcctaccagtgaacctcatctttgtatgaaagacagcaacctcctgggtaaatctgaatgaaaaacgtgctagtctctttcatgca

SEQ ID NO: 150828 - DNA, 2445 bp, Artificial Sequence
  derived and/or modified sequence
atggacgccgccttcctgctggtgctgggcctgctggcccagagcctgtgcctgagcctgggcgtgcccggctggagaagacccaccaccctgtacccctggagaagagcccccgccctgagcagagtgagaagagcctgggtgatcccccccatcagcgtgagcgagaaccacaagagactgccctaccccctggtgcagatcaagagcgacaagcagcagctgggcagcgtgatctacagcatccagggccccggcgtggacgaggagcccagaggcgtgttcagcatcgacaagttcaccggcaaggtgttcctgaacgccatgctggacagagagaagaccgacagattcagactgagagccttcgccctggacctgggcggcagcaccctggaggaccccaccgacctggagatcgtggtggtggaccagaacgacaacagacccgccttcctgcaggaggccttcaccggcagagtgctggagggcgccgtgcccggcacctacgtgaccagagccgaggccaccgacgccgacgaccccgagaccgacaacgccgccctgagattcagcatcctgcagcagggcagccccgagctgttcagcatcgacgagctgaccggcgagatcagaaccgtgcaggtgggcctggacagagaggtggtggccgtgtacaacctgaccctgcaggtggccgacatgagcggcgacggcctgaccgccaccgccagcgccatcatcaccctggacgacatcaacgacaacgcccccgagttcaccagagacgagttcttcatggaggccatcgaggccgtgagcggcgtggacgtgggcagactggaggtggaggacagagacctgcccggcagccccaactgggtggccagattcaccatcctggagggcgaccccgacggccagttcaccatcagaaccgaccccaagaccaacgagggcgtgctgagcatcgtgaaggccctggactacgagagctgcgagcactacgagctgaaggtgagcgtgcagaacgaggcccccctgcaggccgccgccctgagagccgagagaggccaggccaaggtgagagtgcacgtgcaggacaccaacgagccccccgtgttccaggagaaccccctgagaaccagcctggccgagggcgccccccccggcaccctggtggccaccttcagcgccagagaccccgacaccgagcagctgcagagactgagctacagcaaggactacgaccccgaggactggctgcaggtggacgccgccaccggcagaatccagacccagcacgtgctgagccccgccagccccttcctgaagggcggctggtacagagccatcgtgctggcccaggacgacgccagccagcccagaaccgccaccggcaccctgagcatcgagatcctggaggtgaacgaccacgcccccgtgctggccccccccccccccggcagcctgtgcagcgagccccaccagggccccggcctgctgctgggcgccaccgacgaggacctgcccccccacggcgcccccttccacttccagctgagccccagactgcccgagctgggcagaaactggagcctgagccaggtgaacgtgagccacgccagactgagacccagacaccaggtgcccgagggcctgcacagactgagcctgctgctgagagacagcggccagcccccccagcagagagagcagcccctgaacgtgaccgtgtgcagatgcggcaaggacggcgtgtgcctgcccggcgccgccgccctgctggccggcggcaccggcctgagcctgggcgccctggtgatcgtgctggccagcgccctgctgctgctggtgctggtgctgctggtggccctgagagccagattctggaagcagagcagaggcaagggcctgctgcacggcccccaggacgacctgagagacaacgtgctgaactacgacgagcagggcggcggcgaggaggaccaggacgcctacgacatcagccagctgagacaccccaccgccctgagcctgcccctgggccccccccccctgagaagagacgccccccagggcagactgcacccccagccccccagagtgctgcccaccagccccctggacatcgccgacttcatcaacgacggcctggaggccgccgacagcgaccccagcgtgcccccctacgacaccgccctgatctacgactacgagggcgacggcagcgtggccggcaccctgagcagcatcctgagcagccagggcgacgaggaccaggactacgactacctgagagactggggccccagattcgccagactggccgacatgtacggccacccctgcggcctggagtacggcgccagatgggaccaccaggccagagagggcctgagccccggcgccctgctgcccagacacagaggcagaaccgcctag

SEQ ID NO: 150829 - protein, 292 aa, Artificial Sequence
  derived and/or modified sequence
MQKYEKLEKIGEGTYGTVFKAKNRETHEIVALKRVRLDDDDEGVPSSALREICLLKELKHKNIVRLHDVLHSDKKLTLVFEFCDQDLKKYFDSCNGDLDPEIVKSFLFQLLKGLGFCHSRNVLHRDLKPQNLLINRNGELKLADFGLARAFGIPVRCYSAEVVTLWYRPPDVLFGAKLYSTSIDMWSAGCIFAELANAGRPLFPGNDVDDQLKRIFRLLGTPTEEQWPSMTKLPDYKPYPMYPATTSLVNVVPKLNATGRDLLQNLLKCNPVQRISAEEALQHPYFSDFCPP

SEQ ID NO: 150830 - DNA, 879 bp, Artificial Sequence
  derived and/or modified sequence
atgcagaagtacgagaagttagaaaagataggcgaagggacctacggcacggtgttcaaggcaaagaatcgggaaacacacgaaatcgtcgcattgaaacgagtgaggctcgacgatgatgacgaaggtgtgcctagcagcgctttacgcgagatctgcttgctaaaggaacttaaacacaagaacatagtgagactccacgacgtgctgcactcggataaaaagctgacactcgtctttgagttttgcgatcaggacctgaagaaatatttcgattcgtgcaacggtgatttggaccccgagatagtgaagagttttctgttccagctattaaaagggctcggcttctgtcactccagaaacgtgctgcaccgcgatctcaagccacagaatctgctgattaataggaatggcgagctcaagctggctgatttcggtctcgcgcgcgctttcggcatccccgtgagatgttactctgctgaagttgtaactttgtggtatcgccctccagatgttctgttcggagcgaagttgtactctacctctattgacatgtggtccgcgggctgcattttcgcagaattggccaacgcaggcagacccctattcccggggaacgatgttgatgatcaattgaagaggattttcagactgttaggaacaccaaccgaagaacagtggcctagcatgaccaaattgcccgattacaaaccatatcccatgtacccagctacaacctctctggtgaacgttgtccccaagttgaatgctaccgggcgcgatctgctccaaaatctgttgaagtgcaacccggttcagcgcatctcggctgaagaagccctacagcacccttacttctccgatttttgtcctccctag

SEQ ID NO: 150831 - DNA, 879 bp, Artificial Sequence
  derived and/or modified sequence
atgcagaagtatgagaagctggagaagatcggggagggcacctatggaacagtgttcaaggccaagaaccgggagacccatgaaattgtggccctgaagagggtgcggctggatgatgatgatgaaggagtgcccagcagcgccctgcgggagatctgcctgctgaaggagctgaagcacaagaacatcgtgcggctgcatgatgtgctgcacagcgacaagaagctgaccctggtgtttgagttctgtgaccaggacctgaagaagtactttgacagctgcaatggagacctggaccctgagatcgtgaagagcttcctgttccagctgctgaagggcctgggcttctgccacagcagaaatgtgctgcaccgggacctgaagccccagaacctgctgatcaacagaaatggagagctgaagctggccgactttggcctggcccgggccttcggcatccctgtgcgctgctacagcgctgaggtggtgaccctgtggtacagacctccagatgtgctgtttggagccaagctgtacagcaccagcattgacatgtggagcgctggctgcatctttgctgagctggccaatgccggccggcccctcttccctggaaatgatgtggatgaccagctgaagaggatcttccggctgctgggcacccccacagaggagcagtggcccagcatgaccaagctgcctgactacaagccctaccccatgtacccagccaccaccagcctggtgaatgtggtgcccaagctgaatgccaccggccgggacctgctgcagaacctgctgaagtgcaaccctgtgcagaggatctctgctgaggaggccctgcagcacccctacttcagtgacttctgccccccatag

SEQ ID NO: 150832 - DNA, 879 bp, Artificial Sequence
  derived and/or modified sequence
atgcagaagtacgagaagctggagaagatcggcgagggcacctacggtacagtatttaaggccaaaaacagggaaacccatgagattgtcgcccttaaacgtgtgcgccttgacgacgacgacgagggtgttccatcatccgcattgcgtgaaatctgcctcctcaaggagctgaaacataagaatatcgtgcggcttcacgacgttcttcacagcgataagaagctcaccctcgtgtttgaattctgcgatcaggatttgaagaagtacttcgattcctgtaacggagacttggacccagaaatcgtgaaaagtttccttttccaactcctgaagggtctggggttctgccactctagaaatgtgctgcaccgcgatctcaagcctcagaacctgctgataaatcgaaatggcgaactgaagttggctgactttggactggctagagctttcggcatccctgtgcgctgttattcagcagaagtagtaaccctttggtacaggcccccagacgttctttttggggcaaaattatacagcactagcattgatatgtggtctgcgggctgtatctttgccgaacttgctaacgccgggagacctctgtttcccggcaatgacgtggacgatcagttgaagagaatattcagattgctgggaacccctacggaagagcaatggccatccatgaccaagttgccagattataagccctacccgatgtaccctgccactacgagcttagtcaacgtcgtccccaagctgaatgctacgggacgggacctgctacagaacctattaaaatgtaaccccgtccaaagaattagcgcagaggaggctctccagcatccttatttctctgacttttgtcctccttag

SEQ ID NO: 150833 - DNA, 879 bp, Artificial Sequence
  derived and/or modified sequence
atgcaaaagtatgaaaaactagagaagatcggggagggcacatacggcactgtctttaaggcaaaaaatcgggagacacacgaaattgttgccctgaagcgcgtcagactggatgatgacgatgagggagtaccttcttcggcactgagggagatttgcctgctcaaggagctgaagcacaaaaacatcgttcggctgcatgatgtgctgcactccgataaaaaactgaccttggttttcgagttttgcgatcaggacctgaaaaaatacttcgattcgtgcaacggggacctagacccggaaattgttaagtccttcctgttccagcttctgaagggccttggattctgtcattctagaaacgtactgcaccgagacttgaagccccagaacttactgatcaacaggaacggagaactgaagctcgccgatttcggcctggcgagggcctttgggattcctgttcggtgttatagcgcggaggtcgtgaccctctggtacaggcccccagatgtgctttttggtgctaaattatatagtacaagcatcgacatgtggtccgccggttgcatttttgccgaattggcaaatgcaggacggcctttattccctggaaatgacgtggatgaccagttaaagaggattttcaggctgctggggacccctacagaggagcaatggcctagcatgactaagctccctgactacaaaccgtacccgatgtaccccgcaaccacctccctggtcaacgtagttcccaagctcaacgcaactgggcgagatctactgcagaacttgctgaagtgtaatccagtacagcgaatatccgccgaagaggcgttacagcacccctatttttcggatttttgccctccctag

SEQ ID NO: 150834 - DNA, 1758 bp, Artificial Sequence
  derived and/or modified sequence
actaaaatccagcctcgaaggggcacagctgttctcccagccctgcggtcagctgttccctgtgaggtcatcatcgctcacaggcattccccagtcaattctggggtcactaggtggcttggggagaggtggaaacccgtgctgaggtcgtcaagaggccgttgggaacacaatgccaccaaccaggtcagcgctgggccgccagtgcccgggatctaggccgccaaaccccaaacccctaaccgagagcgctccgcccccatttccgctgcattctggaacgcgtagtcccggagcggcccttttcaagagggctgggagcacataaaaggaataacaacagcggggcacactgggaaccacggcgccgcggcggggcgcccggaaaacggacacgcgttgcttcctgggacttgaagtccaaggtttgcctccgcggtagaaacggagccctggagtcgagtgctgcagagagcgtgagcgcagacggctgggggttgtagtcttcttgtcctcggtctcgggcattgcggggagacctagtcgttttaggactacaagccccagaaggccctgcgcgggcagacggggcggggctggaggctcaggtgccgcctcctctgcaacgccggggccagagtcttaaaaccgagggcccgcaggggtccccgcggccgccgcgatgcagaaatacgagaaactggaaaagattggggaaggcacctacggaactgtgttcaaggccaaaaaccgggagactcatgagatcgtggctctgaaacgggtgaggctggatgacgatgatgagggtgtgccgagttccgccctccgggagatctgcctactcaaggagctgaagcacaagaacatcgtcaggcttcatgacgtcctgcacagcgacaagaagctgactttggtttttgaattctgtgaccaggacctgaagaagtattttgacagttgcaatggtgacctcgatcctgagattgtaaagtcattcctcttccagctactaaaagggctgggattctgtcatagccgcaatgtgctacacagggacctgaagccccagaacctgctaataaacaggaatggggagctgaaattggctgattttggcctggctcgagcctttgggattcccgtccgctgttactcagctgaggtggtcacactgtggtaccgcccaccggatgtcctctttggggccaagctgtactccacgtccatcgacatgtggtcagccggctgcatctttgcagagctggccaatgctgggcggcctctttttcccggcaatgatgtcgatgaccagttgaagaggatcttccgactgctggggacgcccaccgaggagcagtggccctctatgaccaagctgccagactataagccctatccgatgtacccggccacaacatccctggtgaacgtcgtgcccaaactcaatgccacagggagggatctgctgcagaaccttctgaagtgtaaccctgtccagcgtatctcagcagaagaggccctgcagcacccctacttctccgacttctgtccgccctaggccccgggacccccggcctccaggctggggcctggcctatttaagccccctcttgagaggggtgagacagtgggggtgcctggtgcgctgtgctccagcagtgctgggcccagccggggtggggtgcctgagcccgaatttctcactccctttgtggactttatttaatttcataaattggctcctttcccacagtc

SEQ ID NO: 150835 - DNA, 879 bp, Artificial Sequence
  derived and/or modified sequence
atgcagaagtacgagaagctggagaagatcggcgagggcacctacggcaccgtgttcaaggccaagaacagagagacccacgagatcgtggccctgaagagagtgagactggacgacgacgacgagggcgtgcccagcagcgccctgagagagatctgcctgctgaaggagctgaagcacaagaacatcgtgagactgcacgacgtgctgcacagcgacaagaagctgaccctggtgttcgagttctgcgaccaggacctgaagaagtacttcgacagctgcaacggcgacctggaccccgagatcgtgaagagcttcctgttccagctgctgaagggcctgggcttctgccacagcagaaacgtgctgcacagagacctgaagccccagaacctgctgatcaacagaaacggcgagctgaagctggccgacttcggcctggccagagccttcggcatccccgtgagatgctacagcgccgaggtggtgaccctgtggtacagaccccccgacgtgctgttcggcgccaagctgtacagcaccagcatcgacatgtggagcgccggctgcatcttcgccgagctggccaacgccggcagacccctgttccccggcaacgacgtggacgaccagctgaagagaatcttcagactgctgggcacccccaccgaggagcagtggcccagcatgaccaagctgcccgactacaagccctaccccatgtaccccgccaccaccagcctggtgaacgtggtgcccaagctgaacgccaccggcagagacctgctgcagaacctgctgaagtgcaaccccgtgcagagaatcagcgccgaggaggccctgcagcacccctacttcagcgacttctgccccccctag

SEQ ID NO: 150836 - protein, 138 aa, Artificial Sequence
  derived and/or modified sequence
MREENKGMPSGGGSDEGLASAAARGLVEKVRQLLEAGADPNGVNRFGRRAIQVMMMGSARVAELLLLHGAEPNCADPATLTRPVHDAAREGFLDTLVVLHRAGARLDVRDAWGRLPVDLAEERGHRDVAGYLRTATGD

SEQ ID NO: 150837 - DNA, 417 bp, Artificial Sequence
  derived and/or modified sequence
atgagagaggagaacaagggcatgcccagcggcggcggcagcgacgagggcctggccagcgccgccgccagaggcctggtggagaaggtgagacagctgctggaggccggcgccgaccccaacggcgtgaacagattcggcagaagagccatccaggtgatgatgatgggcagcgccagagtggccgagctgctgctgctgcacggcgccgagcccaactgcgccgaccccgccaccctgaccagacccgtgcacgacgccgccagagagggcttcctggacaccctggtggtgctgcacagagccggcgccagactggacgtgagagacgcctggggcagactgcccgtggacctggccgaggagagaggccacagagacgtggccggctacctgagaaccgccaccggcgactag

SEQ ID NO: 150838 - DNA, 3829 bp, Artificial Sequence
  derived and/or modified sequence
gtgaggactccgcgacgcgtccgcaccctgcggccagagcggctttgagctcggctgcgtccgcgctaggcgctttttcccagaagcaatccaggcgcgcccgctggttcttgagcgccaggaaaagcccggagctaacgaccggccgctcggccactgcacggggccccaagccgcagaaggacgacgggagggtaatgaagctgagcccaggtctcctaggaaggagagagtgcgccggagcagcgtgggaaagaagggaagagtgtcgttaagtttacggccaacggtggattatccgggccgctgcgcgtctgggggctgcggaatgcgcgaggagaacaagggcatgcccagtgggggcggcagcgatgagggtctggccagcgccgcggcgcggggactagtggagaaggtgcgacagctcctggaagccggcgcggatcccaacggagtcaaccgtttcgggaggcgcgcgatccaggtcatgatgatgggcagcgcccgcgtggcggagctgctgctgctccacggcgcggagcccaactgcgcagaccctgccactctcacccgaccggtgcatgatgctgcccgggagggcttcctggacacgctggtggtgctgcaccgggccggggcgcggctggacgtgcgcgatgcctggggtcgtctgcccgtggacttggccgaggagcggggccaccgcgacgttgcagggtacctgcgcacagccacgggggactgacgccaggttccccagccgcccacaacgactttattttcttacccaatttcccacccccacccacctaattcgatgaaggctgccaacggggagcggcggaaagcctgtaagcctgcaagcctgtctgagactcacaggaaggaggagccgaccgggaataaccttccatacatttttttctttgtcttatctggccctcgacactcaccatgaagcgaaacacagagaagcggatttccagggatatttaggagtgtgtgacattccaggggtcgtttgcttttcagggttttctgagggaaagtgcatatgaaatccttgactggacctggtggctacgaatcttccgatggatgaatctcccactccagcgctgagtgggagaaggcagtgattagcacttgggtgacggcagtcgatgcgttcactccaatgtctgctgaggagttatggtgaacccacaacttaggccctagcggcagaaaggaaaacctgaagactgaggacaaagtggaggagggccgaggtgggcttcagtaagtccccggcggcgctttagtttgagcgcatggcaagtcacatgcgtaaacgacactctctggaagccctggagaccctcgcccaactccaccagatagcagaggggtaagagaggatgtgcaagcgacgacagatgctaaaatccctggatcacgacgctgcagagcacctttgcacaggatgctggcctttgctcttactacactgaggagagattcccgcgggttccgcaggcagactacacaggatgaggtggtggagtggagtgagagcaattgtaacggttaactgtaacgttttctttcacacacacacacacacacacacacacacatgctaggatgcggaaatccccttatgacttgctactttttgattttgtgatattttgtactttttagttgttcagcaactgtcttatttaatggggagattttaagtaacataactagtggctctcagttaaaatgtgaggaagaactacagctcttaaatgtagcaatggcactgttgcaaactcagtgcaaacgcctagattgctttcttcttaacctatttatttctttgttaaatttttctgattgtttcctttatagagtgtctcagggtgcagaggtcagactaagaaatattccaaatgtcttttagaagatagatgcacttatgcagtaaattatcttgggatagttcccaaaagattgctgaaaaagtagattgagtataaaaacttgaaaatatatgatggctcgtgggatgtcctactatcactgaacaaactaaaggtgcactgctttgggatttaatttccagggttgcttgatcattatatcattggaacaactgatacttcactactttaataaagaattaacagagattgaactccaagaggtgggtaatttggtttaaaaatacatgttcatgggtttaccactaactcctgagaaatgttaaaggttcacaggggttcccttctctcaatgtttgtaataattgctcataagcaataccagcaattcataaaaactgcttacttatgccatagaaaattaaacacaaagtgtatacatgtattatgcttctaaatgctcattctaccagatacacatttaaaagagaaaaaaggaacagaaacaagtcatttgagagtggagacttataagaaggagtacatttgagttgaatacacaaatctttacttctctaccaattcctattcccaaaatgaacatattactggggaaagttagttgagaatcagagcatatgttattggggaaaggatatgtttattgacacataatctgtaccaggtatgcattaaaatatatttgttaatttaatatttaaacctgagagataggtattgtttcccagatgaggacaatgaggcaaagaaatatcaagtaacttgccaaaggttacaagatattcattccatggatgcacaaagaagtgcatctagttccacagctgattatggttgtcttgcttttcttcccattgcaccagcttgtcctccaaaatcatgaatgatacacatgaagataactttttttaaaaaaaagcagaaatacacaatgatctcccttgtaagctcctaaggtggcttttctttctctaacttctagtaaatataaacggtttgtttgaaaactattttaaaatgtcaacaatatggagaataaccccccccaacacacctataaaaacccaaatttttggaacaaagataatggaacctccattttcaaactgaagcacagggacagaaaatatatttctagttatcacttaagcactcaatcattagaggctacaagaataatatttttaaagttacagtattttacaattattagaaaacattctatataaaagaagtcagttgatactttaaaatctcccatttggtttataaaatcccttaatttgacctctatatcttaaattccaagatgtttaaatttgctagttgcattatactgggtcatgaaaaattatcccttgaaatagatatgaaacatgttacttcatttctggtttaaataacttgtggaatctttcctaatgacaacctgatattaagggaaactaaagaaaatgttattgtggatcccacagtactatattacactgttttttttgtttgttttgttagttttttttatttaaagcaaacctcaaacattattgggtatcaattaccacctggttgtattgaaatagtaacttatcaatgccatgtaaaaattaattccattttcgaagccacctggcagacaggtttagctgtttcatcagcagcctaatatatactgttaaatttgttaaggatttcactttgaaggatacatgcaaaacatatagttactattttcatgagtcctgcttctagctccattgtggaatacagaaaattaaatatacctgttaagttcgtatctaaacctaagacattaccaaggtttgtacaaattctactacctgacatttattccaagaagatctggaaagttaaataaatttataaatttaataaca

SEQ ID NO: 150839 - DNA, 859 bp, Artificial Sequence
  derived and/or modified sequence
ccgcgacgcgtccgcaccctgcggccagagcggctttgagctcggctgcgtccgcgctaggcgctttttcccagaagcaatccaggcgcgcccgctggttcttgagcgccaggaaaagcccggagctaacgaccggccgctcggccactgcacggggccccaagccgcagaaggacgacgggagggtaatgaagctgagcccaggtctcctaggaaggagagagtgcgccggagcagcgtgggaaagaagggaagagtgtcgttaagtttacggccaacggtggattatccgggccgctgcgcgtctgggggctgcggaatgcgcgaggagaacaagggcatgcccagtgggggcggcagcgatgagggtctggccagcgccgcggcgcggggactagtggagaaggtgcgacagctcctggaagccggcgcggatcccaacggagtcaaccgtttcgggaggcgcgcgatccaggtagctggggccccagggcctcgccggcagggggcgcgcgaacgcggggcgcggcctcggcggatcggggctggaacctagatcgccgatgtagatttgtacaggagtctccgttggccggaggtcatgatgatgggcagcgcccgcgtggcggagctgctgctgctccacggcgcggagcccaactgcgcagaccctgccactctcacccgaccggtgcatgatgctgcccgggagggcttcctggacacgctggtggtgctgcaccgggccggggcgcggctggacgtgcgcgatgcctggggtcgtctgcccgtggacttggccgaggagcggggccaccgcgacgttgcagggtacctgcgcacagccacgggggactga

SEQ ID NO: 150840 - DNA, 417 bp, Artificial Sequence
  derived and/or modified sequence
atgcgtgaagagaataaggggatgccatccggcggcggctctgacgaagggctggcctctgccgctgcccgcggtctggtggaaaaggtgagacagttgcttgaagcgggggcagatccaaacggggtcaaccgttttggccgcagggccatccaagtcatgatgatggggagcgcaagggtagcggaactccttcttctccatggggcagaacctaactgcgccgacccggcgacactaaccaggcccgtccacgacgctgccagggaggggtttctggatactctggtcgtgctgcaccgtgctggcgcccggctggacgtgcgagatgcctggggccgcttacccgtggacttagccgaagagcgaggccaccgagatgtcgctggctacttgcgcacggcaactggtgactag

SEQ ID NO: 150841 - DNA, 417 bp, Artificial Sequence
  derived and/or modified sequence
atgagggaggagaacaagggcatgcccagcggcggcggcagtgatgagggcctggccagcgctgctgcccggggcctggtggagaaggtgcggcagctgctggaggccggggctgaccccaatggagtgaaccgcttcggccggcgggccatccaggtgatgatgatgggcagcgcccgggtggccgagctgctgctgctgcacggggctgagcccaactgtgccgaccctgccaccctgaccaggcctgtgcatgatgctgcccgggagggcttcctggacaccctggtggtgctgcaccgggccggggcccggctggatgtgagagatgcctggggccgcctgcctgtggacctggccgaggagcggggccacagagatgtggccggctacctgaggacagccaccggggactag

SEQ ID NO: 150842 - DNA, 417 bp, Artificial Sequence
  derived and/or modified sequence
atgcgggaggagaacaagggcatgcccagcggcggcggcagcgacgagggactggcatctgccgccgcccgcggtcttgtcgaaaaagtccggcaattactggaggccggcgctgacccaaacggagtgaacagattcggtaggagagccatccaagtaatgatgatgggttctgctcgggtggctgagctgttattgctgcacggagccgagccaaattgcgcagatccagctacactgacgcgccctgtgcacgacgctgcaagagaaggctttctcgatactttggtggtgctacacagagctggggcgcggctggatgtgcgcgatgcttggggaagactgccagttgatcttgctgaggagaggggccatagggacgtggctgggtacctgaggactgcaacaggggactag

SEQ ID NO: 150843 - DNA, 417 bp, Artificial Sequence
  derived and/or modified sequence
atgagagaggagaataaaggtatgccctccggagggggatctgacgaggggttagcaagtgccgcagccaggggcttggtcgaaaaagtgagacagctgctagaggcaggggctgacccaaacggggtgaacagattcggcaggcgggctatacaggttatgatgatggggtccgccagggtcgctgagctcctcctgttacacggcgcagaacctaattgtgctgacccagcgaccctgaccaggccggtgcacgacgccgctcgcgagggcttcttagacacactggttgtcttacaccgagctggtgcacgcctggatgtgagagacgcatggggcagactgccagtggatctggcagaggaacggggtcacagagatgtcgcgggatatctgcgcacggccactggagactag

SEQ ID NO: 150844 - protein, 367 aa, Artificial Sequence
  derived and/or modified sequence
MIRNWLTIFILFPLKLVEKCESSVSLTVPPVVKLENGSSTNVSLTLRPPLNATLVITFEITFRSKNITILELPDEVVVPPGVTNSSFQVTSQNVGQLTVYLHGNHSNQTGPRIRFLVIRSSAISIINQVIGWIYFVAWSISFYPQVIMNWRRKSVIGLSFDFVALNLTGFVAYSVFNIGLLWVPYIKEQFLLKYPNGVNPVNSNDVFFSLHAVVLTLIIIVQCCLYERGGQRVSWPAIGFLVLAWLFAFVTMIVAAVGVTTWLQFLFCFSYIKLAVTLVKYFPQAYMNFYYKSTEGWSIGNVLLDFTGGSFSLLQMFLQSYNNDQWTLIFGDPTKFGLGVFSIVFDVVFFIQHFCLYRKRPGYDQLN

SEQ ID NO: 150845 - protein, 220 aa, Artificial Sequence
  derived and/or modified sequence
MNWRRKSVIGLSFDFVALNLTGFVAYSVFNIGLLWVPYIKEQFLLKYPNGVNPVNSNDVFFSLHAVVLTLIIIVQCCLYERGGQRVSWPAIGFLVLAWLFAFVTMIVAAVGVTTWLQFLFCFSYIKLAVTLVKYFPQAYMNFYYKSTEGWSIGNVLLDFTGGSFSLLQMFLQSYNNDQWTLIFGDPTKFGLGVFSIVFDVVFFIQHFCLYRKRPGYDQLN

SEQ ID NO: 150846 - DNA, 1101 bp, Artificial Sequence
  derived and/or modified sequence
atgataaggaattggctcacaatctttattctttttcctttaaagctagtcgaaaaatgcgagtcaagcgtctcactgacagtgccacccgtcgtcaaactagagaatggatcaagcaccaacgtatccctcacgttacgtccaccattgaatgccaccctcgtcatcacattcgagattaccttcagatctaagaacattactatactcgaactacctgatgaagtcgtggtccctcccggcgtcaccaatagtagtttccaggttactagtcagaatgtgggccagctcactgtgtatctccacgggaatcattcaaatcagaccggaccccgcattagattcctcgtgattcgctcgtccgccatatcaattatcaaccaggtgataggatggatatattttgtcgcctggtcaattagcttctacccgcaggtgatcatgaattggcggagaaagtcggtcatcgggctgagtttcgactttgtcgctctgaacctgactggttttgttgcttattctgttttcaatataggacttctgtgggtgccctacattaaggagcagttcctgctgaaatatccaaatggggtaaatcctgtcaattccaatgatgtgtttttctccctccatgcagtggtgctgacgctgattataattgtccagtgctgtctgtacgagagaggggggcaaagggtctcgtggcccgcaattgggtttctggtgttagcatggctttttgcctttgtgacaatgattgtggccgctgtaggcgtaaccacatggttgcagtttttgttctgcttctcttatattaagcttgctgtgactttagtgaagtacttccctcaggcctatatgaatttctactacaagagcaccgagggatggagcataggaaacgtcctcctggacttcaccggtggaagcttctcacttttacagatgttcttacagtcgtataacaacgatcagtggactctgattttcggtgacccgacaaaatttgggctgggagtcttctcaatcgtgttcgatgtcgtgttcttcatccagcacttctgcctgtaccggaagaggccaggctatgaccagctaaat

SEQ ID NO: 150847 - DNA, 1101 bp, Artificial Sequence
  derived and/or modified sequence
atgatccgcaattggctcaccatattcattctcttcccgcttaagctcgtcgaaaagtgcgaatcctcggtgagcctgaccgtccctccggtggtgaagctggagaatggttccagcaccaacgtgtcgctgacgctgcggccaccacttaatgcaacgctcgtgatcactttcgagataacctttcgctccaagaatatcactattcttgaacttcccgatgaagtcgtggttccacctggtgtcactaattcctcgtttcaggtgacctcccaaaacgtgggccaactcactgtctaccttcacgggaaccattcgaaccaaacgggtccacgcattcgttttctggtcattaggagctcggcaatctcaatcatcaaccaagtgattggctggatctacttcgtggcatggtccatatcgttttaccctcaagtaatcatgaactggcgcaggaagtccgtcataggactgtcttttgattttgtggccctgaacctcactggatttgtcgcctacagcgtgttcaatattgggcttctttgggtgccatacatcaaagagcagtttctgctgaagtaccccaacggagtcaacccggtcaattcaaacgatgtctttttctccctgcatgcagtggtgcttactcttatcattattgtgcagtgttgtctgtacgaacgcggtggacagagagtttcctggccggcaattggattcctcgtcctggcatggctgtttgccttcgtcaccatgattgtcgcggctgtgggagtgactacctggctccagtttcttttttgtttttcctacataaagctcgccgtgactctggtgaagtacttccctcaggcttacatgaacttctactacaaatcgactgaaggttggtcgatagggaacgtgctcctcgatttcaccggcggatcgttttcgctgcttcaaatgtttctgcaaagctacaacaacgatcagtggaccctcattttcggagatcccaccaagtttggactgggagtgttttccatcgtgtttgatgtggtgttcttcattcaacatttttgtctttaccgtaaaaggccaggttacgatcaactgaac

SEQ ID NO: 150848 - DNA, 1101 bp, Artificial Sequence
  derived and/or modified sequence
atgattagaaattggcttactatctttatactgttccccttgaaactcgtagagaaatgtgagtcttctgtgtcactcacagttccacctgtggtcaagctggaaaatggttcttccaccaatgtgagcttgacccttagaccacctttgaacgctactctggtcattacttttgaaatcactttccgtagcaagaacatcacaattctcgagttgccagatgaggtcgtggtgcccccaggagtaaccaattctagcttccaggtgacatcacagaacgtcggccagcttactgtgtacctgcatggcaaccactccaaccaaacaggcccacgtattagattcctcgttatccgcagctccgctatcagtatcatcaaccaagtcatcggatggatttacttcgtcgcctggtctattagtttttaccctcaagttatcatgaattggaggcgtaaatctgtgatcggactgtctttcgatttcgtggccttgaacctgacaggtttcgtcgcttacagtgtcttcaacatcggacttctgtgggtgccatatatcaaggagcagttcctgcttaaataccccaacggtgtcaatcccgtgaattccaacgatgtctttttctctctgcacgctgtcgtacttactctcatcattatcgtccagtgctgtctgtatgagcgcggcggacaaagagtctcctggcctgctataggctttctggtactcgcttggctgtttgccttcgtgactatgatcgtggccgctgtgggcgtaactacttggttgcagttcctcttctgtttctcatacatcaagctcgctgtgaccctcgtgaagtacttcccccaggcatatatgaacttctattacaaatctaccgagggctggtccatcggcaatgtcctcctggacttcaccggtggttctttttcattgctgcaaatgttcctccagagctacaacaatgaccagtggacattgatattcggagaccccaccaagttcggactgggtgtgttcagcatcgtgttcgatgttgtatttttcatccagcatttctgcctctacagaaagagacccggctacgatcaattgaac

SEQ ID NO: 150849 - DNA, 1101 bp, Artificial Sequence
  derived and/or modified sequence
atgatcaggaactggctcaccatcttcattctgttcccgctgaagctggtggagaaatgtgagagctccgtgtcgctcactgtgcccccagtcgtgaagttggaaaatggatcgagcaccaatgtctcattgactttgcgcccacctctcaacgcaaccctcgttatcacttttgaaattaccttcagatcgaaaaacatcactatcctggaacttccggacgaggttgtggtgccaccgggagtcactaattcctcgttccaggtgacttcacaaaatgtggggcaactcactgtctacttgcacggaaaccactcaaaccaaactggacccagaatcagattcctggtcatcagatcgtcggccatcagcatcattaatcaagtgatcgggtggatttacttcgtggcttggtcaatcagcttctacccgcaggtgatcatgaactggcgccgcaagtccgtgattggcttgtcattcgacttcgtggcactcaacttgactggattcgtggcctactccgtgttcaatatcggactgttgtgggtgccgtacatcaaggaacagttcctgctgaaataccccaacggggtaaatcctgtcaattcgaatgatgtgtttttcagcctgcacgcggtggtgctgaccctgattatcatcgtgcaatgctgcctgtacgagcgcggcggacagcgggtgtcatggccagcgatcggctttctggtcctggcgtggctgttcgcgttcgtgaccatgatcgtcgccgcggtgggagtgaccacctggctgcagttcctgttctgcttttcgtacattaaactggctgtcacgctggtgaaatacttcccacaggcgtacatgaatttctactacaagagcactgaagggtggtccatcggtaacgtcctgctcgattttactgggggttcatttagcctgcttcaaatgttcctgcagagctacaacaatgaccaatggacgctcatttttggggacccgaccaaattcggactgggcgtgttctcgatcgtgttcgacgtggtgttcttcatccagcacttctgcctctaccgcaaacggcctggatacgaccagctcaac

SEQ ID NO: 150850 - DNA, 1101 bp, Artificial Sequence
  derived and/or modified sequence
atgattcgcaattggttgaccatctttatactcttccctctgaaactggtcgagaagtgtgagtcgagcgtttcgcttactgtccctccggtcgttaagctcgagaatggctcctccactaacgtgtcgcttactctgaggccaccactgaacgcaactcttgtgattacttttgaaatcacgtttaggtcaaagaacatcactattctcgaactgcctgacgaagtggtcgtcccacccggggtcactaactcttctttccaagtcacttcacaaaacgttgggcagcttacggtctatcttcacggtaatcatagcaatcagactggaccgagaattcggtttctggtgattaggtcctcagcgatttcgattatcaatcaagttattggatggatctactttgtcgcatggtccattagcttttacccacaagtgatcatgaactggcggaggaagtcagtcattggccttagctttgattttgtggcacttaacctgaccggattcgtggcatactcagtgttcaacattggattgctgtgggtgccatacattaaggaacagttcctcctgaagtaccccaacggggtgaaccccgtgaactccaacgatgttttcttttctctgcacgccgtcgtgctcacccttatcataattgtccagtgctgtctttacgaaagagggggacaaagagtgtcctggcctgcgattggcttcctcgtgcttgcctggctgttcgcattcgtgaccatgatcgtggccgcggtgggtgtcacgacgtggttgcagtttctcttttgtttctcgtacataaagttggcagtgactctggtgaaatactttcctcaagcctacatgaacttttactacaaaagcaccgaaggttggtccatcggaaatgtgcttctcgactttaccggaggttccttttcactgctccagatgtttctgcaatcatacaacaacgaccagtggactcttatcttcggtgatcccaccaagtttggtcttggagtcttttccatcgttttcgacgtggtgtttttcatccaacatttctgtctttacagaaagcgcccaggatacgatcaactgaat

SEQ ID NO: 150851 - DNA, 1101 bp, Artificial Sequence
  derived and/or modified sequence
atgatccgaaattggctgaccatctttatcctgttccctctgaaactggtggaaaaatgcgaatcttctgtttcactgaccgttccccctgtggtaaaactcgaaaacgggagttccactaacgtgtcccttacattgcggccccccttgaatgccaccctcgtgatcacgtttgagattaccttcaggagcaagaacataaccatcctggagctgccggacgaggtggtggttcctcccggtgtcacaaacagttctttccaggtcaccagccagaatgtcggccagctgaccgtgtatctccatggcaatcattccaaccagacagggccacggatccggtttctggtgatacgctcatccgccatcagcatcataaaccaggtcatcggatggatttactttgtcgcttggtcaatctcattttacccccaggtgatcatgaactggagacgcaagtccgtaataggtctgagttttgatttcgttgctctgaatctcaccgggttcgtggcctatagcgtgtttaatattggtctcctttgggttccttacattaaagagcaattcttgcttaaataccctaacggtgtgaatcctgtcaattctaacgacgtttttttcagtctgcacgctgtcgtcttgaccctgattatcatcgtgcagtgttgcctctatgaacgggggggccagagagtgagctggccggccatagggtttctcgtgctcgcctggcttttcgccttcgtcacaatgatcgtggcggctgtgggcgtcactacatggcttcagtttctgttttgcttctcctatatcaaattggctgtcaccttggttaaatacttcccccaagcctacatgaatttctactataagtctacggagggctggagtattgggaatgtgctgttggacttcactgggggcagcttctctttgctgcagatgtttcttcaatcttacaacaacgaccaatggacgctcatctttggggaccctactaaattcggtctgggcgtgttcagtatcgtcttcgacgtggtttttttcatccagcatttctgcttgtatcggaaacgccctggctacgatcagcttaat

SEQ ID NO: 150852 - DNA, 1101 bp, Artificial Sequence
  derived and/or modified sequence
atgatacggaattggctcacgatttttattttgtttccactcaagctggttgagaagtgtgagtctagtgtttcattgacagttccacctgtggtaaagctggaaaatgggtcatctaccaatgtgagtctgaccctgcgtcctccgctgaacgccactttggtgattactttcgagattacgttccgctccaagaatattactattctggagctccctgatgaggtggttgtgccccccggagtgacaaactcaagttttcaggtgacaagccagaacgtgggccagttaaccgtatatctgcacggcaaccacagtaatcagacaggtccacgcatccggttccttgtgataaggtcttccgcaatttcaatcatcaaccaagtcatcggctggatttacttcgtggcttggagtatatctttttatccacaggtaattatgaattggcggcgcaaaagcgttataggcctctcatttgacttcgtagctctgaacctgaccgggttcgtcgcctacagcgtgttcaacatcggtctgctgtgggtgccgtatatcaaggagcaatttctccttaagtatccgaacggggttaatccggtaaattcgaacgatgtcttctttagcctccacgccgttgtcttaactctgatcatcatcgtccagtgttgtctgtacgagaggggggggcagagagtgtcctggccagcaattggttttttggtgctcgcgtggctcttcgctttcgtgacaatgatagtggccgcagtaggcgtcactacatggctccagtttctcttctgcttctcctacatcaagctggccgtcaccctcgtaaaatacttcccccaggcttatatgaatttttattataaaagtaccgaagggtggtcaatcgggaatgttttgcttgatttcacaggaggctctttctcactcctgcagatgttcctccaaagctacaacaacgaccaatggactttgattttcggagacccgactaaattcggattgggggtgttctccatagtgtttgacgtcgtcttttttattcagcacttctgtctgtatcgaaagagacccggctacgatcagctgaat

SEQ ID NO: 150853 - DNA, 1101 bp, Artificial Sequence
  derived and/or modified sequence
atgatccgcaattggctgactatcttcatcctgtttcctctcaaactcgtcgaaaagtgtgaatcgagcgtgtccctgacggtgccaccagtggtgaagctggagaatggatcgagcaccaatgtcagcctcaccctccggccgccgctgaacgcaactctggtgatcacgtttgagattacctttcgatccaagaacattaccatcctggaactccccgatgaagtggttgtcccgcccggagtcactaatagctcgtttcaggtcacttcccagaatgtgggtcagctgactgtctacttgcatggcaaccactcaaaccaaaccggtccgcgcattaggtttctcgtgatcagatcgtccgcgatttccatcatcaaccaggtcataggctggatatactttgtggcttggtccatcagcttctacccacaagtcattatgaattggagacggaagtcggttatcggactgtcgtttgacttcgtggccctgaacctgaccggattcgtggcgtacagcgtgttcaatatcggacttctgtgggtgccgtacattaaggagcagttcctgctgaagtacccaaacggtgtgaacccggtgaactcgaacgacgttttcttctccctgcatgccgtggtgctgacgttgatcattatcgtgcaatgttgcctgtacgagcgcgggggacagagagtctcatggcccgctatcggctttctggtcctcgcttggctgtttgcattcgtcacgatgatcgtggcagccgtgggcgtgacgacttggctgcagttcctcttctgcttctcatacatcaagttggccgtgacccttgtcaagtacttcccgcaagcatatatgaacttttactacaagtcaactgagggatggtcgatcggaaacgttctcctggacttcaccggtggatctttctccctgctgcagatgttcctgcaatcatacaacaacgaccaatggaccctgatctttggcgatcctactaagttcggactcggagtgttcagcatcgtgtttgacgtggtgtttttcatccagcacttttgcctgtaccgcaaacgccccggatacgatcagctcaac

SEQ ID NO: 150854 - DNA, 1101 bp, Artificial Sequence
  derived and/or modified sequence
atgatcagaaattggttgaccatctttatccttttccctctcaaactggtggagaagtgcgaatccagcgtgtcccttactgtgccaccagttgtcaagctcgagaacggatcgtcgaccaatgtgtcgctcacgctgcggccgccgctgaacgccactctcgtgatcactttcgaaatcactttccgcagcaagaacatcactatcctggaactgccggatgaggtcgtggtgccgccaggagtgacgaactcgtccttccaagtgaccagccagaatgtgggccagttgactgtgtacctccacggtaatcactcgaaccagaccggaccgagaatcagattcttggtcattcgctcctccgctatctcaatcatcaaccaagtgatcggctggatctacttcgtggcctggtcgatctccttttacccccaagtcatcatgaattggagacggaaatcggtgatcggactgtcctttgacttcgtggcgcttaacctgaccggatttgtcgcctacagcgtgttcaatatcggactgctctgggtcccttacatcaaggaacagttcctgctgaaatacccaaacggagtgaaccccgtgaattccaacgacgtgtttttctccctgcacgcggtggtgctcactctgatcataattgtgcagtgttgcctgtacgagcgcggcggacagcgtgtgtcatggcccgctattggatttctcgtgctggcctggcttttcgccttcgttacgatgatcgtggcagctgtgggggtgaccacctggctccaattcctgttctgcttctcatacatcaagctggcggtgaccctggtcaaatacttcccacaagcctacatgaacttttactataagtccactgaaggatggtccatcggcaacgtcttgctggacttcaccggaggatcattctcgcttctgcagatgttcttgcaatcctacaacaatgatcagtggaccttgattttcggcgatcccactaagttcgggctgggcgtcttttcgattgtgtttgatgtcgtgtttttcatccagcacttctgcctgtaccggaaaagaccggggtacgaccaactcaac

SEQ ID NO: 150855 - DNA, 1101 bp, Artificial Sequence
  derived and/or modified sequence
atgattcgcaactggctgaccatcttcatcctctttccgctgaagctcgtggaaaagtgcgagtcatcggtgtccctcactgtgccgccggtggttaagctcgaaaacggatcatccactaacgtttccctgaccctgcggccgcccctgaacgccaccctggtgatcacttttgagatcactttcagaagtaagaacatcacgatcctcgagctccccgatgaggtggtggtccccccaggagtgactaatagctcgtttcaggtcacctcacaaaacgtcggccaattgactgtctatctgcatggaaaccacagcaatcagactggaccgcgcatccgcttcctggtgatccgctcatcggcaattagcatcattaaccaagtgattggttggatctattttgttgcctggagcatttcgttctacccacaggtgatcatgaactggcggcgcaagagcgtgatcggcctgtcgttcgattttgtggcactgaatctcaccggttttgtcgcgtattcggtgttcaatattggactgctgtgggtgccttacataaaagagcagttccttctcaagtacccgaatggcgtgaatccggtgaactcaaacgacgtgttcttttccctgcacgccgtcgtgcttactctgatcatcatcgtgcaatgttgtttgtacgaacggggtggccagcgggtgtcttggccggcaatcggattcctggtgctcgcgtggctgtttgcctttgtcactatgattgtggccgcagtcggagtgactacgtggctgcagttcctgttctgcttcagctacatcaaactggccgtcactcttgtcaagtacttcccgcaggcgtacatgaatttctactacaaatcgacggagggctggtcgattggcaacgtgctgctggatttcactgggggctcgttctccctgctgcagatgttcttgcagtcctacaataatgatcaatggaccctcatcttcggagatcctaccaagttcgggttgggagtgttcagcatcgtgtttgacgtcgtgttctttatccagcacttctgcttgtatagaaagcgccctgggtacgatcagttgaac

SEQ ID NO: 150856 - DNA, 1101 bp, Artificial Sequence
  derived and/or modified sequence
atgattcgcaactggttgacgatcttcattctgtttcccttgaagctggtcgaaaagtgtgaaagttctgtgtctcttaccgtaccgcccgtggtgaagttagagaacggctcatctacaaacgtgtcgctcactctgcgccctcctcttaatgctacacttgtcattaccttcgagatcacattccgaagtaaaaatataacaatcctggagctgccagacgaggtcgtggtgcccccgggcgtaactaactcatcatttcaggtgaccagccagaatgtcggccagctgacagtgtatctgcatggaaatcatagtaaccagaccggccctcggatcagatttctcgtgattcgatcctctgcaatcagtatcattaatcaggtgataggctggatctatttcgttgcctggtccatatctttttaccctcaggtgatcatgaactggcggagaaagtccgtaatcggactcagctttgacttcgttgctctgaacctaacaggattcgtcgcatacagtgtgtttaatataggcttgctgtgggtaccctatatcaaagagcagttccttctgaaatatcccaacggcgtgaatccagtgaattccaatgacgtttttttctctttgcatgcggtggtgctcaccttgataataatagttcagtgttgtctgtacgagagaggcggccagcgagtgagttggcctgccatagggtttctcgtactagcatggctttttgcctttgtgaccatgatcgtcgctgcagtcggggtgacaacatggctgcagttcttgttttgcttcagctatataaaattggctgtcacgctcgtaaagtattttccccaagcttatatgaacttttactacaagagtactgagggatggtctatcggcaatgtactgttggatttcactggaggaagtttcagccttctgcaaatgttcctacagtcatacaataacgaccagtggactctgatatttggagatccgactaaatttggtctgggtgtgttttctattgtctttgacgttgtgttcttcatccagcatttttgcctctatagaaagcggccaggatacgaccagctgaac

SEQ ID NO: 150857 - DNA, 1101 bp, Artificial Sequence
  derived and/or modified sequence
atgatccgcaactggctgacaatctttatactgttccccctaaagctcgtcgaaaagtgtgaatcctcagtcagcctaaccgttccccccgtggtgaaacttgaaaatggcagctccaccaacgttagcttaactctcaggcctccactaaatgctaccctggtgattacctttgaaatcacctttcggagcaagaacatcactatattggaactgccagacgaggtggtagtaccacccggcgttactaatagcagtttccaagtgacctcacaaaacgtcggccagctaactgtgtacttacacggcaatcacagtaatcagacaggccctaggatcaggttcctggtgataaggtcctccgccatatctattataaatcaagtaattggctggatatattttgtagcatggagtatatccttttatcctcaggttatcatgaactggcggcgcaaatctgtcatcggcttatccttcgatttcgttgcccttaacttaacaggatttgtagcttactctgtgtttaacattgggctattatgggtgccttatattaaagagcaatttctgttgaaatatccaaatggggtgaacccagtgaactctaacgacgtgttcttttctctgcacgccgtggtgctcactctcataattatagtgcagtgctgtctgtacgagaggggaggccagcgggtgtcctggcctgctatcggctttctggtgctggcctggctattcgcatttgtgacaatgatagttgctgcagtcggcgtgacaacatggttacagtttttattttgcttcagttacatcaagctagctgtgacacttgtaaaatacttcccacaagcttatatgaacttctactacaagagcaccgaaggatggagcataggcaatgtcctcctggactttaccggtggctcttttagcctacttcagatgttcttgcagtcttacaataacgaccagtggaccctcatatttggcgatccaacaaaatttggcctgggcgtgttctctattgtctttgatgtggtcttttttatacagcacttctgcctataccgcaagaggcccgggtatgatcagttaaac

SEQ ID NO: 150858 - DNA, 1101 bp, Artificial Sequence
  derived and/or modified sequence
atgataagaaattggcttacaatttttatattatttcctttaaagttagttgaaaaatgtgaatcaagtgtatcacttacggttcctccagtagttaaattagaaaacggatctagtacaaacgtttcattaactttgagacctccattaaatgcaactcttgtaataacatttgaaattacttttagatcgaaaaatataacaattttagaattaccagatgaagtagttgttccacctggagttactaattcatcttttcaagttacttctcaaaacgttggtcaattaacagtttatttacatggaaatcatagtaatcaaactggaccaagaattagatttttagttattaggagctcagcaatttcaattattaatcaggtgattggatggatttattttgttgcatggtctatttcattttatccacaagttattatgaattggagaagaaaatctgttattggactttcattcgatttcgttgcattaaatttaacaggattcgtagcatattcagtttttaatattggtttattatgggttccatatattaaggaacaatttcttttgaaatatccaaatggagttaatccagttaattctaacgatgtttttttttcacttcatgcagttgttcttacattaataattattgtacaatgttgtttatacgaacgtggtgggcaaagagtcagttggccagctattggatttttagttttagcttggctttttgcttttgttactatgatagttgcagcagttggtgtaactacttggttacaatttttattctgtttttcctatataaagttggcagttacacttgtaaagtattttccacaagcatatatgaatttttattacaaatcaacagaaggatggagtattggtaatgttttattagattttacaggtggaagtttttcattattacaaatgttccttcaatcttataataatgatcaatggactttgatttttggtgatcctactaaattcgggcttggagtttttagtattgttttcgatgtagttttttttattcaacatttctgtttatacagaaagaggccaggatatgatcaacttaac

SEQ ID NO: 150859 - DNA, 1101 bp, Artificial Sequence
  derived and/or modified sequence
atgatcagaaattggctcaccatctttattctgttccctcttaaactcgttgagaagtgcgaatcctcggtgtcgcttactgtccctccggtggtgaaacttgagaatggttccagcactaacgtcagccttacgctccgtcctcctctgaatgccactctcgtcattaccttcgagatcacttttcggtcaaagaacatcacgattctggagctgcccgacgaagtcgtggtgcctcccggagtaaccaactcatcgttccaggtcacctcgcaaaatgtgggacagttgactgtgtacctgcacgggaatcattccaaccagaccggtcctcgcattaggtttctggtgattagaagcagcgcgatcagtatcattaaccaagtgattggatggatttacttcgtcgcatggtcgatatcattctacccgcaagtgattatgaactggaggcgaaaatccgtgattggacttagctttgattttgtggcacttaacttgacgggatttgtggcttactcagttttcaatataggtctgctctgggtcccttacattaaggagcaattcctgctgaaataccctaacggagtcaaccctgtcaacagcaatgatgtgttctttagccttcatgccgtcgttctcacccttatcataatcgtccagtgttgtttgtacgaacggggcggacagcgagtgtcttggccagctattggatttcttgtgctcgcgtggctgtttgcatttgtgaccatgatagtcgcggcggttggagtgactacctggcttcaatttctcttttgcttttcttacattaagctggcagttaccctcgtgaagtacttccctcaggcctacatgaatttctactacaaaagcaccgaggggtggtcgattggtaatgttttgctcgattttaccgggggctcgttttcgctcctgcaaatgttccttcaaagctacaataacgatcagtggacccttatctttggtgacccaactaagtttggactcggtgtgtttagcattgtgtttgacgtggtgttctttattcagcatttttgcctgtacagaaagcgccctggctacgaccagttgaat

SEQ ID NO: 150860 - DNA, 1101 bp, Artificial Sequence
  derived and/or modified sequence
atgatcaggaactggctgaccattttcattctgttccccctgaagctggtggaaaaatgcgagtcgtctgtgtccctcacggttccgccggtggtgaaactcgaaaacggaagctcgaccaatgtgagcctgaccctgcggccgcctctgaacgctacgttggtcatcactttcgaaataaccttccggtctaagaacatcactatcctcgagctgccagacgaagtggtggttccaccgggtgtgaccaactcgtcctttcaagtgaccagccagaacgtcggccagctgactgtctacctgcacggaaatcattcaaaccaaactggcccgaggatcaggttcctcgtcatccggtcgtcagcgatttccatcatcaaccaggtgatcgggtggatctatttcgtggcctggtcgatcagcttctatcctcaggtcataatgaattggaggcggaaaagcgtcatcggactgtccttcgatttcgtggcgctgaaccttaccggatttgtggcttacagcgtctttaacatcggactgctttgggtgccatacatcaaggaacagttcctgctcaagtacccaaatggcgtcaatcccgtcaacagcaatgacgtgttcttctcgctgcacgccgtcgtgctcacgctgatcatcatcgtgcaatgctgcctgtacgaacgcggaggtcaacgcgttagctggccggccatcggattcctggtgcttgcatggctcttcgcgtttgtgaccatgattgtggccgcagtcggagtgaccacttggctgcaattcctgttttgcttctcatacattaagctcgctgtcactctcgtcaagtacttcccgcaggcgtacatgaatttctactacaagtctaccgagggatggtcgatcggtaacgttttgctcgactttaccggaggatctttcagcttgctccagatgttcctccaatcctacaacaatgatcagtggactcttatcttcggtgatcctactaagttcgggcttggggtgtttagcattgtgtttgacgtggtgttcttcatccagcatttctgcctttaccggaaacggccggggtacgatcagctgaat

SEQ ID NO: 150861 - DNA, 1101 bp, Artificial Sequence
  derived and/or modified sequence
atgatccgaaattggcttaccattttcattctttttccattgaaactggtggaaaagtgcgaatcatccgtgtcccttactgtccctcctgtggtgaagctcgagaatggctcttccactaatgtgtccctgaccctcagaccacctttgaatgcaaccttggtcatcacttttgaaattactttccggtcgaaaaacataactattcttgaactgccagatgaggtcgttgtgccaccgggcgtgaccaactcgtcatttcaagttaccagccagaacgtgggacaacttacggtgtacctgcatggaaatcactcaaatcaaactggaccccggataagattcctggtcattcggtcgtcggcaattagcatcattaaccaagtcatcggttggatttacttcgtggcatggagcatttcattctaccctcaagtcattatgaattggcgacggaaaagcgtgattggactgtcctttgatttcgtggcactcaaccttactggttttgtcgcgtactcggtgttcaatatcggacttctgtgggtcccatacatcaaggagcagttccttctgaagtacccgaatggtgtgaacccagtcaatagcaacgatgtctttttctcactccatgcggtggtcctgaccctcataatcattgtgcaatgctgtctttacgaacgaggcggacagcgagtctcctggcccgcaattggttttcttgtgctcgcatggctgtttgcatttgtgaccatgatagtggctgccgtgggagtgaccacctggctccaatttctcttctgttttagctacataaagctggcagtgacgcttgtgaagtattttccccaagcctacatgaacttttactacaagtccacggaaggttggagcattggaaacgtcttgctggactttactgggggatcgttttcgcttcttcaaatgtttctccaatcctacaacaacgatcagtggactctgatttttggtgatcccaccaagttcggtcttggcgtgttctcgatcgtgtttgacgtggtgttctttattcagcacttctgtctgtatcggaagcggcccggatatgatcaactgaac

SEQ ID NO: 150862 - DNA, 1101 bp, Artificial Sequence
  derived and/or modified sequence
atgattcgaaactggctcactatctttattctcttcccgctgaaactggtggagaagtgcgaatcgtcagtgagcctgacggtgcccccagtggtcaagctggaaaatggatcgtccactaacgtgagcctgacccttcgtcccccgcttaacgcaaccttggtcataactttcgaaataaccttcagatccaagaatatcactattctggaactgcctgatgaagtggtggtgcctcctggagtgacgaactcgtcattccaagtgacttcacagaacgtgggtcagttgactgtgtaccttcacggtaaccactcaaatcaaacggggcctcggatacgatttctcgtgatccgatcgtcagcaatttccatcattaaccaggttatcggttggatttactttgtcgcttggtccatttctttttaccctcaagtgattatgaattggaggaggaaaagcgtgatcgggctgtcctttgattttgtcgcgcttaacctgacgggatttgtggcttacagcgtgtttaacattggacttctttgggtcccatatatcaaggagcagttccttctcaagtacccaaacggcgttaatccagtgaactcgaatgacgttttctttagcctccatgccgtcgtcttgacgctgatcattattgtgcagtgttgtctgtatgaacggggcggacaaagagtgtcgtggccggcaattggtttcctcgtgcttgcatggctctttgcctttgtcaccatgattgttgcagcagtgggtgtaactacctggttgcaatttctgttttgctttagctacataaagctggcggtaaccctggtgaagtactttcctcaagcctacatgaacttttactacaaatcgaccgagggctggtccatcggaaacgtactcctcgatttcaccggaggatcgttctctcttctgcagatgtttcttcagtcgtacaataacgatcaatggaccttgatcttcggcgacccaactaagtttgggcttggggttttctccatcgtgtttgatgtagtgtttttcatacagcatttctgtctgtaccgcaaaagacccggatacgaccaacttaat

SEQ ID NO: 150863 - DNA, 1101 bp, Artificial Sequence
  derived and/or modified sequence
atgatccggaattggctcacaatctttatactgtttcccttaaaactggtggaaaaatgcgaatcctccgtttccctgacagtgccccctgtggttaagcttgaaaatgggtcttctactaatgtatccttaactctgcgacccccactaaatgccacactcgtcattactttcgaaattacttttcgatccaaaaacatcacaattctcgaacttcccgatgaagtggtcgtacctcctggggtgactaactcttcatttcaggtgacatctcagaatgtagggcagctaactgtgtatctacatggaaatcactcgaatcagacagggccacggatccggttcttggtgattcgatcctctgcaatcagtataataaaccaggttattggatggatctactttgttgcctggtcaatatcattctatcctcaggttatcatgaactggagaagaaaatccgtaatagggctctcctttgatttcgttgccctgaatctcactgggttcgtggcctattctgtctttaacatcggattgctctgggttccatacatcaaagagcagttcctccttaagtatcccaacggagtcaaccccgtgaattctaacgatgttttcttctctctccatgctgtcgtactcactttaatcatcatcgtgcagtgctgtttatatgaaagaggggggcagcgggtttcttggccagcgattggatttcttgtactcgcttggctttttgctttcgtgactatgattgttgctgcagttggagtgacaacatggcttcagtttcttttctgcttcagttacattaaactcgccgtgactcttgtgaaatatttccctcaggcatatatgaacttctattataaatctacagaaggatggtctatcggaaatgtcctgcttgatttcacggggggatctttctccctgctacagatgttcctccagagttataacaacgatcagtggacactcatattcggagaccctacaaagttcggactcggagtgttttccatcgtgttcgatgttgtgttctttatccaacacttttgtctctacagaaagcggcctgggtacgaccagcttaac

SEQ ID NO: 150864 - DNA, 1101 bp, Artificial Sequence
  derived and/or modified sequence
atgattagaaattggctgaccatttttattctattccctttgaagcttgtggaaaagtgcgagtcttccgtttcactcacggtgcctcctgtcgttaagctggagaacgggtctagcaccaatgtttccttgaccctgcggcctcccctaaatgccacactggtgatcacctttgagataacattccgctcgaaaaacatcacaatcctggagttaccagatgaggtggtggtaccccctggtgtgacgaacagctcttttcaggtgacctcccagaatgtcggacagctcaccgtctacctacatgggaatcatagtaatcagactggtcccaggatccggttcctggtgatcagaagcagcgctattagtatcatcaatcaagtgatcgggtggatctactttgtggcatggtccatctcattctacccccaggttatcatgaactggcggcggaagagcgtgattggactgagcttcgatttcgttgcattgaacctcactggattcgtcgcatacagtgttttcaacataggtctgctctgggttccttacattaaggaacagttccttctcaagtatcccaatggagtgaatcccgtgaatagtaatgacgtgttcttttccttgcatgcagtggtcttaaccctaataatcatcgtgcagtgctgtctttacgagagggggggacagagagtctcttggccagctataggcttcctggtgctggcgtggttattcgcgttcgtcaccatgatagtagcagctgtaggggtaactacctggctgcaattcctattctgcttctcatacattaagctcgcagtgacattggtgaagtacttcccccaggcttatatgaacttttattataaatccaccgaagggtggagcatcggcaatgtgctgctcgatttcacaggcggaagtttctccctgttgcagatgttcttacagagctacaataatgatcaatggacactgatttttggggacccaactaaatttggcctcggggtcttttctatcgtttttgacgtcgtgtttttcatccagcacttttgcctgtatcggaagcgaccagggtacgaccagcttaat

SEQ ID NO: 150865 - DNA, 1101 bp, Artificial Sequence
  derived and/or modified sequence
atgatacggaactggctgaccatcttcatcttgtttcccctgaagctcgtggaaaagtgcgagagctcagtgtccttgaccgtcccgccggtggtgaaactggaaaacggatcgtcaactaatgtctccctgactctccgcccgccgttgaacgccacgctggtgatcacgttcgaaatcacctttcgttcaaagaatatcaccattctggaattgcctgatgaggtggtggtcccaccgggcgtgaccaattcctcattccaggtgacctcgcagaacgtcggtcaattgactgtttatctgcacggcaaccattcgaatcagacgggcccgcgaatcagattcctcgtcatcaggagctcagccatctcaataatcaatcaagtgatcggctggatctactttgtggcatggtctatcagcttctacccgcaagtgattatgaactggcggcggaagtcggtgattgggctgtccttcgacttcgtggcgctgaacctcaccggcttcgtagcctactcggtgtttaacattggactgctctgggtcccctacatcaaagagcagttcctgttgaagtacccaaatggagtgaaccctgtgaattccaatgatgtgttcttcagcttgcatgcggttgtactgaccctcattatcatcgtgcaatgctgtctctacgagaggggaggacagagagtctcttggcctgccatcggattcctggtcctggcatggctgtttgccttcgtcactatgatagtcgccgctgtcggagtgactacttggctccaatttctgttctgcttctcatacatcaagctggcggttactcttgtgaagtacttcccgcaagcatacatgaacttttactataagtccaccgagggatggtcaattggaaacgtcctcctcgacttcacggggggatcattcagcctcttgcagatgttcctgcagtcctacaacaacgaccagtggactctcatctttggcgaccctacgaaattcgggctgggggtgtttagtatcgtgtttgatgtggtgttcttcatccagcacttctgcctgtaccgcaaaagaccaggatacgaccagctcaac

SEQ ID NO: 150866 - DNA, 1101 bp, Artificial Sequence
  derived and/or modified sequence
atgatccgcaactggctgactatcttcatcctttttccgctcaagctcgtcgagaagtgcgagtcaagcgtgtccttgacggtccctcctgtcgtcaagctcgagaacggtagctccaccaacgtgtcgctgactcttagaccaccgctcaatgccacgctggtcattactttcgaaatcactttcaggagtaagaacatcaccatcctggaattgccggacgaagtggtggtgccgccaggggtgactaattcttcgttccaggtgacctcacaaaatgtcggtcagcttaccgtgtacctgcatggtaatcactcgaaccagaccggcccaagaatacggttccttgtgatccggtcctcggcaatctcgatcatcaaccaagtgattggatggatctacttcgtggcctggtcaatttcgttttacccgcaagtcattatgaactggcggcggaagtccgtgatcgggttgtccttcgacttcgtcgcgctgaatctgaccgggtttgtggcttactcggtgttcaatatcggactgctctgggtgccctacattaaggagcagtttctcctgaaatatccgaacggagtcaaccctgtgaactccaatgacgtgttcttcagcctccacgcagtcgtgctgactcttatcatcatcgtgcaatgctgtctttacgagcggggcggacaacgggtgtcgtggcctgctatcgggttcctggtgctggcctggttgttcgcctttgtcacgatgatcgtcgctgccgtcggggtgaccacgtggctccagttcctgttctgcttttcatacatcaaactcgcggtgaccctggtgaaatacttcccccaggcctacatgaacttctactacaagtccacggaaggatggtcaatcggaaacgtgctgctggacttcaccggaggatctttttcactgctgcagatgttcctccagtcgtacaataacgaccagtggactctgatatttggggacccaaccaagttcggactgggcgtcttctcgatcgtgtttgatgtggtgttcttcatccagcacttctgtctgtatcggaagcggccaggatacgatcagctgaac

SEQ ID NO: 150867 - DNA, 1101 bp, Artificial Sequence
  derived and/or modified sequence
atgatccgcaactggctcactatattcatcttgtttccactcaagctggtggaaaagtgcgaatcctccgtgtcactcaccgtcccgcctgtggtgaaactcgaaaatggatcttccaccaatgtctcactcaccctcagaccgccgcttaacgcgactctggttataactttcgagatcactttccgctcaaagaacatcaccatcctcgagctgccggacgaggtggtggtaccccctggcgtaaccaattccagtttccaggtgacctcgcaaaacgtcggtcaacttactgtctacctccatgggaaccacagcaaccagacgggaccacgcatccggttcctggtgatcaggtcgtccgccatatcgattatcaaccaggttattggctggatctacttcgtggcgtggtccatctcattctatccacaggtgattatgaactggcgtcgcaagagtgtgatcggtctgtccttcgatttcgtggcattgaacctgactggcttcgtggcctactcggtattcaatatcgggctcttgtgggttccttacatcaaggagcaatttctcctgaaatatcccaatggagtgaatccagtcaactcgaacgacgtctttttctcgctgcacgcggtcgtcctgactctcatcattatcgtgcagtgctgcttgtacgaacgaggaggacagcgggtgtcgtggccggcaatcggatttctggtcctggcgtggcttttcgcctttgtgaccatgattgtggctgccgtcggtgtcactacgtggctgcaattcctgttctgtttcagctatatcaagctggctgtgaccttggtcaaatactttccgcaggcttacatgaacttttactacaagagcaccgaaggatggtctatcggcaatgtgctgctggactttaccggaggcagcttttcgctgttgcaaatgttcctccagtcatacaacaatgaccaatggacgctcatcttcggggatccgaccaaattcggactgggtgttttctcaattgtgttcgacgtggtgtttttcattcagcatttttgcctgtacagaaagcggccggggtacgatcagctgaac

SEQ ID NO: 150868 - DNA, 1101 bp, Artificial Sequence
  derived and/or modified sequence
atgatccggaattggctgaccattttcatcctgtttcccttaaagttggttgagaagtgtgaatccagcgtgagtctaaccgtcccacctgtggtgaagctggaaaacggaagctccaccaatgtcagtctcactctcagaccgcctctgaatgccaccctcgtgattaccttcgagatcaccttcaggtccaagaacataaccatcctggaactgccggacgaggttgttgttccaccaggggtgacaaactcgagctttcaggtcacctcccagaacgtgggacagcttaccgtgtatctgcatggaaaccatagcaatcagacggggccgcggattcggtttttggtgattcgtagcagtgctatcagcataattaaccaggtaatcggctggatttactttgtcgcatggagcatcagcttctacccgcaggttatcatgaactggaggcgcaaatctgtgatagggctgagttttgactttgttgccctgaaccttacaggattcgtcgcatacagcgtgttcaatatcggcctgctctgggtgccctacatcaaagagcagttcttgctaaagtacccaaacggggtgaatcctgttaacagtaacgacgtgtttttttcattgcacgccgtggttttgactctaataatcatcgtccagtgttgcctctacgagcggggtggccagcgggtgtcttggcctgcgattggctttcttgtgctggcgtggctgttcgcattcgtgactatgatcgtcgccgcggttggggtgacaacctggctgcagtttctcttttgtttcagttatattaagctggccgtgaccctggtcaagtactttccacaagcatacatgaacttttactacaaatctacagaaggttggagtattgggaatgtgctactggacttcacaggggggtccttttcactgctgcagatgtttctacagtcctacaacaacgaccaatggaccctgatcttcggcgatccaaccaagtttggactcggggtgttcagcatagtttttgatgtggtgttcttcattcagcacttctgcctgtaccgaaaacgacctggatacgatcaactcaac

SEQ ID NO: 150869 - DNA, 1101 bp, Artificial Sequence
  derived and/or modified sequence
atgattagaaattggctcacaatctttatcctgtttcctctgaaactcgtggaaaagtgtgagagcagtgtaagccttacagtaccccctgtggtgaaactcgagaatggatcctcaactaacgtgagcttaacccttcgcccaccactgaacgcgacccttgtaatcacatttgaaatcacgttccgcagtaagaatataactattctggagcttcccgatgaggtggtggtgccccccggcgtgaccaatagcagtttccaggttacgagccagaacgtgggccaattgactgtttacctgcacggaaatcactccaaccagacagggcccaggattcgattcctggtgattagatcctcagcaatctcgatcataaaccaggtcatcggatggatctatttcgtagcttggagtatttcgttttatccgcaggtaatcatgaactggaggcgcaagagtgtgatcggactgtcgtttgactttgtagcattaaatctaactgggtttgtggcatacagcgtttttaatatcggtttgctgtgggtgccttatatcaaagagcagttcctattgaaatatcctaatggtgttaatcctgtcaattcaaatgatgtgttctttagcctgcacgcagtcgtcctgactctgatcataatcgtccagtgctgtctgtacgagcgtggcggtcagagagtgtcctggcccgcaatcggattccttgtgctagcctggctgtttgccttcgtgactatgatcgttgcagctgttggagtgaccacttggctgcagttccttttctgcttttcatacataaaactggctgtaacactggtcaaatattttccacaagcctacatgaacttttactacaagtcaactgaaggttggtcaatcggaaatgttctgttggactttactggaggatcgttttccctactgcagatgtttcttcagtcatacaacaacgaccagtggaccctcatttttggggatccaacaaagtttgggttgggggtttttagcattgtgttcgatgtcgtcttcttcattcagcatttttgtctctacaggaagcgcccaggttatgaccaattgaat

SEQ ID NO: 150870 - DNA, 1101 bp, Artificial Sequence
  derived and/or modified sequence
atgattagaaactggctcaccatcttcatcctcttccctctcaaattggtggagaagtgtgagtcatcggtgtcacttactgtcccgccggtcgtcaaactggagaatggaagctctaccaacgtctccctcaccctccgacccccgctgaatgcaaccttggtgatcacctttgagattacctttaggagcaaaaacatcaccatcctggaactgccggacgaagtggtggtgccacccggcgtcaccaactcatccttccaagtcacctcccagaacgtgggtcaactcaccgtgtacctgcacggcaatcatagtaaccagactggccctaggataaggttcctcgtgatccgctcatcggcaatctcgatcatcaaccaggtgatcggatggatctacttcgtggcgtggtcgatctcattctaccctcaggttatcatgaattggcgccgtaaaagcgtcataggacttagcttcgatttcgtggcccttaacctgaccggatttgtcgcttattccgtattcaacatcggactgctgtgggtgccgtacatcaaagaacagtttctgctgaagtacccaaacggtgtgaatccggtgaattccaatgacgtattcttctccctgcacgccgtagtgctgactttgattatcatcgtgcaatgctgcctttatgaaagaggagggcagcgcgtgtcatggcctgccatcgggttcctcgtcctcgcgtggcttttcgcctttgtgaccatgattgtcgccgcggtgggcgtgactacctggctgcagttcctgttctgcttctcttacatcaaactcgcagtgactcttgtgaaatacttcccacaagcctacatgaacttctactacaagagcacggagggctggtccatcgggaatgtgcttctggacttcactggaggtagcttcagcctgctgcaaatgttcctccagtcctataacaatgaccagtggaccctgatcttcggagatccgactaagtttggccttggcgtgttctcgatcgtgttcgatgtggtgtttttcattcagcacttctgcctgtatcggaagcggccaggatacgaccagctgaac

SEQ ID NO: 150871 - DNA, 1101 bp, Artificial Sequence
  derived and/or modified sequence
atgattcgcaattggttaactatatttatcctctttcctctgaaacttgtagaaaagtgtgaatcgtccgtttccctgactgttcccccagtggtgaagttggagaacggatcatctactaacgtgtctctgacacttcgaccccccttgaacgctaccctcgttatcacatttgagattactttccgcagcaagaacattacaattttggagttaccagacgaagtagttgtcccccccggagtgaccaacagctctttccaggtgacaagccagaacgtcgggcaactgaccgtgtatctacacggcaatcactctaaccagacaggcccccgcatccggttcctcgttattcgatcctccgcgatcagcatcattaaccaggttataggatggatatactttgtggcgtggagtatcagtttctatccacaggtcatcatgaattggcgtcgcaaatctgtgataggcctgagcttcgatttcgtcgccttgaatttaactggcttcgtggcctattcagttttcaacatcggcctactgtgggtcccttatatcaaggagcagttcttgttaaagtatccaaatggcgtcaatccggtgaactccaacgacgtgtttttcagccttcacgccgtggtgctcacactaatcataatagtgcagtgttgtctttacgaacgaggggggcagagagtatcttggccagctatcggctttcttgtcttggcatggttgttcgcatttgtcactatgattgtagccgctgttggggttacgacatggctacagttcttgttctgtttctcatacattaagttggccgtcacactcgtgaaatacttcccccaagcctacatgaacttttactacaagtcgacagagggttggtccatcggcaacgtgctgttagactttaccggtggtagcttcagtctactccaaatgttcttgcagtcctacaacaacgaccagtggactctgattttcggggacccaacgaaatttggcctcggcgtgttctctatcgtgttcgatgtggtttttttcatccagcatttttgtctatatcgaaaacggcccggctacgatcaactgaac

SEQ ID NO: 150872 - DNA, 1101 bp, Artificial Sequence
  derived and/or modified sequence
atgattagaaattggctcactattttcatactgttcccactgaagctcgttgaaaagtgtgagtctagcgtttcactcactgtcccaccagtggttaaactagagaatggatcctcaaccaacgtgagccttaccctgaggcctccgctcaatgcgacactggttatcacgttcgagataacgtttcgctccaagaatatcacaatactcgagttaccagacgaagtcgtggtgccgcccggagttactaattcctctttccaggtgacatcacaaaatgtcgggcagctaactgtatatctgcacggcaaccatagcaaccagactggtcctcggattagattcttggttatcaggagctcagctattagcataattaaccaggttattggttggatttactttgtggcttggtccatttctttctatcctcaagtgattatgaactggcgaaggaaaagcgtcatagggctcagctttgatttcgtggcgctgaatctgaccgggttcgttgcctatagtgtgttcaacatcggattattgtgggttccctatatcaaggaacagttcttacttaaatatcctaatggcgttaatcctgtcaacagtaatgatgtcttcttctccctccacgctgtggtgcttaccctgattataatcgtgcaatgttgcctgtacgagagggggggccaaagagtgtcctggcctgccatcgggttcttggtgttggcatggcttttcgccttcgtcaccatgattgtggccgctgtgggcgtgactacatggcttcagttcttgttttgctttagttacataaagctagctgtaactctggtgaagtatttcccacaggcctatatgaacttctactacaaatcaactgaggggtggagcatcgggaatgtgctactggactttacggggggcagtttctccctgctccagatgttcctgcagtcttacaataatgaccagtggaccctgatattcggggatcctacaaagtttgggcttggggttttcagcattgtcttcgacgttgtgtttttcatccaacacttttgtctgtacaggaaacgtccaggctacgaccagctgaac

SEQ ID NO: 150873 - DNA, 1101 bp, Artificial Sequence
  derived and/or modified sequence
atgatccgcaattggctgaccatctttatcctgtttccactgaagctggttgagaaatgtgaaagttctgtctcactgaccgtcccgcccgttgttaaacttgagaatgggagcagcaccaacgtaagcctcaccctgaggcctccgctaaatgctactcttgtcattacattcgagatcacttttcgctccaagaatattaccatcctggaactgcctgacgaggtggtcgtcccgcccggggtcaccaattccagcttccaggtcactagccagaatgttggccagctgaccgtgtatctccatggaaaccacagcaaccagactggccctcgcatccgtttcctggtaatacgtagcagcgcgatatcaattataaatcaagttatcggctggatctacttcgtggcttggagcattagcttttatccgcaggtgattatgaactggcgacgcaagtctgttattggtctgagcttcgactttgtggcccttaaccttaccggttttgtcgcatattccgtgttcaacatcggcctgctgtgggttccgtatattaaggagcagttcctattaaaatatccgaatggtgtcaaccctgtgaatagcaatgatgtcttcttctctctgcacgcagtcgttctgacgcttattattatcgttcaatgttgcctgtatgagcgaggtggtcagcgggttagctggccggcgatcggctttttggtcctggcctggctgttcgcgtttgtgacgatgattgtggcggcggttggtgtgactacgtggctccagtttctgttctgtttcagctacatcaaactcgcggtaaccttagtcaaatattttcctcaggcatacatgaatttttactataaaagcaccgagggctggagcattggtaacgtgctgctggattttactgggggttcgttcagccttttgcagatgtttctgcagagctataataatgatcagtggaccctgatttttggagatccaactaagtttggtctgggcgtgttcagcattgtgtttgacgtcgttttttttatccagcatttttgcctctaccgcaagcgaccgggatacgatcagctgaat

SEQ ID NO: 150874 - DNA, 1101 bp, Artificial Sequence
  derived and/or modified sequence
atgatccggaattggctgaccatcttcatcctttttcctcttaaactggttgagaagtgtgaaagctcagtgtccttgactgttccccccgtcgtgaagctcgagaacggatcgtcaaccaacgtgtctcttaccctccgacccccactgaacgcaactctggtgattaccttcgagattacgttcagaagcaaaaacatcactatactcgaactgccagatgaagtggtggtcccgccaggagtgactaacagctcgtttcaggtgacctcgcagaatgtcggtcaactgactgtctatctgcatggtaatcactctaaccaaactggtccgcgaattcgatttcttgtcattagatcgagcgctattagcattatcaaccaagtgatagggtggatttacttcgtggcatggtccatctcgttttacccgcaagttatcatgaattggcggagaaaaagcgtgatcgggctgtcatttgactttgtggcactgaatttgacgggcttcgtcgcgtactcagtgtttaacatcggccttctgtgggtgccttacattaaagagcagtttctcctcaagtaccctaatggagtcaacccagtgaattcaaacgatgtgtttttctcgcttcacgccgtcgtcctgaccctcatcatcatcgtgcaatgctgtctttatgaaaggggaggacaaagggtgtcgtggccagccattggcttcctggtcctcgcatggctgtttgcgtttgtcaccatgattgtcgccgcagtgggtgtgactacctggcttcaattcctgttttgtttttcgtacattaagttggcagtcactctcgtgaagtacttccctcaagcgtacatgaacttttactacaagtccactgagggatggagcattggaaatgtgctgcttgattttaccgggggctcgttctcccttctgcaaatgttcctccaatcctacaacaatgatcagtggaccctcattttcggtgatcctactaagtttggtttgggggtgttttcaatcgtgtttgacgtggtgttctttatacaacacttctgcttgtacaggaagaggccaggctacgatcaactgaac

SEQ ID NO: 150875 - DNA, 1101 bp, Artificial Sequence
  derived and/or modified sequence
atgattagaaattggctgacaattttcatcctcttcccactaaagctggttgaaaaatgcgagagcagcgtcagcctgacagttcctcctgtggtgaagctcgaaaatgggtcttctacgaatgtgtcgctgacgctccggcctcccctcaacgctaccctcgtcataaccttcgagattacgttccggtctaagaacatcaccattctggaactacccgacgaagtggtagtccccccaggagtgactaacagtagctttcaagtcactagtcagaacgtcggtcagctgaccgtgtacctccacggcaaccacagcaaccagactggcccgaggatacggtttctcgtaatccgaagcagcgctatttctatcataaaccaggtcatcggctggatttatttcgtcgcctggagcatctccttttacccacaggtcataatgaactggcgccggaaatcagttataggtttatcattcgactttgtggcccttaacctgaccggcttcgtagcatactcggtattcaacatagggttgctgtgggtgccatatattaaagaacagtttctgttaaaataccctaacggggtgaatcctgtcaacagcaacgacgtgttctttagtcttcatgctgttgtactgacccttatcattatcgtacagtgttgcttatatgagcgtggagggcaacgtgtcagctggcccgctataggatttttagtcctcgcctggttgtttgccttcgtcaccatgatagtcgcagctgtcggtgtgacaacgtggctgcaattcttgttctgttttagctacatcaagttggccgtcaccctagtgaagtacttcccccaggcttatatgaatttttactacaaatcaactgaaggctggtctatcgggaatgtactgctggatttcaccggcggatccttttctctcttgcagatgttcttacagagttacaacaacgaccaatggacccttattttcggcgatccgactaagtttggactgggcgtgttttctatcgtgttcgacgtcgtctttttcattcagcatttttgcctatatagaaagcggccggggtatgatcagttaaac

SEQ ID NO: 150876 - DNA, 1101 bp, Artificial Sequence
  derived and/or modified sequence
atgatccggaattggctcactattttcattcttttcccgctgaaactggtggagaaatgcgagtcatcggttagccttacggttccccccgtcgtaaagctggaaaacggatcctcgaccaacgtgtccctgacgttgcgtccgccgttgaacgccacattggtgatcacgttcgaaataacattccgctcgaagaatatcaccattctggagctgcccgatgaggtggttgtccctccgggcgttacaaactcatcctttcaggtgacctcccagaatgtcggacagctgaccgtctaccttcacggtaatcatagcaaccaaaccggtccgcgcattcgattcctggtgatccgtagctccgcaatatcgatcatcaaccaggtgattggctggatatacttcgtagcgtggtctattagcttctatccacaggtgatcatgaactggagacgtaagtcggtaattggcctctccttcgattttgtagctctaaatctgactggcttcgtggcctattcggtgttcaacattggcttgctgtgggtgccatacataaaggagcagttcttactgaaatacccgaatggcgtcaacccagtgaactcgaacgatgtgtttttttcgcttcatgccgtggttctgaccttgattattattgttcagtgctgcctatatgagcgcggcgggcaacgggtgagctggccagccatcggctttctggtcctggcctggttgttcgccttcgttaccatgattgtggccgccgtgggcgttaccacctggttgcagttcctgttctgcttctcgtacatcaagctcgccgtcaccctggtaaaatacttcccacaggcttacatgaacttttattataagagtacagaaggatggagcatcggcaacgttctgttggactttactggtggctcattctcgctgttgcagatgttccttcaaagttacaacaatgaccagtggaccttgatcttcggtgatccaaccaaatttggcctaggagtgttttccattgtcttcgacgttgtgtttttcatccagcacttctgcctgtaccgcaagcgaccgggatacgatcagctgaat

SEQ ID NO: 150877 - DNA, 1101 bp, Artificial Sequence
  derived and/or modified sequence
atgatcaggaattggctcacgatattcatcctgttcccactaaagctcgtggagaaatgtgagtcgtctgtgtcactgactgtgcctcctgtcgtcaaactggagaatggctccagcacgaacgtcagcctgacacttagacctccattgaacgccactcttgtcatcactttcgagatcacattccgctccaaaaatataaccattctggaactgccggatgaggtggttgttcccccaggtgtgactaactctagttttcaggtaacatctcaaaacgtagggcagttgactgtgtacctgcatggtaatcatagcaaccagactgggcccagaattaggttcctcgtgatacgtagctcagccatctctatcatcaaccaggtgattggatggatctacttcgtggcgtggtctatctcattttatccacaagttatcatgaactggaggcgaaagagcgtcataggactgtcgttcgactttgtggccctgaatctgactgggtttgtggcttactctgtgtttaacatcgggctgttgtgggtaccttacatcaaggagcagtttcttcttaagtaccccaacggggtcaatcccgtgaacagtaatgatgtgttttttagtctccatgccgtcgttttaacattgatcatcatcgtccagtgctgtctatacgaacgaggcggccagagggtctcctggccagcaatcggcttcttagtgcttgcctggctctttgcgtttgtcaccatgatcgtggcggccgttggggttacaacatggcttcagtttctgttctgtttctcttacatcaagcttgcagtgacgctagtgaaatatttccctcaggcctatatgaatttttattacaaatcgactgaggggtggtccatcggaaacgttttgttagacttcaccggggggtctttctcccttctgcagatgtttctgcagtcatacaacaacgaccaatggaccctaatctttggcgatcccactaaatttggactgggggttttctccattgtcttcgatgtggttttctttattcagcacttctgtctgtatcgaaagcggcccgggtatgaccagcttaac

SEQ ID NO: 150878 - DNA, 1101 bp, Artificial Sequence
  derived and/or modified sequence
atgatcaggaactggttgacaatctttatccttttccccctgaaactcgttgaaaaatgtgaaagcagtgtgtctctgactgttccacccgtggtgaagctggagaacggcagctctaccaacgtttcactcacgctgagacctccactgaacgctactctcgttatcacctttgagatcacctttcgctcaaagaatatcacgatcctcgagctgcccgacgaggttgtggtgcctcccggggtcacaaattcctcatttcaggtgacatcccagaacgttggtcagctcacggtctatctgcacggaaatcacagcaaccagacgggtcctcgaatcagatttctcgttataagatcaagcgctatatccatcatcaaccaggtgatcgggtggatttactttgtggcctggtccatcagtttctacccccaggtgataatgaactggagaagaaagagtgtcattggtctgtcttttgacttcgtcgcactgaatttgaccggcttcgtggcctactcagtgtttaacattggcctcctctgggttccatacattaaggaacagtttctgttgaagtaccctaatggagtgaaccctgtgaacagcaacgatgtcttttttagtctgcatgctgtcgttctgaccctgattatcatcgtgcagtgttgcctctacgaacggggaggacagagggttagttggccagcaatcggctttctcgtgctggcgtggctgtttgccttcgtcaccatgattgtagcagccgtgggtgtcaccacatggctccagtttctgttctgcttctcttatattaagttggcagtcactctcgtgaagtactttccccaggcgtacatgaatttctattacaaatccaccgagggctggagtataggtaatgtcctgctcgacttcacaggagggtccttctccctcctccaaatgtttcttcagagctataacaacgaccagtggacgctcatttttggcgatcccactaagttcggcttgggtgtattctcaattgtctttgacgtcgtgttctttatccagcatttttgtctctatcgcaagaggcctgggtatgaccaactcaat

SEQ ID NO: 150879 - DNA, 1101 bp, Artificial Sequence
  derived and/or modified sequence
atgataaggaactggcttactatcttcattcttttcccccttaaacttgtggaaaagtgtgagtcctccgtgtctctcaccgtgccaccagtggtcaagctggaaaacggatcctcaactaacgtgtcgcttaccctcagaccccctctgaatgcaactctggtgattacctttgaaattacttttcgctccaagaatatcactattctcgaactgcccgacgaagtggtggtgccccctggtgtcactaattcgtcgttccaggtcacctcccagaatgtggggcaattgaccgtctaccttcatggaaaccattcgaaccaaactggaccccgcattcgctttcttgttattagatcatcggcgatctcgattatcaaccaggtgatcggttggatctattttgtggcatggagcattagcttttacccacaggtgatcatgaactggaggcggaagtcggtcattggactctcctttgatttcgtggcactgaatctcaccggctttgtcgcctactcggtgtttaacatagggcttctttgggtgccatacataaaggaacagtttctgctgaaataccctaatggcgtaaacccagttaactccaacgacgtgtttttctcgctgcatgcggtggtgttgaccttgattatcatagtgcagtgctgcctttacgaaagaggaggtcagcgggtttcctggccagctatcggatttcttgtgctcgcgtggctgtttgcatttgtcaccatgatcgtcgcagcagtgggagtgacgacctggttgcaattccttttttgtttttcctacatcaagctcgcagtgaccttggtgaagtacttccctcaggcatacatgaatttctactacaaatcaactgagggttggtcgattggaaacgtcctccttgattttaccggtggatccttttcgctcctccagatgtttctccaatcgtacaataacgatcaatggactctgatatttggagatccgaccaagtttggtctgggagttttttccatcgtgttcgatgtcgtctttttcattcagcatttctgtctgtaccggaaacgcccgggttacgatcaacttaac

SEQ ID NO: 150880 - DNA, 1101 bp, Artificial Sequence
  derived and/or modified sequence
atgattaggaactggctgacgatctttatcctcttcccgcttaagctcgtggagaaatgcgagtcgtccgtctcacttacggtgccgccagtggtgaagctcgaaaacggttcgtcgactaatgtgtccctcacgctccgaccaccgctgaacgccactctggtgatcacctttgaaatcaccttcagatcgaagaatatcaccatcctggagctgcctgatgaagtggtggttccgccaggcgtgaccaactcgtcctttcaagtgacttcccagaacgtcggccagctgaccgtgtacctgcatggaaatcacagcaatcaaaccggccctcgcatcaggttccttgtgatccgctcgagcgcgatcagcatcatcaaccaagtgatcggatggatttacttcgttgcatggtccatcagtttctaccctcaggtgatcatgaactggcgcagaaagagcgtgatcgggttgagtttcgatttcgtggcactgaatctcactggattcgtcgcctactccgtctttaacattggactgctctgggtgccgtatatcaaggaacagttcctgctcaagtaccccaatggggtcaatccggtaaattcgaacgacgtgtttttctccctgcacgcggtagttctcacccttatcattatcgtccagtgctgcttgtatgagcggggaggacagagagtgagctggccagccatagggttcctggtgctcgcttggcttttcgcctttgtgaccatgatcgtggcagctgttggagtcacgacttggcttcaatttctgttctgtttctcgtacatcaaactggccgttactctcgtcaaatacttcccccaggcgtacatgaacttctactacaagtcaactgaaggatggtcgataggtaatgttctcctggatttcaccggtggttcatttagcctgctccagatgttcctccaatcctacaacaacgaccaatggaccctgattttcggtgatcccacgaagtttggcctgggcgtgttctccatcgtgtttgatgtggtgttctttatccagcacttttgcctctaccggaaacgcccgggctacgaccagctgaac

SEQ ID NO: 150881 - DNA, 1101 bp, Artificial Sequence
  derived and/or modified sequence
atgatcaggaactggctcaccatcttcatcctgttcccgctgaaacttgtcgaaaagtgtgaatcgagcgtttcactgacggtcccacctgtggtcaaactggagaatggctcaagtaccaatgtttccttgactctccgccctcccttgaatgcgacgttggtaataaccttcgaaatcacatttcgttcgaagaacataactatcctagaattacctgatgaagtggtggtcccccccggtgtcacaaacagtagctttcaagtcacaagccagaacgtcggacagcttactgtatacctccacggcaaccacagtaaccaaacaggaccccgaatccggttcttggtcatccgatcatccgcgattagcatcattaaccaagtcatcggctggatctactttgtggcctggtcaatttcgttttatcctcaggtcatcatgaattggcgccgtaaatcagtgatcggactgtccttcgactttgttgctcttaacctaacgggcttcgtcgcctatagcgtcttcaatatcggactcttgtgggtaccttacataaaagaacagtttttgttgaagtatccaaatggggtgaatcctgtgaatagtaacgacgttttcttttctttacacgcggttgtccttactctcatcatcatcgtgcaatgctgtttgtacgagcgaggaggtcagcgcgtatcttggccagccatcggattcctcgtgctggcctggttgttcgcattcgttactatgatcgtcgcagcagtcggtgttacgacctggcttcagttcttgttctgcttttcctatatcaaactcgcagttacgctggttaaatatttcccacaagcttacatgaacttctattacaagtccacagaaggttggagcatcggcaatgtgcttctggactttaccggtggctctttcagtctactgcagatgttcttgcaatcctataacaacgatcagtggactctgatcttcggcgatcctaccaagtttggtttgggagtgttttcgatagttttcgacgttgtgtttttcatacaacacttctgcctttataggaagagacccggatacgatcagttgaat

SEQ ID NO: 150882 - DNA, 1101 bp, Artificial Sequence
  derived and/or modified sequence
atgattaggaactggttgacgatcttcatcctctttcccctgaagttggttgagaagtgtgaaagctccgtgtccctgaccgttccgccggttgtgaaactagagaacggttctagcaccaacgtctccctcacactgcgccccccccttaacgccacgctcgtgatcactttcgagatcactttcagatctaagaacatcacaatcttagagcttcccgacgaggtggtggtccctcctggcgtcaccaactcctcattccaggtgacctcccagaacgtaggacaactgaccgtatatctgcatggaaatcacagtaatcagacgggtcctagaattcgttttttggtcatccgctcgtctgccatctctatcattaatcaggtcattggttggatctacttcgttgcctggtcgattagtttctatccccaggtcataatgaattggcgtagaaagtccgttatcggcttgtcgtttgatttcgtggcattaaaccttaccggtttcgttgcctactccgtctttaacatcggtctgctttgggtgccttacattaaggaacaatttcttctcaagtatccgaatggcgttaatccagtaaactcaaacgacgtcttcttctccctccatgccgtcgtccttaccctcatcatcatcgtgcagtgttgcctctatgagaggggcggtcagcgtgtgtcttggccggctatcggttttttggtcctggcctggctcttcgccttcgtgaccatgatcgtggccgcagtgggcgttaccacatggttgcagttcctattctgtttctcgtacattaaactggccgtgacgcttgtcaagtacttccctcaggcatatatgaacttttactataaatccaccgaaggctggtcgatcggcaacgtgctgctggatttcactggtggttctttttctctgttgcagatgtttctccagtcctataacaacgatcagtggacactcatctttggggatcccaccaagttcggtctcggcgtcttttcaatcgtgtttgatgtggtgttctttattcagcacttctgtctttaccgcaagcgtccgggctatgaccagctcaac

SEQ ID NO: 150883 - DNA, 1101 bp, Artificial Sequence
  derived and/or modified sequence
atgattaggaactggcttaccatctttattctttttccccttaaacttgtggagaaatgcgagagctccgtgtcactgaccgttccccccgtcgtgaagctggaaaacggttcttccaccaatgtgtcactcacccttcgtccacctctcaacgcgactctcgtgataactttcgaaatcacttttcgatccaaaaacattacgattctcgaattgcctgatgaggtcgtggtcccacccggcgtcactaactcgtcttttcaagtcacctcgcagaatgtcggtcaactcacggtgtatcttcatggaaatcattccaaccaaactgggccaagaatccggtttttggtgattagatcgtcagccatttctattatcaaccaggtgatagggtggatatactttgtcgcatggtcgatatcattttacccgcaggtgattatgaattggcgtcgaaagagcgtgatagggctcagcttcgacttcgtggccctcaacctgactggttttgtggcctacagcgtgttcaacattgggcttctgtgggtcccgtacatcaaggagcaatttctgcttaagtatcccaacggagttaacccggtgaattccaacgacgtgttctttagcctgcacgcagtcgtgcttactctgatcattattgtacagtgttgcctgtacgaaagagggggacaacgtgtgtcctggcctgcaatcggatttctcgtcctggcgtggcttttcgcatttgtgaccatgatagtcgcagcagtgggagtcaccacctggcttcagttccttttttgttttagctacatcaagctggccgtgaccctggttaagtacttcccgcaggcatacatgaatttctactacaagagcactgaagggtggagcattggtaatgtgctgctcgattttaccggtggatccttttccctgttgcaaatgttccttcagtcgtataacaatgaccaatggaccctcatttttggagatccgactaaattcggattgggcgtctttagtatcgtgtttgacgtggtgtttttcattcagcacttctgtctttacaggaagcgacccggatacgatcaactgaac

SEQ ID NO: 150884 - DNA, 1101 bp, Artificial Sequence
  derived and/or modified sequence
atgatccgcaactggctgaccattttcatactttttcctctgaagctggtggaaaagtgcgaatccagcgtgtcgctcactgtccctccagtcgtcaaactggaaaacgggtcgtcgactaacgtgtcactcactctcagaccacctctgaatgcgacgctcgtgattacttttgagatcacctttcgctcaaaaaacatcaccatcctggagctgcctgatgaagtcgtcgtcccgccgggagtgaccaactcgtcgttccaagtcacctcgcagaacgtgggacaactgacggtgtacctccacggaaatcactcgaaccaaacgggaccaagaatccggtttttggtgatccgcagtagtgccattagcatcattaatcaagttatcggctggatctacttcgtggcgtggtccatctcgttctacccacaggtgattatgaactggcgccgcaagtcagttattggactctccttcgacttcgtcgcactgaacctgactggatttgtggcttacagcgtgttcaatatcggactcctgtgggttccctacattaaggaacagttcttgctgaaatacccaaacggcgtcaatccggtcaatagcaatgatgtgttcttctccttgcatgcagtggtgctcaccctgatcatcatagtccagtgctgcctgtacgaacgaggcggtcagcgggtgagctggcctgcgatcggtttcctcgtgctggcctggctcttcgcgtttgtcaccatgattgtggctgccgtcggagtaaccacgtggctccaattcctgttctgttttagctacatcaagctggctgtcacgctggtgaagtacttcccacaggcatatatgaacttctactacaaaagcactgagggctggagcattggtaacgttcttcttgacttcactggaggatcattctccttgctgcagatgttcctgcaatcttacaacaatgatcagtggactctcatcttcggcgaccccacgaagttcggcctcggggtgttttcaatcgtgttcgacgtggtgttctttatccaacatttttgtctctatcgcaagcggccgggctacgaccaactgaat

SEQ ID NO: 150885 - DNA, 1101 bp, Artificial Sequence
  derived and/or modified sequence
atgatacgtaactggttgactatcttcattctgtttcctctcaagctagtggagaaatgtgagtcgtcggtctctttgacggtcccgcccgtggtgaaactcgaaaacggctccagcactaacgtctcactcacgttgcgaccccccctgaatgccaccttggtcataacttttgaaataacgttccgatcaaagaacatcacaattcttgagttaccagacgaggtggtggtcccccccggggtcacgaactctagttttcaggtgacgagtcagaacgtcgggcagctgaccgtgtacctgcacggaaaccactccaaccaaaccggccctaggatcagatttcttgttatccgttcatccgccatatccattatcaatcaggtgatcgggtggatctactttgtcgcgtggagtatctcattctacccacaggtcatcatgaattggcggcgcaaatccgtgatcgggctgtcgtttgattttgtggccctcaatctgaccggtttcgttgcctattcggtgttcaacatcggcctcctctgggtgccatacatcaaagagcagtttctgttgaagtaccccaatggtgtgaatccggtgaatagcaacgacgtgttcttttcccttcatgccgtcgtgctaacgttgatcataattgttcagtgctgcctgtacgagcggggtgggcagcgcgtgagctggcctgcaattggcttcctggtactcgcctggctgttcgcttttgtgacaatgattgtggccgccgtgggtgttaccacctggctgcagttcctgttctgtttctcatacattaagctggctgtgaccctggtgaagtactttcctcaggcgtatatgaatttctactacaaaagcactgagggttggagtataggaaatgtgctgctcgatttcactggaggttcttttagtctgctccaaatgtttttgcagagctacaacaacgaccagtggacacttatcttcggggaccccacgaaattcggcctcggggtcttcagtatcgttttcgacgtcgttttttttatccagcacttttgcctgtaccggaagcgccccggatatgaccagttgaac

SEQ ID NO: 150886 - DNA, 1101 bp, Artificial Sequence
  derived and/or modified sequence
atgattcggaactggcttacgattttcattctatttccgctaaaattagtagaaaaatgtgaatctagcgtatcattgacggttcctccggtggtcaaattggaaaacggctcttctactaatgtttcattaacactaagacctccacttaacgcaacgctggtcataacttttgaaatcacgtttcgcagcaaaaacattacaattctggagcttcctgacgaagttgttgtgcctcctggagtaacaaatagttcatttcaggtcacttctcagaacgtaggtcaattaacggtgtaccttcatggtaatcattccaatcaaactggcccgagaattcggtttctggtgatacgatcttcagcaatcagcattattaatcaggtgattggttggatctattttgtagcctggtctatatctttctaccctcaggtaattatgaactggcgtcggaaaagtgtaatcggcttgtcatttgattttgtcgcccttaacctaacgggctttgtagcgtattctgtgtttaatataggattgctctgggttccttatatcaaggagcagtttcttcttaagtacccgaatggtgtaaacccggtcaattcgaatgatgtatttttttctttgcacgctgttgtgctgaccctcataattattgttcagtgctgtttgtatgagcgcggaggccaaagagtgtcgtggcctgccatcggttttttagttcttgcttggctgtttgcattcgtaacgatgatcgtggcggcggtaggcgttactacgtggctccaatttttgttctgcttttcttacatcaaacttgctgtaactcttgtcaagtattttccgcaggcgtatatgaatttttattataaatcaactgaaggatggtctattggtaacgtccttttggattttaccggcgggagcttctctcttctgcagatgttcctacagagctacaataatgatcagtggacactaattttcggagatcctacaaaatttggcttaggagtgttttctatcgtctttgatgtagtcttctttattcagcatttttgcctttatcgcaaacggccgggctatgatcagttgaac

SEQ ID NO: 150887 - DNA, 1101 bp, Artificial Sequence
  derived and/or modified sequence
atgattcgcaattggctgactattttcatactttttcccctgaagctggtggagaagtgtgaatcgtcggtttcactcaccgtgccacccgtcgtgaagctggaaaacggatcgtcaacgaacgtcagcctcacccttagaccgcctctgaatgcaactcttgtcatcacctttgaaataacttttcgctcgaaaaacatcactatcctcgaactgccggatgaagtggtcgtgcctcctggggtgaccaactcgtcgtttcaggtcaccagccaaaatgtgggacagctgactgtgtacctgcatggtaaccactccaaccaaactggaccccgtattcggttcttggtcattagatcgtcagctatcagcatcattaatcaagtcattggctggatatacttcgtggcatggtcgatatcgttctaccctcaggtgattatgaactggcggaggaagtccgtgattggtctttcctttgattttgtggcacttaatctgactggctttgtggcgtattccgtgttcaatattggcctcttgtgggtcccatacatcaaggaacagtttttgcttaagtaccctaacggtgtgaacccggtcaacagcaacgatgtgttcttctcactccatgcagtggtcctgacgctgatcataatagtccagtgttgtctttacgaacgcggagggcagcgggtcagttggccggctattgggttcctggtgcttgcctggctgttcgcttttgtgactatgatagtggccgcagtgggagtgactacctggctgcagtttcttttttgttttagctacattaagctcgccgtcaccctggtcaagtactttcctcaggcctacatgaacttctactataagtccactgaaggctggtcgattggcaatgtgcttcttgattttaccggaggctcgttctcactgctgcaaatgttcttgcaatcctacaacaacgatcaatggactttgatttttggtgaccctaccaaattcggactcggagtgttttcgattgtgtttgacgtggtgttctttattcagcacttttgcctgtaccgaaagaggcccggatacgaccaactgaat

SEQ ID NO: 150888 - DNA, 1101 bp, Artificial Sequence
  derived and/or modified sequence
atgatcaggaattggctcactatattcattctgtttccattgaagctggtcgagaagtgtgagtcaagcgtgtcactaactgtgcctcctgtcgtgaagctggagaatgggagttctactaacgtcagtctgacattgcggccccctcttaatgccaccctcgtcattacattcgaaatcacttttcgcagcaaaaacataactattctcgaactgccagatgaagtcgttgtgcctccaggggttaccaactccagttttcaagtgacctcacagaatgtgggacagctcaccgtctatctccacggcaatcactcaaatcaaacaggaccccggatcaggttcctggtcattaggtcttccgctataagcatcatcaatcaggtcattggctggatctacttcgtagcgtggagtatctctttttatcctcaggttatcatgaattggaggagaaaatccgtgatcggactgtcatttgactttgtggcacttaatctcacaggtttcgttgcctattcagtattcaacatcggcctcctgtgggtcccctacataaaagaacagtttctgttgaagtatccgaatggggtaaatcctgtcaacagtaacgacgtgttctttagtttgcacgccgtagtgctcactttgataattattgtccagtgctgcctatatgaacgcggcggccagcgagtgtcttggccggccattggttttttagtgctcgcttggctgttcgcgttcgtaacaatgatcgtcgctgccgtcggcgtcacaacctggcttcagttcctgttttgtttttcatatatcaaattggctgtaaccctggtgaagtactttccccaggcttatatgaacttctactataaatccacggagggttggtctatcggcaatgtgttgctagatttcacaggtgggagctttagcctgcttcagatgtttcttcaaagctacaacaatgaccagtggacacttatctttggtgatccgaccaagttcggcctgggagtattctctattgtcttcgacgtggtattttttatccagcacttttgcctctaccgcaaacgtcccggatatgaccagctcaac

SEQ ID NO: 150889 - DNA, 1101 bp, Artificial Sequence
  derived and/or modified sequence
atgataagaaactggctgaccattttcatcctgttcccgctcaagctggtcgagaaatgcgaatcgtcagtgtcgctgaccgtgcctccggtcgtcaagctggaaaacgggagctccaccaacgtgagcctgactcttcggccaccgctgaacgcaactttggtgatcaccttcgaaatcacttttcggtcaaagaacatcactatccttgagctgccagacgaagttgttgtgccgccgggtgtgaccaattcatccttccaggtcacgtcacaaaacgtgggacagcttactgtctacctgcacggaaaccacagcaaccaaaccggaccccggatccggttcctcgtgatccgttccagcgctatctcgatcatcaaccaggtgatcggatggatctacttcgtggcctggtctatctcattctaccctcaggtgatcatgaactggagaagaaaatcagtgatcgggctgtccttcgacttcgtggccctgaacctgaccggcttcgtggcctactccgtctttaacatcggccttctgtgggtcccctacatcaaggaacagtttttgctgaagtaccctaatggcgttaatcctgtgaactctaacgatgtgttcttctcgctccatgcagtggtgctcaccctgatcattatcgttcagtgttgcctgtacgaaaggggtggccagcgagtgtcctggcctgcgatcggatttctggtgctggcatggctgttcgccttcgtgactatgattgtggccgccgtgggcgtcacgacctggctgcaattcctgttctgcttctcctatatcaaattggcggtcaccctcgtgaagtactttccccaagcctatatgaacttctactacaagtccaccgaaggatggtcgatcggaaacgtacttttggacttcactgggggcagcttttccctcctgcaaatgttcctgcagtcgtacaacaatgatcagtggacccttatcttcggcgatcctaccaagttcggactgggtgtgttctcaatcgtgttcgatgtggtctttttcatccagcacttctgcctgtatcgcaagaggcccggatacgatcagctcaac

SEQ ID NO: 150890 - DNA, 1101 bp, Artificial Sequence
  derived and/or modified sequence
atgattagaaattggctaaccattttcattttgttccctctgaaactcgtcgagaaatgcgaatctagcgtatcgcttaccgtgccaccggttgtcaaactggaaaacgggagcagcactaatgtgtccttgacactgcgtccccctctgaatgccaccctggtcattacttttgagattactttccgctctaagaatattacaatcctggagctcccagacgaagtggttgtgccacccggtgtcacaaattcaagtttccaggtgacgagtcagaatgtggggcagcttaccgtttacttgcatggaaaccatagcaatcagactggaccaagaattaggttcctagtgatacgctcctccgccatttcaattatcaaccaggtaatcgggtggatctattttgtggcctggtctatcagcttttaccctcaggtgattatgaattggcgtaggaaatcggtcatcggcctgtcgttcgatttcgtggcccttaatctgacaggatttgttgcgtattcagtgttcaacattgggcttctgtgggtgccatacatcaaggaacagttcctgttgaaataccctaatggcgttaaccccgttaattctaacgatgtgttcttctcacttcacgccgtggtgctgactcttattatcattgtccagtgttgcctgtatgagcggggcgggcaaagagtgtcttggccagctattgggttcctagttctggcctggttatttgcatttgtaaccatgattgtggcagccgtaggcgtgacaacatggctgcagtttttgttctgtttttcctacattaagttagctgtgactctggttaaatattttccccaggcgtatatgaacttttactacaagtcaaccgagggctggtccatcggtaatgttttacttgacttcaccggtggctcgttcagcctactgcagatgtttttgcaatcttacaacaacgaccagtggaccctgatctttggggacccaaccaagtttgggttaggggtgtttagtatagttttcgacgtagtgttttttatacagcatttttgtctctataggaaacgcccaggctatgaccagcttaac

SEQ ID NO: 150891 - DNA, 1101 bp, Artificial Sequence
  derived and/or modified sequence
atgatacgcaattggctaactatcttcatattgtttccgctaaagctggtcgaaaagtgcgagagctcggtctccttaactgtccccccggtggtgaaattggagaacggatccagtaccaatgtgagtctgaccctacgcccgccactgaacgcaacacttgtaataacatttgagataacatttagatcgaaaaacataacaatactggaactgcctgacgaggtagtcgtccctcctggagtcaccaattcttccttccaggtgacctctcagaacgtagggcaactcactgtctaccttcacggcaaccacagtaatcagacagggcctcgaattaggttcttggttatcagatcctcagccataagtattatcaaccaggtcattggctggatctactttgttgcctggagcatctccttctatcctcaggtcatcatgaactggaggcgaaaatccgtcatcgggttgtctttcgactttgtcgccttgaacctgaccggattcgtggcctattcagtgttcaacataggcttgctatgggtgccttacatcaaggaacagttcttactgaagtacccaaacggggtgaaccccgtcaattccaatgatgtgtttttcagcctccacgccgttgtgctaacactgataatcatcgtgcagtgttgtctctacgaacgggggggacagcgagtgtcttggcctgccattgggttcttagtgctggcctggctcttcgcattcgtcaccatgattgtggctgccgtaggggtgaccacctggcttcagttccttttctgttttagctacattaaattagccgtgacgctggtgaaatattttcctcaagcatacatgaatttttactacaagtcaacagaggggtggagcatcggaaatgtcctgcttgacttcaccggaggttcattttcacttttgcaaatgttcctccagagctacaacaacgatcagtggaccctgatctttggtgatcccacgaaatttggactcggtgtttttagcatcgtgtttgacgtggtcttctttattcagcacttctgcctctatagaaaacgccccggctacgatcagttgaac

SEQ ID NO: 150892 - DNA, 1101 bp, Artificial Sequence
  derived and/or modified sequence
atgataagaaactggctgactatttttatactgttcccattgaagctggtggagaagtgcgaatctagcgtgagtctaacagtcccccccgtcgttaaattggagaacggctcgtccacaaacgtgtccttgactctgcgcccccctttaaatgccacgcttgtgatcacctttgagatcacattccgatcgaaaaatatcactatccttgagcttcctgacgaagtcgtagtcccgccaggagttactaatagctcatttcaagttacctcacagaacgtggggcaacttacagtgtatcttcacggcaatcattctaatcagaccggacctcgtataagattcctcgtgataagaagcagcgctatctctatcattaatcaggtgatcggatggatttactttgtggcatggagcattagtttctacccgcaagttataatgaattggcgacggaagagcgtaatcggactctccttcgatttcgtagctttgaacctgaccggttttgtggcttattctgtgttcaatattggtctgctgtgggtgccctacattaaggagcaatttctgctgaaataccccaacggtgtgaacccagtgaattccaatgacgtgtttttcagcctgcatgctgttgttctgacacttattatcatcgtccagtgctgcttgtacgaaaggggaggacagcgggtgtcttggcctgcgattggttttttggtactggcctggctttttgcttttgtgacaatgatcgttgccgcagtgggggtcacgacgtggctccagttcttgttctgcttctcctatattaaactggccgtcacgctggtgaagtacttccctcaagcctacatgaacttctactataaatctaccgaagggtggtcaatcggtaatgtactgctggacttcaccggtggatccttcagccttctccagatgtttctgcagagttacaacaacgaccaatggacgctgatctttggcgatccaacaaagtttggcctgggggtatttagtatcgtgttcgatgtagtattcttcattcagcatttctgcttgtataggaagcggccaggttatgatcaattgaat

SEQ ID NO: 150893 - DNA, 1101 bp, Artificial Sequence
  derived and/or modified sequence
atgatccgaaattggcttaccatctttatcctattcccactgaagcttgtggagaaatgtgagtctagcgtgagcctgaccgtcccaccagtggtgaagctcgagaatgggtcatccaccaatgtcagcctgaccctgagaccaccactgaacgccacccttgtgattacatttgagattacctttagaagcaaaaacattaccattcttgaactgccagatgaggtcgtcgtgccaccaggcgtgacaaattctagcttccaggtgacctcgcagaatgtaggacaactgaccgtttacctacacgggaatcattcaaaccagaccggtccccggattcggttcctggtgatccgcagcagcgctatttcaataataaaccaggtcattggctggatttactttgtcgcatggagtatcagcttttatccacaggtcatcatgaactggaggcgtaaatctgtaataggactctctttcgattttgtggctttgaacctcactggatttgtggcctacagcgtcttcaatatcggcctgctatgggttccttacatcaaggagcagttcctgctcaaataccccaatggggtcaaccctgttaatagcaacgacgttttcttctcactccatgccgtagtgttgaccctgatcatcattgtgcaatgctgcctgtacgaacggggcggccagagggtcagctggccagccattggctttctggtattggcttggctcttcgcctttgtcaccatgattgtcgccgcagtgggagtgacgacatggttacagtttctgttttgtttttcatacatcaagttggccgtaaccctggtcaaatacttcccacaggcatacatgaacttctattataaatccacagagggatggtcaatcggcaatgttttgctcgattttaccggcggatcgttctcacttctgcagatgtttctccaaagctataacaatgaccagtggaccttgatattcggggatcctaccaaattcggcctcggagtgtttagcattgtattcgacgtggtgttctttatccagcacttctgcctctatcgaaagcgaccaggttatgatcagctaaat

SEQ ID NO: 150894 - DNA, 1101 bp, Artificial Sequence
  derived and/or modified sequence
atgattcgcaattggctgaccattttcatcctgttcccgctgaagctggtcgagaagtgtgaatcctcagtgtcgctcaccgtcccgccagtcgtgaaacttgagaatggcagctcgactaacgtgtcactgactctccgccctcccctgaacgccaccctggtcatcaccttcgaaattacttttcgttccaagaacattaccatcctggagctgccagacgaggtggtagtgccccccggcgttactaactcatcttttcaggtgacgtcgcaaaacgtgggacaattgacggtctacctccacgggaatcatagcaatcagactgggcctcgcatccggttcctggtgatccggtcgtccgcgatcagtatcatcaatcaggtcatcggatggatctacttcgtcgcgtggtccatctctttctacccacaagtgattatgaactggcggcgcaagtcagttatcggcctcagtttcgatttcgtagcgctgaacctgaccgggtttgtggcctacagcgtgttcaacatcggcctgctttgggtaccttacatcaaagaacagttccttctgaagtatccgaatggagtgaacccggttaacagcaatgacgtgtttttctcactccatgcagtggtgctgaccctgatcattatcgtccagtgctgcctgtatgaaaggggcggacaaagagtcagctggccggctataggattcttggtcctcgcctggctgtttgcttttgtgactatgatcgtcgcggccgtgggagttactacttggctgcaattcctgttctgcttttcatatatcaaactcgccgttaccttggtgaagtacttcccgcaggcatacatgaacttctactacaagtcgaccgaaggatggtcgatcggaaacgtcttgcttgacttcactgggggatctttttccctgctgcagatgttcctccagtcgtacaacaacgaccagtggaccctcatttttggtgacccaacgaaatttggtctgggggtgttcagcatcgtgttcgatgtggtgttctttatccaacacttctgcctgtaccgaaagaggcctggttacgatcagttgaac

SEQ ID NO: 150895 - DNA, 1101 bp, Artificial Sequence
  derived and/or modified sequence
atgatccgaaattggcttaccatttttattctttttccgctgaagttggtcgagaagtgcgaaagtagcgtgtcgctgaccgtgccacccgtggtcaagttggagaatggctctagtaccaacgtttctctcaccttgcgacctccccttaacgctacacttgtgatcacctttgagatcaccttcaggagcaagaacataaccatcctggagcttccggacgaagtggtggtcccaccgggcgtcactaactcaagttttcaggtcacctcacaaaacgtaggtcagctgaccgtttatttacacggcaatcactcaaatcaaactggccccaggattaggtttttggtcatcagaagctccgcgatcagcattatcaatcaagtgattggttggatctacttcgtagcttggtcgatcagcttctatccgcaggtcatcatgaattggcgacgtaaatccgtgatcggattgtcttttgatttcgtggcccttaatcttaccgggttcgtggcgtattcagtcttcaatatcgggctcctgtgggtcccatacatcaaggagcagttcttgcttaaataccccaacggagtgaatccagttaattctaacgatgttttcttctcacttcacgccgttgtactgactcttatcataattgttcagtgctgtctgtacgaaagagggggacagagagtgagctggcccgctatcggattcttggtgctggcctggctttttgcctttgtgaccatgatcgttgccgcagtgggtgtgactacatggctgcagttcttgttctgtttttcctatataaagttggccgttacattggtgaagtacttcccacaagcttatatgaacttctactataagagtaccgaagggtggtctattgggaacgttctactggactttacaggcgggagcttttctctgctacaaatgttcctacagagttacaacaatgatcagtggacactaatcttcggagacccaacgaaattcggactgggtgtcttttctattgtgttcgacgtggtgtttttcatccagcatttctgcctctatcgaaagcgacctggatacgatcaattaaat

SEQ ID NO: 150896 - DNA, 1101 bp, Artificial Sequence
  derived and/or modified sequence
atgatccgaaactggttgacaatatttatattgttccctctgaaactggtagagaaatgcgagtcatccgtgagccttacggtgccgcccgtcgttaagctggagaacggatccagtacaaacgttagtttgaccctgaggcctccgctgaacgctactttagtgatcacctttgaaatcacctttagaagcaagaatatcacgatcctggagctccctgacgaagtggtggtcccccccggcgtgacgaattctagcttccaagtcacatcacagaacgttggccagctcactgtgtacttgcacgggaaccattccaaccaaacaggaccaaggatccgcttccttgtgatccgcagctctgccatttccatcattaaccaagtgattggatggatatatttcgtggcctggtccatttctttctacccccaggtgatcatgaattggcgacgcaagagcgttattggtttgtcctttgacttcgtagctctaaaccttaccggcttcgtagcttactccgtgtttaacattgggctgttatgggtgccttacatcaaggagcaattcctcctgaagtatccaaacggagtgaatccagttaactctaacgatgtttttttcagtctgcacgcagttgtgttaactctgataattatcgtacagtgttgcttgtacgagcgtggagggcaaagagtgtcttggcctgccatcgggttcctggtgcttgcttggctgtttgctttcgttacaatgatcgtggccgctgtaggggtgactacttggctgcagttccttttttgtttttcttatattaaacttgcagttactctggtcaaatattttcctcaggcctacatgaatttttactacaaaagtaccgagggctggtcgataggcaacgtcctgctggacttcacaggtggaagtttttctctgcttcagatgttcctgcagtcatataataatgatcagtggacactgattttcggcgatcccacaaagttcgggttgggtgtgttttccattgtctttgacgttgtttttttcattcagcatttttgtctctatagaaaacggccgggttatgatcaactgaat

SEQ ID NO: 150897 - DNA, 1101 bp, Artificial Sequence
  derived and/or modified sequence
atgatacgaaattggctgacaatctttatcttgtttccgctgaagctggtggagaaatgcgagtcttctgtgtcactgaccgtccctcctgtggtcaaactggagaacggatcatctactaacgtttccctcactctgcggccaccactaaacgctaccttagtgattacatttgaaattaccttccgatctaagaacatcactatcctagaattgccagacgaggtggtggtgccgcccggcgtaacaaactcgtccttccaagtaacatcccaaaatgtgggccaattgaccgtgtatctacatgggaaccacagtaatcagaccgggccgcgtatccgtttccttgtcatccgcagttcggcgattagcatcattaaccaggtcatcggttggatttactttgttgcatggtctatttctttttaccctcaggtcatcatgaactggcggagaaagagcgtgattggattatcatttgactttgtggctcttaatctgactggttttgtggcctacagtgtgtttaacattggcctactctgggtaccttacatcaaggagcaattcttactgaagtatcccaacggcgtcaacccagtcaatagcaatgatgtatttttcagcctgcacgcagtggtcctcacattgatcattatagtccagtgttgcctttatgagcgaggaggccagcgagtgagttggcctgcgataggatttctagtcttggcctggctcttcgcatttgtgaccatgatcgtcgccgccgttggcgtgaccacttggctacaattcctgttttgctttagctacatcaagctggcagtgaccctcgtcaagtacttccctcaagcctacatgaatttctattacaagtcaactgagggctggtcgatcggtaacgtcctcctcgacttcacgggagggagcttttccttacttcagatgtttttgcaatcatacaataacgatcagtggacactgatctttggagaccctactaaattcggccttggggtcttttccatcgtattcgacgttgtgttttttattcagcacttctgtctatacagaaagaggccagggtacgaccagctcaac

SEQ ID NO: 150898 - DNA, 1101 bp, Artificial Sequence
  derived and/or modified sequence
atgattcgtaattggttaacaatcttcattttgttccctctgaaattggtggagaaatgtgagtcaagtgtcagtctgacagttcctccggtagttaagcttgagaatggatcctcaacgaatgtaagtcttacgcttcgaccaccacttaatgcgacactggtgattactttcgagatcacttttaggtccaaaaatataacaatccttgaactgcctgacgaagttgttgtcccgccaggtgtgaccaactcatcatttcaagtaacatcacagaatgtgggacaactcactgtttatctgcatgggaaccatagtaatcaaactggaccacgtattcggttcctcgtgatcagaagctcagctatttctattattaaccaagttatcgggtggatctacttcgttgcttggtccatttctttttatccgcaggttataatgaattggagacgaaagtctgttattggtttgtcatttgattttgttgcgttgaatctcacgggatttgttgcctactccgttttcaacattggacttttgtgggtaccgtatattaaagagcaattcctattgaagtatccgaatggagtgaacccagttaatagtaatgatgtattcttcagtctccatgcagttgttcttactctcataataatagtacaatgctgcttgtatgaacgaggtgggcagcgagtgtcctggcccgctataggttttttggtgttggcatggttgtttgcttttgtcacgatgattgtagcagccgtaggcgtaactacatggttacaattcttgttctgcttctcatatattaagttggcggtcactctcgtgaaatatttcccacaggcttatatgaatttttactataagagtacagaaggatggtctataggtaacgtcttgctggattttacaggaggatctttttctctgttgcaaatgtttctgcaatcatataataacgaccagtggaccctgatattcggagacccaacgaaattcggattgggagtcttctctattgtgttcgatgttgtcttcttcatccaacatttctgcctttatcgcaaacgaccgggatacgatcaacttaat

SEQ ID NO: 150899 - DNA, 1101 bp, Artificial Sequence
  derived and/or modified sequence
atgatacggaactggcttactatattcattctatttcctctcaagctggtggaaaaatgtgaaagtagtgtctcccttacagtccctcccgttgtgaaactcgaaaacgggtcctccacaaacgtctccctgacgctaagaccaccactgaacgccactctagtgataactttcgaaatcactttccggtcgaaaaacatcactatcctcgagctgcccgacgaagtggtggtcccacctggggttactaatagttctttccaggtgacaagtcagaatgttggacaacttacagtgtatctccatggaaatcatagtaatcagacagggccaagaattcgcttccttgtgatacggtcatcagcaatatctataataaaccaggtgatagggtggatatattttgtggcttggagtatctctttttatccacaggttatcatgaactggcgcaggaaatcagtgatcgggctgtcctttgatttcgtggcccttaacctgacaggattcgtcgcttatagtgtttttaatattggacttctatgggtgccttatataaaagaacagttcctccttaaatatccaaacggggtaaaccctgttaactcaaatgatgtctttttctcgctccacgccgtagtgttaacactcatcataatcgtgcagtgctgtttgtacgaacggggaggacagcgggtaagttggcccgcaatagggtttcttgtgctggcgtggctgttcgccttcgtaactatgatagtcgccgccgtaggggtcactacttggctccagttcttattctgtttctcttacatcaaacttgccgttacacttgtgaaatatttcccccaagcctatatgaacttctactacaaatccactgaagggtggagtataggaaacgtgctcctggactttacaggggggtctttttccttactccagatgtttctccagtcctataacaatgatcagtggacactgatatttggagatcccacaaaatttggactgggggttttcagtattgtgttcgatgtggtttttttcatccagcatttttgcttataccgcaaaagacctggatatgatcagttaaat

SEQ ID NO: 150900 - DNA, 1101 bp, Artificial Sequence
  derived and/or modified sequence
atgatccgcaactggcttactattttcatcctttttccgcttaagctggtggaaaagtgtgaatcctctgtaagcctcacagtacctcccgttgtgaagctggaaaatggctcttctaccaatgtatctctcactctcagacctcccctgaacgcaaccctggtgataacctttgagatcacttttaggagcaagaatataaccattctcgaactgcccgacgaggtggtcgtaccacccggcgtgactaactcttctttccaggtgacttctcaaaacgtgggtcagctcacagtttacctccacggaaaccacagcaatcagaccggcccgcgcatccgcttcctggtcattagatctagtgccatctctatcattaatcaggtgatcggctggatctattttgtggcttggagtatcagtttttacccacaagtgataatgaactggaggagaaagtcagtcatcggactctctttcgatttcgtagcactgaacctcacaggattcgtcgcctacagcgtgttcaacattggcctgctgtgggtgccatatatcaaggaacagttcctcctgaaataccccaacggtgtcaacccagtgaactccaacgatgtgttcttttcacttcatgccgtcgtcctcacattgattatcattgtgcagtgctgtctgtatgaacgcggcggccagagagtcagctggccagcgataggcttcctcgtcttggcttggctctttgctttcgtgaccatgatcgtagcggccgttggagtcactacctggctgcagttcctgttctgtttcagctatatcaagcttgctgtcactctcgtaaaatacttcccccaagcctacatgaacttttattacaagagcacagagggctggagcataggaaatgtgctcctggattttactggaggatctttcagtcttctccagatgttcctgcagtcttacaacaacgaccagtggaccttgatcttcggtgatcccacaaagtttggtctcggagtattctctattgtgtttgatgtggttttttttatccagcacttctgcctttacagaaagaggcctggatacgaccaattgaac

SEQ ID NO: 150901 - DNA, 1101 bp, Artificial Sequence
  derived and/or modified sequence
atgattcgaaactggctgacgattttcattctgtttccacttaagctcgtggagaaatgtgagtcctcagtgagcctcaccgtcccgcctgtggtcaagttggagaacgggtcctcaaccaacgtgtccctgactctcagaccgcctttgaatgcaacgctcgtcatcacttttgaaataaccttccgctccaaaaacataaccatattggaacttccagacgaagtcgtggtgcccccaggggtgaccaatagttcattccaagtgaccagccagaatgtgggtcaactgacggtctacttgcacggaaatcatagcaaccaaaccggaccccggattagatttctggtcatacgctcgtccgcaattagcatcatcaatcaagtgattggttggatctattttgtggcctggagcatatcattctatccacaagtcattatgaactggagacgcaagtccgtgataggtcttagcttcgatttcgtcgcccttaacctgactggttttgtggcctactcggtgtttaacattggactcctttgggtgccatacattaaggaacagttcctgctgaaataccctaacggagtcaacccggtcaactcaaatgatgtgttcttctctcttcatgcggtggtgctcaccctgattatcattgttcagtgctgtctttatgaacgtggaggacaaagagtgtcctggccagcaatcggatttctcgtcctggcatggctctttgcatttgtgaccatgattgtggcagccgtcggagtgactacgtggctccaatttctgttttgtttttcgtacataaagctggcggtgactctggtgaagtattttcctcaagcatacatgaacttttactacaaatccactgaaggctggtcgataggtaatgtccttctggatttcactggaggtagcttttcgctcttgcagatgtttttgcagtcctacaataacgaccagtggacccttatcttcggcgaccccactaagttcgggctgggggtcttttccatagtctttgatgttgtgttctttattcagcacttttgcctgtaccgcaagcgcccgggctatgatcaactgaac

SEQ ID NO: 150902 - DNA, 1101 bp, Artificial Sequence
  derived and/or modified sequence
atgatccgcaactggctgaccatcttcatccttttcccactcaagctggtggaaaagtgtgaatcgtcagtgtccctgaccgtgccgccggtggttaagctggaaaacgggtccagcaccaacgtgtcactgacgctcagaccgccgctgaacgcaaccctggtgatcaccttcgagatcacctttcggtccaagaacatcacgattcttgaactgccagacgaagtggtcgtgccgccgggtgtcacgaacagctcgtttcaggtcacttcgcagaatgtgggacagctcactgtgtacctgcacgggaaccactcgaatcagactgggccgagaattcggttcctcgtgattcgatcgtccgctatctccatcatcaatcaagtgatcgggtggatctacttcgtggcttggagcatctcattctaccctcaggtgatcatgaactggcggcggaagagcgttatcggcttgtcattcgatttcgtggcccttaatctcactggcttcgtcgcatactccgtgtttaacatcggactcctgtgggtgccatacatcaaggagcaattcctcctcaaatatccaaacggtgtgaatccagtgaactcaaatgacgtgttcttctccctgcatgccgtggtcctcacgctcatcattatagtccaatgttgtctgtacgagagaggcggacaacgggtgtcctggccggccatcggattcctcgtgctcgcctggttgttcgcgtttgtcaccatgatcgtggcggctgtcggcgtcaccacttggcttcagttcctgttctgctttagctacatcaagttggcggtgactctggtcaaatacttcccgcaggcttacatgaacttttactacaaatctacggaaggatggagcattggaaacgtgcttctggacttcaccggggggagcttctcactgctccaaatgttccttcagagttacaacaatgaccaatggactctgattttcggagatccaaccaagttcggtctgggagtgttctccatcgtgtttgatgtggtgtttttcattcaacatttctgcttgtacaggaagcgcccagggtacgaccaactgaac

SEQ ID NO: 150903 - DNA, 1101 bp, Artificial Sequence
  derived and/or modified sequence
atgattcgaaattggctgaccattttcatactgtttcctctcaaacttgtggaaaagtgtgaatcaagcgtgagcctgactgtgccccctgtggtcaaacttgaaaacggctcgagcactaacgtgtcattgactcttaggccgcctctgaacgcaaccctcgtgattacttttgagattactttccggtccaaaaacattaccatccttgagttgcctgacgaagtggtcgtgccacccggagtcaccaactcctcgtttcaagtgaccagccagaatgttggtcaactgaccgtgtaccttcacggtaaccattccaaccaaactgggcctaggataagatttctggtcatcaggtcatcggcgatatccattatcaaccaagtgatcggatggatttacttcgtggcatggagtatcagcttttacccccaggtgatcatgaattggaggcggaaatcggtgataggcctttcatttgattttgtggcactgaacctcacgggcttcgtcgcctatagcgtgttcaatattgggctgctttgggtgccatacattaaggaacagtttcttttgaagtaccctaacggagtcaacccagtcaacagcaatgatgtgttcttttcattgcacgctgtcgtgctcaccctcatcataattgtccaatgttgcctgtacgaacgtggtgggcaacgcgtgtcatggcctgccatcggctttctcgtgctggcatggctttttgcatttgtgaccatgattgtggccgccgtcggtgtcactacttggctgcaattcctgttctgctttagctacattaaacttgcagtcaccctggtgaaatacttcccacaggcctacatgaacttttactacaagtcaactgagggctggagcataggaaacgtgcttctggatttcaccggaggctccttttcccttttgcagatgttcctccaatcatacaataatgatcagtggaccctgatctttggggaccctactaaattcggtctgggtgtgtttagcattgtctttgatgtggtgtttttcatacagcacttctgtctgtacagaaagcgcccgggctacgatcagctgaac

SEQ ID NO: 150904 - DNA, 1101 bp, Artificial Sequence
  derived and/or modified sequence
atgattcggaattggctgaccatcttcatactttttcctctgaagctcgtggagaagtgcgagtcgtctgtttccctgactgttcccccggtggttaaacttgagaacggaagtagtacaaacgtctccttaacactcagaccaccactcaacgcaactctggtgatcaccttcgagatcactttcaggtctaagaatatcaccatcctggaactgcctgatgaggtggtggtgccccctggcgtgactaatagctcatttcaggtgacctcgcagaatgtgggccagctgacagtttacctccacggcaaccactcaaatcagacaggcccccgaatcaggttccttgtgatccggtcttccgcaatttcaattataaatcaagtaattggctggatctactttgtggcctggtccattagtttttacccgcaggtcattatgaattggcggagaaaaagcgtaatcggcctgtccttcgactttgttgcgttaaacttgactggattcgtggcctacagtgtgtttaatataggccttctgtgggttccttacatcaaggaacagtttctcctgaaatacccgaatggagtgaaccccgtcaatagtaatgacgtgttcttctcattgcacgccgtggtgttaacactaatcattatcgtgcagtgctgcttgtacgagaggggcggacagagggtgtcttggcccgccataggattcctagtgctcgcttggttgtttgccttcgtcactatgatcgtggcggccgtgggcgtgaccacatggcttcagttcctgttctgttttagctacattaaactggcagtcaccctcgttaagtattttccgcaggcttatatgaacttctactataagagcacagaaggctggagtataggtaatgttctcttagattttactggtggatcatttagtctgctgcagatgtttttgcagtcatataataacgaccagtggactctgatatttggggatcctacgaaattcggactaggggtgtttagcatcgtgttcgatgtggtcttttttatccagcacttttgtttgtaccgcaagcgcccgggatatgatcagcttaac

SEQ ID NO: 150905 - DNA, 1101 bp, Artificial Sequence
  derived and/or modified sequence
atgatacgcaactggctgactatcttcatcctcttcccgctgaagctggtggaaaagtgcgagagcagcgtgtcgttgactgtgccgccggtcgtgaagttggaaaatggatcgtccaccaacgtgtctctgaccttgcgccccccactcaatgcaacccttgtcattacctttgagatcactttccggtccaagaacatcactatcctggaactgccggacgaggtggtggtgccaccgggcgtgaccaatagttcattccaggtcacttcacagaacgttggacaactcactgtgtaccttcacggaaaccattcaaaccaaaccggaccacgaatcagattcctcgttatccggtcgtccgccatcagcatcatcaaccaagtgatcgggtggatctacttcgtggcctggtcgatctccttctatcctcaggtcatcatgaactggagaagaaaatccgtgattggactctcgttcgatttcgtcgccctgaatctgactggattcgtcgcgtactcagtattcaacatcggcctgctctgggtgccgtacattaaggaacaattcttgcttaaataccctaacggcgtgaatcccgtgaattcaaatgacgtgttctttagcctgcatgctgttgtcctgacgctgatcatcattgtgcagtgctgcctgtacgaacgcggtggacaacgggtgtcctggcccgcgattggcttcctggtgctcgcatggctcttcgcatttgtgaccatgatcgtggccgccgtcggggtcacgacctggctgcagttcctgttttgcttctcctatatcaagctcgcggtcaccctcgtcaagtactttccgcaggcttacatgaacttctactacaagagcactgagggatggtcgatcggtaacgtgctgctcgactttaccgggggatccttctcgctgttgcagatgtttcttcagtcgtacaacaatgaccagtggactctgatcttcggagatcctaccaaattcggactgggcgtgtttagcatcgtgtttgatgtcgtgttcttcattcagcacttctgtctgtacaggaaacgcccaggttacgaccaactcaac

SEQ ID NO: 150906 - DNA, 1101 bp, Artificial Sequence
  derived and/or modified sequence
atgatccggaattggctcaccatatttatactgttccctttgaagttggtcgagaagtgcgaatctagtgtcagcctgacagtaccgccagtggttaaattggagaatggcagttccacaaacgtgtctctgactctaaggccaccactgaatgccaccctggtaatcactttcgagatcacattccgaagcaaaaacatcactatccttgagcttcctgacgaggttgtagtgccacctggagtgaccaactcgtcttttcaggtaaccagtcagaacgtcggtcagctcacggtctatctgcacgggaaccactccaatcaaacgggaccccgtattcgctttctagtcattcggtcctccgcgatttccattataaaccaggtgattgggtggatttatttcgtagcatggagcatcagcttctacccacaagtgatcatgaattggcgcagaaaaagcgtaatcgggcttagcttcgatttcgtcgctctgaacctgacaggcttcgtcgcctactctgtcttcaatatcgggttgctctgggttccatatatcaaggaacagttcctgctgaagtaccccaacggcgtcaatcctgtgaattcgaatgatgtgttcttcagcctccacgcagtagttcttaccctgattatcatcgttcagtgctgcctctatgagaggggggggcagcgagtgtcatggccagcaatcggattcttagttttggcctggctattcgcgtttgtcacaatgattgtcgcagccgtgggtgttacaacatggctgcagtttctgttctgttttagctatattaaactggctgtcacattggtgaagtatttcccacaggcctacatgaacttctactacaagagcactgagggctggtcaatcggcaacgtattgctagatttcactggcggatctttctctctgctgcagatgttcctgcagtcatacaataatgaccagtggacactgatcttcggagatcccacaaagttcgggttaggtgtgttcagtatcgtgttcgatgtcgtgttctttatccaacacttctgtctttacagaaagcggcctggctatgaccaactaaat

SEQ ID NO: 150907 - DNA, 1101 bp, Artificial Sequence
  derived and/or modified sequence
atgatacgtaattggctaacgatatttatactatttccgctaaaactagtagaaaaatgtgaatcgtcggtttcgctaacggtaccgccggttgtaaaattagaaaatggttcgtcgacgaatgtatcgttaacgttacgaccgccgttaaatgcgacgctagttataacgtttgaaataacgtttcgttcgaaaaatataacgatattagaactaccggatgaagtagttgtaccgccgggtgtaacgaattcgtcgtttcaagttacgtcgcaaaatgttggtcaattaacggtatatttacatggtaatcattcgaatcaaacgggtccgcgaatacgttttctagtaatacgatcgtcggcgatatcgataataaatcaagttataggttggatatattttgttgcgtggtcgatatcgttttatccgcaagtaataatgaattggcgtcgaaaatcggttataggtctatcgtttgattttgttgcgctaaatctaacgggttttgttgcgtattcggtatttaatataggtttactatgggttccgtatataaaagaacaatttttattaaaatatccgaatggtgtaaatccggtaaattcgaatgatgtttttttttcgctacatgcggttgtattaacgctaataataatagtacaatgttgtttatatgaacgaggtggtcaacgtgtatcgtggccggcgataggttttctagtattagcgtggctatttgcgtttgtaacgatgatagttgcggcggtaggtgtaacgacgtggctacaatttctattttgtttttcgtatataaaactagcggttacgctagttaaatattttccgcaagcgtatatgaatttttattataaatcgacggaaggttggtcgataggtaatgtattactagattttacgggtggttcgttttcgttactacaaatgtttctacaatcgtataataatgatcaatggacgttaatatttggtgatccgacgaaatttggtttaggtgtattttcgatagtatttgatgtagtattttttatacaacatttttgtttatatcgtaaacgtccgggttatgatcaattaaat

SEQ ID NO: 150908 - DNA, 1101 bp, Artificial Sequence
  derived and/or modified sequence
atgatccgaaactggctaacaattttcattctttttccactgaagctagtcgagaaatgcgagagctccgtatctctgacggtaccaccagtggttaaacttgagaacgggagtagcactaatgtgagccttaccctgcgccctcctctgaatgccacccttgtgatcacattcgaaataacatttagatccaagaatatcaccatcttggagctgcccgatgaagtggttgtcccacctggagtcaccaacagcagttttcaagtcacctctcagaacgtcgggcaattgacagtctacttgcacgggaaccattcaaaccagactggcccacgcatccggttcctcgtcatccggtcgagcgcaatttctattatcaaccaagttatagggtggatctatttcgttgcctggtctattagtttttaccctcaggtgataatgaattggcgccgtaagtcggtgattggcctgagctttgatttcgtggctcttaatctgacaggattcgtcgcttactccgtttttaatatcggactcttgtgggtcccttacattaaggagcagttcttactcaaatatcccaatggagtaaatcccgtgaacagcaacgatgtgttcttcagcctgcacgccgtggtgctcaccctgatcattattgttcaatgctgtctgtatgaaaggggaggacagagagtctcttggcccgcgatcggcttcctggtgctggcctggctgtttgcctttgttaccatgattgtggctgcggtgggcgtaaccacctggctccaatttctgttttgcttttcctatatcaaactcgccgtaaccctggtgaaatacttccctcaggcgtatatgaacttttactataaatccactgagggctggagcatcggcaacgtgctgctggatttcaccggcggatccttctcgctgctccaaatgtttttacagtcatataacaatgaccagtggacactgatattcggcgaccccacaaagtttggattgggtgtcttcagcattgtgttcgatgtggtgtttttcatccagcatttttgtctttatagaaagagaccaggctatgatcagttgaac

SEQ ID NO: 150909 - DNA, 1101 bp, Artificial Sequence
  derived and/or modified sequence
atgatccggaattggctcacaatctttatcctttttccccttaagctggtcgagaagtgtgagtcctcggtttcgctaaccgtgccacctgtggtgaagctcgagaatggcagctccacaaatgtgtccctcactttgcggccccctttgaacgccactctggtgatcacctttgaaatcacctttcgctctaagaatattacaatcttggaactccccgacgaagtcgtagtgcctccaggtgtaaccaactccagctttcaggtgacatcccaaaatgtgggtcagctgactgtgtaccttcacggcaaccactcaaaccagactggcccacgaattcgcttcttagtgatccgatcctcggctatttcgattattaatcaggtgatcggctggatctacttcgtggcttggagtatcagcttctacccccaggttattatgaattggagacggaaatccgttatcggcctgagcttcgacttcgtggctttgaacttaaccgggttcgtggcctattccgtgttcaatattgggctgttgtgggttccctatatcaaagagcagttcctgctaaaataccccaacggcgttaaccctgttaatagcaacgatgtttttttcagtctgcatgcggttgtgctcaccctgatcataattgtccagtgctgcttgtatgagagaggcggacagagggtatcttggcccgcaataggatttctggttctagcttggcttttcgcattcgtgacgatgatagtcgcagccgttggggtgacaacatggttacagttcctattttgtttttcgtatattaagctcgccgtcacactggtcaagtatttcccccaggcctacatgaacttctactataaatctacagagggctggtccatcggaaacgtcttgcttgatttcacaggaggctctttctccctattacagatgttcctccagtcgtataataacgaccagtggacgttgatctttggcgatccaacaaagtttgggttaggcgtgtttagcatcgtctttgacgtggtcttttttatccagcatttttgcctttacaggaagagaccgggctacgatcagctgaat

SEQ ID NO: 150910 - DNA, 1101 bp, Artificial Sequence
  derived and/or modified sequence
atgatccggaattggctgactattttcatcctgttcccactaaaactcgtcgagaagtgcgagtcttccgtatcgctgaccgttccgccagtcgtgaagctcgagaatggctcttctactaatgtctcgctgactcttaggccccctcttaatgctacccttgtcataacatttgagatcacctttaggtcaaaaaacattaccatccttgagctgccggatgaggtcgtggtaccacctggagtgacgaatagcagctttcaggtgacatctcagaatgtgggccagctgacggtgtatctgcacggtaatcacagtaatcagacaggcccacggatcagatttctagtgatccggagttcagccatatccatcattaatcaggttatcggctggatctattttgtcgcatggagcatctctttctacccccaggtcatcatgaactggaggcgaaagtccgtcatcggactatcctttgattttgtggccctaaacctaactggctttgtagcttattccgtctttaatattggtctcctttgggtgccctacatcaaagagcaatttttgctgaaataccccaacggcgtgaatccggtgaactctaatgacgtttttttttctctccacgccgtggtgctgaccctaatcattatcgtgcaatgttgcttatatgagaggggcgggcagagagtatcatggcctgcaataggattccttgtgcttgcgtggctattcgcgttcgtaaccatgattgtcgctgccgtgggggtgactacctggctgcagttcctgttctgcttcagctatataaaactcgcagtgacactagtgaaatatttcccgcaggcgtatatgaatttttactataaaagcaccgaggggtggagcatcggcaacgttctgcttgacttcacaggtggatccttctccctgctgcagatgtttctccagtcttacaataatgatcagtggacgttgatttttggagatccgaccaaatttggtctgggcgtatttagcattgtctttgatgttgttttctttatccagcacttctgtctctacaggaagcggcccgggtacgaccagctgaat

SEQ ID NO: 150911 - DNA, 1101 bp, Artificial Sequence
  derived and/or modified sequence
atgatcagaaactggctaaccatctttatcctgttccccctgaaactcgtggagaagtgcgagtcttccgtctctctcacggtgcctcctgtggtcaaactggagaacgggagtagcactaatgtctcattaactctccggccccctctgaatgccactctggtgatcaccttcgagataacgttccgcagtaagaacatcactatcctggagcttccagacgaagtggttgtgccaccgggcgtaaccaactcctctttccaggtgaccagccagaatgttggacagctgaccgtctatctgcacggcaaccatagcaaccagaccggtcccaggatcagattcctggtaatccggagctcagcaatttccatcatcaatcaggtgatagggtggatttattttgtcgcctggtccatctccttctacccacaggtaatcatgaattggcgccggaaatccgttatcggtttgtcattcgatttcgttgctttgaacctcaccgggtttgtggcctatagcgtgttcaacattgggttgctgtgggtcccttacataaaggaacagtttctgctcaaatatccgaacggagtgaaccctgtcaactcaaatgatgtgttcttttctctccacgcagtggtcctgactcttatcatcatcgtccagtgttgtctttacgaacgaggtgggcaacgcgtttcttggccagctatagggttcctcgtgcttgcctggcttttcgccttcgtgacaatgattgtggctgctgtcggtgtgacaacatggctgcagttcttattctgcttcagttacattaaactggctgtgacgctggtgaagtacttcccccaggcttacatgaacttttattataaaagtactgaggggtggtccataggcaacgttctcctggattttaccggtggcagtttctctctgctgcagatgttcctgcagagttacaataatgaccagtggacactgatctttggggaccccacaaagtttgggttgggggtgttctcgatcgtgttcgatgtcgtgtttttcattcaacatttttgtctgtacaggaaacgtccagggtatgatcaattgaac

SEQ ID NO: 150912 - DNA, 1101 bp, Artificial Sequence
  derived and/or modified sequence
atgattcggaactggctgaccatcttcattctgtttcctcttaaacttgttgagaagtgtgaatcatcggtgtccctgacggtccccccagtcgtgaagctggaaaacggttcaagcactaacgtgagcctcacccttcgacctccactgaatgccaccctggtgatcacttttgaaatcacctttcgcagcaagaacattactattcttgagctccccgatgaagtggtggtcccccctggagtgactaattcgtccttccaggtgacgagccaaaatgtgggtcagctgactgtgtacctccacggaaaccattcgaatcaaacgggacctcggattcgattcctggtcattagatcgtccgcaatttcgattatcaaccaagtgattggctggatatactttgtggcatggtctattagcttttacccccaggtgataatgaactggcgccgcaagagcgtgattgggctgtcctttgattttgtggcactcaacctcactggcttcgtcgcctattccgtgtttaacatcggactgctgtgggttccgtacattaaagagcagtttctcttgaaatatcctaacggtgtgaacccagtcaatagcaatgatgtgtttttctcgcttcacgccgtggtgctcaccctgataatcatcgtgcaatgttgtctgtacgagcgaggcggacaaagagtatcctggcctgccataggatttttggtcctggcatggcttttcgccttcgtcactatgattgtggcagcagtgggggtgaccacttggctccaatttctcttttgttttagctacattaagttggcagtgaccctggtgaaatactttcctcaagcatacatgaacttttactacaaatcgaccgaaggatggtcgatcgggaacgtgcttcttgattttaccggtggatcgttttccctgctccaaatgttcctgcaatcctacaataacgaccagtggactctcatttttggcgaccctacgaagttcggacttggagtcttttccattgtgtttgacgtggtctttttcattcaacatttctgcctgtataggaaacgtccagggtatgatcaactgaac

SEQ ID NO: 150913 - DNA, 1101 bp, Artificial Sequence
  derived and/or modified sequence
atgatacgcaactggttgacgatttttattctgttccctcttaagctggtagagaagtgtgaatcaagcgtgtctcttacagtcccgcccgtggtgaagttggaaaacggaagtagcacaaatgtgtcactgactctgaggcctccgctcaacgccacactcgtgattacattcgaaatcacatttaggtccaagaatatcacgatcctcgaactgccagatgaagtggtcgtgccccccggcgtgaccaacagttctttccaggtgaccagccaaaacgttgggcagttgaccgtgtatctgcacggcaaccacagcaatcagacaggcccgaggatcaggttccttgtaatcaggagttcagcaatctcaataataaatcaagtcatcggctggatctacttcgtggcttggagcataagtttctatccccaagtcattatgaattggcgccgcaagtccgtgatcggattgtctttcgacttcgtcgccctcaacctaaccgggttcgtcgcatattctgtttttaacatcggcctgctgtgggtcccctatatcaaggaacaatttctactgaagtaccccaacggtgtgaaccctgtgaattcaaacgacgttttcttttctcttcacgccgtggtgctgacccttatcatcatcgtccagtgctgtctgtacgaaagaggcgggcagcgagttagctggccagcaatcggtttcttggtgcttgcttggctttttgcatttgtgaccatgattgtggcagccgtgggagtgactacctggttacaatttctgttctgctttagttacatcaaacttgctgtcacacttgtgaagtacttcccgcaggcatatatgaacttctactataagagtacagaagggtggagcattggcaatgtgctgttggattttaccggcggcagctttagcctgttgcaaatgtttctccagagctataacaacgaccaatggaccttgatctttggagatccaaccaagtttggtctgggagtcttctcaattgtgtttgacgtggtttttttcatccaacacttttgtctgtacaggaagaggccagggtacgaccaactgaat

SEQ ID NO: 150914 - DNA, 1101 bp, Artificial Sequence
  derived and/or modified sequence
atgatcaggaattggctgaccattttcatacttttccctctgaaactcgtggaaaagtgtgagagctctgtgtcactgacggtgccaccagtggttaagctggagaacgggagctctacgaacgtgagccttaccctgaggcctccgctgaatgccacacttgtgataacattcgaaatcacttttcgaagcaagaacattacaatcctggagcttcctgatgaagtggtggtcccccccggggtaacaaactcatcctttcaagttaccagccagaacgttggacagctgactgtatacctgcacggaaaccattcaaatcaaactgggccgcgaatcagattcttggtgattagaagtagtgcaatcagtatcatcaatcaggtgatcgggtggatatacttcgtggcttggagcatttccttctatcctcaggtcatcatgaactggaggcgaaaaagcgtgattggactgtctttcgactttgtggcacttaatctgaccgggtttgtcgcatattccgtcttcaacattggactgctgtgggtcccgtatatcaaagagcagtttctgctcaagtacccaaacggtgtcaatccagtaaacagcaatgacgtctttttctctttgcacgctgtggtgcttacgcttataatcattgtgcagtgctgcctctatgaacggggcggtcagagggtttcctggcccgcaatcggctttctcgtactcgcctggttgttcgcgttcgttacaatgatcgtcgccgcagtgggcgtgactacctggctgcaatttctgttttgcttctcctacattaaactggcggtgaccctggtgaaatactttccccaggcctacatgaacttttactataagtccacggaggggtggagtattggcaatgtcttgctggatttcacagggggcagtttttccctgctccaaatgtttctgcagagctacaacaatgaccaatggaccttgatcttcggcgatccgaccaaattcgggcttggcgttttctctattgtttttgacgtggttttttttatccagcatttctgtttgtacagaaaaagacccggctacgatcagctgaac

SEQ ID NO: 150915 - DNA, 1101 bp, Artificial Sequence
  derived and/or modified sequence
atgatccgaaattggctgaccatctttatcctgttcccgttgaagctggtggaaaaatgcgagagctcggtatcgctgactgtgccgccggtggtcaagctcgagaacgggtccagcaccaacgtctccttgaccctgcgcccaccgttgaatgccactctggtcattactttcgagatcactttccggtccaagaacatcaccattctggagctcccggatgaagttgtggtccctcctggggtgaccaattcctccttccaagttaccagccagaacgtgggacaactcaccgtgtacctgcacgggaaccacagcaatcaaaccggaccccgcatcaggttcctcgtgatccgcagctcggcgatcagcatcattaatcaggtgattggatggatctactttgtggcttggtcgatttcgttctacccacaggtgatcatgaactggagaagaaagtccgtgatcggattgagtttcgacttcgtcgccctgaatctgaccggattcgtggcgtactcggtgttcaacatcggcctcctgtgggtgccgtacatcaaggagcagttcctgctgaaatacccaaacggagtgaatccggtgaactccaatgatgtgtttttctcgctgcacgcagtggtcctgactttgatcatcatcgttcagtgctgcctgtacgaacgcggcggacagcgggtgtcttggccggccatcggattcctggtcctggcctggctcttcgcattcgtcaccatgatcgtcgccgcagtcggagtcaccacctggctccagtttctgttctgcttttcctacatcaagttggccgtgaccctggtcaagtacttcccgcaggcgtacatgaatttctactacaagtccactgaaggatggtcgataggtaacgtgctgctggacttcaccggcggctcgttctcacttctgcagatgttcttgcaatcgtacaacaatgaccagtggactctgatctttggcgaccctactaagttcggactgggcgtgttttccattgtgtttgatgtggtgtttttcatccaacacttctgcctctacaggaaaagaccagggtacgaccagctcaac

SEQ ID NO: 150916 - DNA, 1101 bp, Artificial Sequence
  derived and/or modified sequence
atgatccggaactggctcaccatattcatcctctttccgttgaaacttgtcgaaaaatgcgaatcatcggtgtcgctcacggttccacctgtggtcaagctggagaatggttcgtcaaccaatgtgtcattgacccttcgtccacctctgaatgcaaccctggtgatcacttttgaaattacctttcggtccaagaacattaccatcctggaacttcccgacgaggtggtcgtccctccaggtgtcaccaattcgtcttttcaggtcacctcccagaacgttggccaacttaccgtgtacctgcatgggaaccattcgaaccaaactggacctcgaattagattccttgtgattcgctcgtcagccatctcgatcattaaccaggtcattgggtggatatactttgtggcatggtcgatttcattttaccctcaagtgattatgaactggcggagaaagagcgtgatcggtctgtccttcgatttcgtggcccttaaccttaccggatttgtcgcctattccgtgtttaacattggccttttgtgggtgccttacataaaggaacaattcctgctgaaatacccgaatggagtcaatccggtgaattccaatgatgtgttcttttcgctccacgccgttgtgctgaccctgataatcattgtgcaatgctgtttgtacgagcgaggaggacaaagagtgagctggcctgctataggattccttgtactggcctggttgtttgcatttgtcaccatgattgtcgctgcagtgggcgtgactacttggcttcaatttctgttttgcttttcgtacatcaagctcgcagtgaccttggtcaagtactttccacaggcctacatgaacttctactacaaatcgactgaaggatggtcaattgggaacgtgctgctggactttaccggagggtcattctcattgttgcaaatgtttctgcagtcctacaacaacgatcaatggaccctcatttttggcgatcctactaagtttggactgggagtgtttagcatagtgtttgacgtggtgttctttattcagcacttctgcctttacagaaagaggcccgggtacgaccagctgaat

SEQ ID NO: 150917 - DNA, 1101 bp, Artificial Sequence
  derived and/or modified sequence
atgattagaaactggctcaccatcttcatcctgttccctctgaagctcgtagaaaaatgcgagtcaagcgtcagtctgactgtgccgccggtcgtcaagctcgaaaatgggtcaagcactaatgtctcgctgactctccggcccccacttaacgccacccttgtcatcacgttcgaaatcaccttccgcagcaagaacattaccatcctggaacttcctgatgaggttgtggtcccaccgggagtgactaatagcagctttcaggtcacgtcgcagaatgtcggccagcttaccgtgtatctccacggtaatcactcgaaccagactggaccgcgcatccgattcctggtgattaggtcgtcagccatctccatcatcaatcaagtcatcggatggatctactttgtggcatggtccatctcgttttacccacaagtcatcatgaactggcgccgcaagtcggtgataggcttgagttttgacttcgtggccctgaacctcactggcttcgtggcgtactcagttttcaacatcggattgctgtgggtgccttacattaaagaacaattcctcctgaagtacccaaacggagtgaacccggtgaacagcaacgacgtattcttttctctgcatgctgtagtcctcaccctgattatcatcgtgcagtgctgtctgtacgagaggggagggcaaagagtttcttggcctgctatcggattccttgtgctcgcctggctgttcgcgtttgtgaccatgatcgtggcggctgttggcgtgacgacttggctgcagtttttgttttgcttctcgtacatcaagctcgccgtgaccctcgtgaagtacttcccgcaggcatacatgaatttctactacaagtcaaccgagggttggtccatcggcaatgtactgctcgatttcactgggggatccttttcactgctgcagatgttcctgcaatcgtacaacaatgaccagtggaccctgattttcggcgatccgactaaattcggacttggtgtgttttccattgtgtttgacgtggtgttcttcatccaacatttctgcctgtaccggaaacggcccggatatgaccagctgaac

SEQ ID NO: 150918 - DNA, 1101 bp, Artificial Sequence
  derived and/or modified sequence
atgatccgaaattggttaacgatctttattctcttcccattgaagttagtggaaaaatgtgagtcaagcgtatctctgactgtgcctccagttgtcaaattggaaaatggtagctctactaatgtttctttgacattgcgtccgccattgaacgcaactctggtgatcacctttgaaataacctttcgtagtaagaatataaccatactcgagcttccagatgaggttgtggttccccccggggttacaaattcgtcatttcaggtcacaagccagaacgtcggtcaacttacagtctacctgcacgggaatcattccaaccagaccggccccaggattcgttttttggttattcggtcatccgctataagtataataaaccaggttattgggtggatttattttgtagcctggtcgatttcattttaccctcaagtcattatgaattggcgtcgaaagtccgtaatcgggcttagcttcgattttgttgcgctcaacttgactggttttgttgcttatagcgtttttaatatcggattgttatgggtaccttacattaaagagcagttcctccttaaataccctaatggggttaaccctgtgaactctaacgatgttttttttagcctccacgcagtggtgttgacccttattattattgtccagtgttgtctttatgagaggggtggccagcgggtgagctggcctgctattgggttccttgttttggcttggttgttcgccttcgttacaatgatagtcgccgcagttggagttactacttggttgcaatttctgttttgtttttcctatatcaagttagctgtgactttggttaagtacttcccacaggcatacatgaatttctattacaaatctacagagggttggtcaatcggaaatgttcttttagatttcacggggggctcgttttcattgttgcagatgttcctccaatcatataacaatgaccagtggacacttatctttggtgatcctacgaagtttggattaggggtgtttagtatcgtgtttgacgttgtgttcttcattcagcacttctgcttgtataggaaacgtcctgggtacgaccagcttaat

SEQ ID NO: 150919 - DNA, 1101 bp, Artificial Sequence
  derived and/or modified sequence
atgatacgaaattggctgactatctttatcttgtttccactgaagttggtcgagaagtgcgaaagcagcgtctcactcacggtcccccccgtggtaaaattggagaatgggagtagtactaatgtctcattaaccctccggccgcctctgaacgcaactctcgtaataacattcgagattacctttcgctccaagaatattacgatcttagagctgcccgatgaggtggttgtccctcctggcgttaccaattcctcctttcaggtcacttcccagaacgttggtcagctgactgtgtacctgcacgggaatcactctaatcagaccgggcccaggatcaggttcctagtcatacgtagctctgccatttctatcattaaccaggtgatcggctggatctatttcgttgcatggtccatctccttttacccccaggtaatcatgaattggcgacggaaaagcgtaattggtttgtccttcgatttcgtggccctcaacttgacaggctttgtggcttactccgtctttaacattgggctgctttgggtcccctacataaaagagcagttcctgttgaagtacccgaatggggtaaaccctgtgaattccaatgatgttttttttagcttgcatgcagtggtgttaactttaatcattatcgttcaatgttgtctctacgagaggggcggccagcgagtatcatggccagcgatcggatttcttgtcctagcctggcttttcgcttttgtgactatgattgtggcagctgtgggcgtgactacctggcttcagttcctgttctgcttttcatatatcaaactcgcagtcacgttggtgaaatactttccacaagcctacatgaacttctactacaaaagtacagaggggtggagcattggaaatgtgctgctggacttcacaggtggaagctttagtttactgcagatgttcctgcagtcttataataacgatcagtggactctgatcttcggagaccccaccaagtttgggttgggagtgttttcaatagtgttcgacgtcgtgtttttcatccagcacttctgcctgtatcgaaagcgccccggctatgaccagcttaat

SEQ ID NO: 150920 - DNA, 1101 bp, Artificial Sequence
  derived and/or modified sequence
atgatacgcaattggctgaccatcttcatcctctttccactcaagttagtggagaaatgtgagagcagtgtaagcctgacagtgccccccgtggtgaagttagagaatggctccagcaccaatgtctctttaaccctccgcccaccactcaatgcaacgcttgtgattacatttgagattacattcagatccaaaaacatcaccatcttggaactgccagacgaggtagtggtccctccaggcgtcaccaattcgtcattccaggtcacgagccagaacgtcggacagctcactgtatacctgcatggaaaccatagtaatcagacaggacctaggatccggtttcttgtgatcagatcgagcgctatttcaattattaaccaggttatcggttggatatattttgtcgcctggtctattagcttctatccacaggttattatgaactggaggcgtaagagcgtgatcggcctcagcttcgactttgtcgccctgaaccttacggggttcgtggcatacagcgtgtttaacatcggcctactgtgggtcccatatattaaggagcagttcctccttaaatacccgaacggcgtgaaccctgtcaactcgaacgacgtattcttcagtcttcacgccgtggtgttgaccctaattatcattgttcagtgttgcctttacgagaggggaggccagcgtgttagttggcctgcgatcggttttttggtcttggcatggctctttgcctttgtgaccatgatcgtcgcggcggtaggagtgacaacttggctgcaattcctgttttgcttctcttacattaaactggccgtcacccttgtgaagtacttcccccaggcctatatgaatttctattataagtccaccgagggatggagcatcggaaatgtcctactggacttcaccggcggctctttcagcctcctgcagatgttcctgcagtcctataataacgaccagtggaccctgatcttcggggaccccacgaaatttggattgggcgtcttctctattgtgttcgacgtggtgttcttcattcagcacttctgcctctaccgaaagcggcctggctacgaccagctgaac

SEQ ID NO: 150921 - DNA, 1101 bp, Artificial Sequence
  derived and/or modified sequence
atgatcagaaactggctgacgatctttatcctgttccctcttaagctcgtggaaaaatgcgaatcgtcagtgagccttactgtccccccagtggtgaagctggagaatggatcgtccaccaacgtgtcactcaccctgcgccctccattgaatgccaccctggttattacgttcgaaatcacctttcggagcaagaatatcacgattctggaacttcctgatgaggtggtcgtgccccctggtgttactaactcgtcgtttcaggtgacttcacaaaatgtcgggcaactgaccgtgtacctgcatggcaaccattcgaaccagactgggccacgcataaggttcctggtcatcagatcaagcgctatttcgatcataaaccaggtgattggatggatctatttcgtagcctggtcgatttccttttaccctcaggtcatcatgaattggagaagaaaaagcgtgattggactttcattcgattttgtggccctgaacctgacgggatttgtggcatactccgtgttcaatattgggctcctgtgggtgccgtacataaaggaacaatttctcctgaagtaccctaatggcgtcaaccccgtcaactcgaacgacgtctttttctccctgcatgcagtcgttctgactctgatcataattgtccagtgttgtctttatgagcgtggcggacaacgagtgtcatggcccgcaatcggatttcttgtcctcgcttggcttttcgcattcgtcaccatgatcgttgcagcggtgggtgtgactacgtggctgcagtttctcttttgtttctcctatatcaaactggcagtgactctggtgaagtactttccccaagcgtacatgaacttttactacaagtcgactgaaggatggtcgattgggaacgtgcttctggattttaccggcggtagcttttcgttgcttcaaatgttccttcagtcatacaataacgatcaatggactctgatattcggagatcctacgaagtttggcctgggcgtgttctctatcgttttcgatgttgtctttttcatccagcacttttgtctttaccgtaagcgccccggttacgatcaactgaac

SEQ ID NO: 150922 - DNA, 1101 bp, Artificial Sequence
  derived and/or modified sequence
atgattcgaaattggctgactattttcatcttgttccctctcaaactggtggaaaaatgcgaatcctccgtgtcccttacagtacctcctgttgtgaagcttgagaatggtagctcaactaatgtaagcttaacacttcggccacccctgaacgccacactggtcatcactttcgagatcacgtttagatccaagaatataacgatcctcgaactcccagacgaagtcgtggtgccacccggtgtgaccaacagtagttttcaggtgacctcccagaatgtgggacagctcaccgtctatctccacggcaaccacagtaaccagactggcccgaggataaggttcctggtcatccgctcttccgctatctctatcattaaccaggtgattggatggatctatttcgtcgcttggagcatcagtttctatccacaggtcattatgaattggcgacgcaaaagcgtcatcgggcttagcttcgattttgtagccctgaacctgaccgggtttgtggcttactcagtgttcaatattggcctgctctgggtgccctacattaaggaacaatttctgctgaaataccctaacggggttaatcccgtcaactctaacgacgtgttcttcagcttgcacgctgtggtcttgactctgataatcattgtgcaatgttgcctctatgagaggggcggtcaacgggtgagttggccagcaatcggcttccttgtgctggcctggttattcgccttcgtcactatgatagtggccgccgtgggggtcacgacctggctgcagttcctgttctgcttttcctatattaaactggctgtgactcttgttaaatatttcccccaagcctacatgaacttttattataagtcgaccgaaggctggtctatcggaaacgtgctgcttgacttcacgggtggctccttttctctgctgcagatgttcctccagtcttataacaatgaccagtggactttgatttttggcgacccaactaagtttggcctgggcgtgttctccattgtgtttgacgtggttttttttattcagcacttttgtttatatcgcaaacgtccaggttacgatcagctcaac

SEQ ID NO: 150923 - DNA, 1101 bp, Artificial Sequence
  derived and/or modified sequence
atgatccgcaattggctgacgatcttcatattatttccacttaagctagtcgagaagtgcgagtctagcgtgtcattaactgttccccctgtagttaagctcgagaatgggtcaagtacaaacgtcagtctgacccttcgcccaccgctcaatgcaaccctggtcatcaccttcgagatcacttttcgcagcaagaatattacgattctggagctgcccgacgaggtggtggtgccaccgggagtcactaacagttcctttcaggtgacaagccaaaatgtgggacagcttaccgtgtacctacatggaaatcattcaaatcaaaccggacctaggatccgcttcctcgtgatccgatcatctgctatttccattattaaccaagtgataggctggatttattttgtggcctggtctataagcttttaccctcaggttatcatgaattggcgccgaaagtccgtgatcggccttagcttcgacttcgtcgccttgaacctcacaggtttcgttgcttacagcgtgtttaacattggattgttatgggtgccctatatcaaggaacagttcctattaaaatatcccaatggggttaacccagtgaatagcaatgacgtgttcttttcgctccacgccgttgtcctcacgctcatcattatagtccagtgctgcttatacgaacgaggaggccagcgggtttcttggcccgccataggcttcctggtgttagcctggctttttgcatttgtcaccatgatcgtcgcagccgtgggagtgaccacctggctgcaattcctgttctgcttctcttatattaaattagctgtgaccctcgtgaagtactttccacaggcctacatgaacttttattataagtctacagaaggctggtcaattggaaatgtgctgttggattttacgggcggcagttttagtcttcttcaaatgttcttacagtcttataataatgaccagtggacactcatcttcggagatcccactaaatttggactgggtgtcttttcgatagtgtttgacgtggtgtttttcatccagcatttctgtctgtaccgcaagcggcctggctacgatcagctgaac

SEQ ID NO: 150924 - DNA, 1101 bp, Artificial Sequence
  derived and/or modified sequence
atgatccggaactggctgaccatctttatactcttcccacttaagctggtggagaaatgcgaaagcagcgtctcccttaccgtgccacctgtcgtgaagctcgagaacggctcatccactaacgtctcgctgacgctgaggcctccactgaatgcaaccttggtgatcacctttgaaatcaccttcaggtccaagaatatcaccattcttgaacttcctgatgaggtggtcgtgcctcctggcgtgacgaattccagcttccaagttactagccagaatgtgggccagcttactgtctatctgcacggaaatcactccaatcaaacggggccacgtatcaggtttcttgtgattaggtcgtcggcaatatctatcataaaccaagtgatcggttggatctactttgtggcatggtcaatttcgttttacccacaggtgattatgaactggcgtagaaagagcgtcataggcctgagctttgatttcgtggcactcaaccttaccggatttgtcgcgtacagcgtgttcaacattggactgctgtgggtgccttacatcaaagagcaatttctgctgaagtaccctaacggggtgaaccctgtcaactcaaatgatgtctttttctcgcttcatgcggtggtgctcacgctcattatcatagtgcaatgttgtttgtatgaacgtggaggacaacgagtgtcgtggcctgccattggttttttggtcttggcatggctgttcgcatttgtgactatgatcgtcgcggccgtgggcgtgaccacttggctccagtttcttttttgttttagttacattaagttggctgtgaccttggtcaagtactttccgcaggcatacatgaacttttactacaagtccaccgaggggtggtcgataggaaatgtgcttctcgacttcaccgggggctcgttttcattgctgcaaatgttcctgcaatcatacaacaatgaccagtggactctgatttttggggacccgactaagttcggactgggtgtgtttagcattgtgtttgatgtagtgtttttcatacagcatttttgtctgtaccgcaagcgccctggttacgatcagcttaac

SEQ ID NO: 150925 - DNA, 1101 bp, Artificial Sequence
  derived and/or modified sequence
atgatacgcaactggctaacaatcttcattctgttcccgctcaaactcgttgagaaatgcgaatcctccgtcagcctaaccgtcccacctgttgtgaaactggagaatgggtccagcacaaatgtctccctcaccctgaggccacccctgaatgccactctggtgattacattcgagatcaccttcagatccaagaatatcacaattctagagctgcctgacgaggtagtggttccgcccggcgtgacaaatagctcattccaggtcacgtctcagaatgtgggacagctcactgtgtacctgcacggaaatcacagcaatcagactggaccgcgaattcgctttctcgtcattagaagttcagctattagcatcattaatcaggtcattgggtggatttacttcgtagcatggtcgatttccttctacccacaggtgataatgaattggcgcaggaaaagcgttatcggtctgtctttcgatttcgtagccctgaacctaacaggcttcgtcgcctactcagtttttaatataggtttactttgggtcccttatattaaggagcagtttctgcttaaataccccaatggtgtgaatcctgtgaactcaaatgatgtcttcttttctctgcacgcggtcgtgctaacattgatcattatcgttcagtgctgcttatacgaacggggaggacaacgtgtgtcctggccagcaatcggcttcttagttcttgcctggctgtttgctttcgtgacaatgattgtggcagccgttggcgtcacaacttggctgcagttcctgttctgcttttcctatatcaagctcgctgtgacattggtcaaatatttcccgcaagcttatatgaacttctattataagagcaccgaagggtggagtatcggaaatgtcctgttggacttcacaggaggctctttttcgctgcttcaaatgtttttacagagttacaacaatgatcagtggacactcatttttggcgatcctacaaagtttggtttgggggtgttttctatcgtgttcgacgtcgttttttttattcaacatttttgtctctacagaaagaggccaggatacgaccagctgaac

SEQ ID NO: 150926 - DNA, 1101 bp, Artificial Sequence
  derived and/or modified sequence
atgatccgcaattggcttaccatctttattctgttccccctcaagctggtcgaaaagtgcgaatccagcgtctcgctgactgtcccgcctgtggtgaagttggaaaacggaagctcgactaacgtgtctcttactcttagaccgcctctgaacgccactcttgtgatcaccttcgagatcacctttcgaagcaagaacattactatactggagctgcctgacgaagtggtggtgccaccaggagtcaccaactcgtcgttccaggtgacttcccaaaacgtgggacaacttacggtctacctgcatggcaaccattccaaccaaaccggacctagaattcgctttcttgtcatcagatcctcggccatatcaatcattaaccaggtgatagggtggatttacttcgtggcatggtcaatttcgttctacccacaggtgatcatgaattggaggcgaaagtcggtaattggcctgtcatttgattttgtcgcgcttaatctcactggatttgtggcatactcagtgttcaatatcggactcctttgggtgccatacatcaaagagcagtttctgctcaagtacccaaacggagtgaatccagttaacagcaatgacgtgtttttctcgctgcatgcagtggtgctgacgctcatcatcatcgtccaatgctgtctctacgaaagaggaggacagcgagtgtcctggccagccatcggattccttgtcctcgcatggctttttgcattcgtgaccatgatcgtcgcagcagtcggagtcactacctggctgcaatttcttttctgtttttcctacattaaactcgcagtcactcttgtgaaatacttcccacaggcttacatgaacttctattacaagagcaccgaagggtggtccatcgggaacgtgttgcttgattttacgggtggaagtttctcgctccttcagatgtttcttcaaagctacaataacgaccaatggaccctgatttttggagatccaaccaagtttggactgggtgtgttctcgatagtttttgacgtggtgttcttcatacaacatttctgtctgtaccgcaaaaggccggggtacgatcaacttaac

SEQ ID NO: 150927 - DNA, 1101 bp, Artificial Sequence
  derived and/or modified sequence
atgatccgcaattggctgactatcttcatcttgttcccgctgaaattggtcgagaagtgcgaaagctctgtgtccctcaccgtccctccagtggtcaagctggaaaacggctcatccactaatgtgagcctcacgctccggccgccgctgaatgctaccctggtcatcacgttcgagatcaccttcagaagcaaaaacatcaccatcctggaactgccggatgaggtggtggtgccacccggagttaccaattcctcgttccaggtgacttcacagaacgttggacaactgactgtgtacctgcatggaaaccactcgaaccagactggccctcgcatccggtttctggtgatccgcagctcagccatctcaataatcaatcaggttattggatggatatactttgtcgcctggtcgatctcgttctatcctcaagtgatcatgaattggcggcgcaaatccgtcattgggctctcattcgacttcgtagcactgaaccttactggcttcgtggcatactccgtgttcaacatcggactgctttgggtgccgtacatcaaagaacagtttctgctcaagtacccaaacggagtgaacccggttaactctaacgatgtgttcttcagcctccatgctgtagtcctgacgctgatcattatcgtgcagtgctgcctctacgaacggggaggacaacgagtctcctggccggcgatcggattcctggtgcttgcgtggttgttcgcgttcgtgaccatgattgtggcggccgtgggagtgaccacttggctgcagtttttgttctgcttctcgtacatcaagttggcagttactttggtgaagtattttcctcaggcttacatgaacttctactacaagtcgactgagggatggtccatcggcaacgtcctgctggacttcaccgggggtagcttttcccttctgcaaatgttcctgcagtcttataacaatgaccagtggaccctgattttcggggatccaactaagtttggcctgggcgtgttctcaattgtgttcgacgttgtgttctttatccagcatttctgtctctaccgaaagcggcccggctacgatcagctgaac

SEQ ID NO: 150928 - DNA, 1101 bp, Artificial Sequence
  derived and/or modified sequence
atgatccgaaattggcttaccatattcatcctgttccccctcaagctggtcgaaaagtgcgaatcatccgtaagcctgaccgtgccgccagttgtgaagttggagaatgggagctccaccaatgtgtccctgaccctgcgcccgccgctgaatgccacgttggtgatcactttcgagattactttccgctccaagaacatcactatcctggaactgcctgacgaagtggtggtccccccaggcgttactaactcttcatttcaggtgactagccagaacgtcggtcaacttactgtgtacctccatgggaatcacagcaatcagactggtcctcgcatcaggtttcttgtcatcaggtcctccgcgatttctatcatcaaccaggtgatcgggtggatctactttgtggcctggtccatctcgttctacccgcaggtgattatgaactggagacgcaagtcagtgattggcctgtcgttcgatttcgtcgctttgaacctcaccggctttgtggcatatagtgtattcaacatcggtttgctctgggtgccatacatcaaggagcagttcctgctgaaataccctaacggagtgaatccggtgaacagcaacgacgttttcttctcgctgcacgcggtcgtgttgacccttatcattatcgtgcaatgttgcctttacgaacggggaggacaacgggtatcatggcccgccattggcttcctggtgctggcatggctgttcgccttcgtgactatgatcgtcgcagcggtgggcgtgacgacctggctccaatttctcttctgcttttcgtacataaagctggctgtcaccctggtgaaatacttcccacaagcctacatgaatttctattacaaaagtacggagggctggtcgatcggaaacgtcctccttgatttcaccggaggatcgttttccttgctgcagatgttcctccagtcatacaacaacgaccagtggaccttgatcttcggggacccgactaagtttggactcggagtcttttcaatcgtgttcgacgtcgtattctttatccaacatttctgcctgtaccggaaaagaccgggatacgatcagctgaat

SEQ ID NO: 150929 - DNA, 1101 bp, Artificial Sequence
  derived and/or modified sequence
atgattaggaattggttgacaatttttattctgtttccattgaagctcgtggagaagtgcgaatctagcgttagcctaactgtgccccctgtcgtcaagttggagaatggaagctccacaaatgtgtccctcacactaaggcctccgctgaatgctacgttagtgattacattcgaaatcaccttccgcagcaagaatattaccatcctcgagttgccagatgaggtcgtggtgcctcccggggttaccaattcatcttttcaggtgacgagccagaacgtggggcagctaactgtctacctgcatgggaaccattccaaccagaccggacctcggatccgttttcttgtcatcaggagttccgccataagcatcatcaaccaggttattggttggatctattttgtcgcatggagtattagtttctatccacaagtcatcatgaactggaggagaaaatcagtcattgggctttcctttgactttgtagccttgaacctgaccggctttgtggcatactcagtcttcaatattgggctgctgtgggtgccatacatcaaggagcagtttttattgaagtaccctaacggggtgaaccctgttaattcaaacgacgttttttttagcttgcacgccgtcgtgcttacattgatcattattgtacagtgttgtttgtatgaacggggtggacagcgcgtgagttggccggcaatcggctttcttgtgctggcatggctctttgcattcgtgactatgattgtcgcagcggtgggggttaccacttggctgcagttcttattctgctttagttacatcaaattggcggtgacacttgtcaaatatttccctcaggcttacatgaatttttactacaagtccacagaaggttggtcgatcggtaatgttctcctagatttcactggggggagcttttctctgttacagatgttcttgcagagctacaataatgaccaatggaccctgatctttggagatcctactaagtttgggctgggcgtcttttctatcgtattcgatgtggtgttttttatccagcatttctgtctttatcgtaagcggccaggatatgaccagttgaac

SEQ ID NO: 150930 - DNA, 1101 bp, Artificial Sequence
  derived and/or modified sequence
atgattagaaattggttgaccatctttatcctgtttccacttaagcttgttgaaaagtgcgaatccagcgtcagcctgaccgttccacccgtcgttaaattggaaaacggctcttctaccaacgtctcactcactctgcggccacctctcaacgcaacattagtcatcaccttcgagatcaccttcaggagtaagaacatcacaatcttagaactgcctgacgaggtggtcgtccctcccggcgtgacaaactcaagcttccaggtgacaagccagaatgtgggccagttgacagtgtatcttcatggcaaccactctaatcagaccggacctagaatccggttcctcgtcatacggtcgagtgctatttccataattaatcaagttattggctggatctattttgttgcatggagcatctctttttatcctcaagtgatcatgaactggcggaggaaatccgtcattggactgtcatttgactttgtggctttaaaccttacaggcttcgtcgcttactccgtttttaacatcggcctgctatgggtgccatacattaaggaacagttcctgctcaagtaccccaatggtgtgaaccccgtcaactccaatgatgtcttcttttctcttcacgccgtggttctaaccctcatcatcatcgtccagtgttgcctgtacgaaaggggtgggcagcgcgtaagttggcctgctatcgggtttctggttcttgcttggcttttcgctttcgttaccatgatcgtggctgctgttggagtgactacatggctccagttcctgttctgcttttcttacatcaagctcgctgtaaccctggtgaaatactttccccaggcatacatgaatttctattacaagagcacagaaggctggagcattggcaacgtgcttctcgattttactggtggctcttttagtctgctgcaaatgttcctgcagagctacaacaacgaccagtggaccctgatctttggagatcctaccaaatttggactaggagttttcagcattgtgtttgatgtcgttttctttatccagcacttttgtctctacagaaaaagacccggatatgaccagttaaac

SEQ ID NO: 150931 - DNA, 1101 bp, Artificial Sequence
  derived and/or modified sequence
atgattcggaactggctgaccatattcatcctcttcccgctcaagctcgtggaaaaatgcgagtcctcggtcagccttaccgtacccccggtggtcaaacttgaaaacggaagctcaactaacgtgtcgttgactttgcgccctccccttaatgcgaccctggtcattaccttcgagatcaccttcagatcaaagaacatcactattctggaactcccagatgaagtggtggtgcctcctggagtgactaactcctcattccaagtgaccagccagaacgtcggacaactcacggtgtacctgcatggcaatcactccaaccagaccggaccacgtattcgctttctcgtcatcaggagcagcgcgatcagcatcattaatcaagtgatcggttggatatactttgtagcttggtccatctctttctaccctcaggtcattatgaattggagaaggaagtccgtcattggtctttccttcgattttgtggcacttaacctcactggtttcgtcgcatattccgtgtttaacatcggcctcctgtgggtgccttacataaaggagcagtttttgcttaagtaccctaatggtgtcaatcctgtgaactcaaacgatgtgttctttagcctccacgcggtggtcctgactctgattatcattgtgcaatgttgcctctacgaacggggtggccagcgcgtctcgtggccggcaattggatttctggtcctggcatggctttttgcatttgtgaccatgatagtggcagcagtgggcgtgactacctggctgcaatttctgttctgtttttcatacataaagttggcagtcactcttgtgaagtacttccctcaagcgtacatgaacttttactacaagtcgaccgaaggatggtcgatcggcaatgtgcttctggattttaccggcggatcgttttcgctcctccagatgttcctgcaaagctacaacaatgatcagtggactctcatctttggggacccaacgaagtttggactcggcgtgttttctattgtgtttgacgtggtgtttttcattcaacatttttgtctctaccggaagcggcccggttacgatcagctgaat

SEQ ID NO: 150932 - DNA, 1101 bp, Artificial Sequence
  derived and/or modified sequence
atgatcagaaattggctgaccatcttcatcttgtttccattgaagctagtggagaaatgtgagtcttcagttagcctgacggtgccgccggtagtgaagttggaaaatggcagcagcacaaacgtgtccctgacattaagacctcctctcaatgctactttggtgataacctttgagattaccttcagaagcaagaacattacgatcttggaacttccagacgaagtggtcgtgccacccggagtgactaattcttcttttcaggtcacctcgcagaatgtcggacaattgaccgtgtatcttcatggaaatcattctaatcagacagggccaagaattcgattcctcgtgatccgaagtagtgcaattagcatcattaaccaggtgattgggtggatctactttgttgcttggtctataagcttttacccgcaggttattatgaattggaggaggaaatctgtcatcggcttaagtttcgattttgtggctctgaaccttacaggcttcgtcgcttattcggtattcaacattggactgttgtgggtgccatacatcaaagaacagttccttctgaaataccccaacggggtgaatccggtcaactccaacgatgtattcttctcactccacgcagtggtgctgacacttattatcattgtccagtgctgtctttacgaacgaggcggtcagcgagtgagctggccagccatcggatttcttgtgctcgcctggctatttgccttcgtgacaatgatcgtcgccgccgtcggagttacgacctggctgcaattcttgttctgtttctcttacatcaagctggccgtaaccttggtgaagtacttccctcaggcctatatgaacttttattataagtcaaccgaaggatggtccatcggcaacgtcctgttggattttaccggcggaagcttttctctcctgcagatgtttttgcaatcctataacaacgaccaatggacccttattttcggcgaccccacgaagttcgggctgggtgtgttcagtattgtttttgatgtggtgttcttcatccagcatttttgcctttatcgtaagaggccagggtatgatcagctgaat

SEQ ID NO: 150933 - DNA, 1101 bp, Artificial Sequence
  derived and/or modified sequence
atgatcaggaactggttaacaatcttcatactgttccctctgaaactggtggagaagtgcgagagcagcgtgagcttaaccgtcccgccggtagtgaagctggagaacggttcctcaactaacgtgagcctgaccctgcgccccccgctgaatgctaccctggtgatcacatttgaaattacctttaggagtaagaatattactattctggagttgcctgacgaggtggtcgttcctcctggggttacaaactcttcctttcaagtcacgtcccaaaacgttggccaactaaccgtgtacctgcacggtaaccactctaaccaaactggtcctagaattaggttccttgtcattcgctcctctgctatctcgattatcaatcaagtgattggttggatttatttcgtcgcatggtctatttctttctatcctcaggtgattatgaattggcgccgcaaaagcgttatcggcctttcgtttgactttgttgccctgaatctgaccggtttcgtggcgtacagcgttttcaatataggcctgctgtgggtgccatacatcaaggagcaattcctactgaagtatccaaatggtgttaatcctgtcaactccaatgatgtcttcttctcactgcacgctgtggtgctgaccctgattatcattgttcagtgctgtttgtatgagcgtggcggacagcgcgtgagctggccggcgatcggttttttagtgttagcgtggctgtttgcctttgttaccatgatagtcgcagccgtcggtgttactacttggttgcaattcttgttctgcttctcttatattaagctggcggtcacgcttgtcaagtactttccacaggcttacatgaatttctattacaagagcacggaaggctggagcatcggcaatgtcttactggattttacgggtggtagcttctctctgctccaaatgttcctgcaaagttataataacgatcagtggacactgattttcggtgacccgaccaagtttggactgggcgtcttcagcatcgtgtttgacgtggtattcttcatccagcacttttgtctgtaccgtaaaagaccgggctacgatcagctgaat

SEQ ID NO: 150934 - DNA, 1101 bp, Artificial Sequence
  derived and/or modified sequence
atgatacgtaattggctaacgatatttatactatttccgctaaaactagttgaaaaatgtgaatcgtcggtatcgctaacggtaccgccggttgtaaaactagaaaatggttcgtcgacgaatgtttcgctaacgctacgtccgccgctaaatgcgacgttagtaataacgtttgaaataacgtttcgttcgaaaaatataacgatattagaattaccggatgaagtagttgttccgccgggtgtaacgaattcgtcgtttcaagttacgtcgcaaaatgtaggtcaactaacggtatatctacatggtaatcattcgaatcaaacgggtccgcgtatacgatttctagtaatacgatcgtcggcgatatcgataataaatcaagttataggttggatatattttgttgcgtggtcgatatcgttttatccgcaagtaataatgaattggcgacgtaaatcggtaataggtctatcgtttgattttgtagcgttaaatttaacgggttttgttgcgtattcggtatttaatataggtttactatgggttccgtatataaaagaacaatttctattaaaatatccgaatggtgtaaatccggttaattcgaatgatgtatttttttcgttacatgcggttgttctaacgctaataataatagtacaatgttgtttatatgaacgtggtggtcaacgtgtttcgtggccggcgataggttttttagttctagcgtggttatttgcgtttgttacgatgatagtagcggcggtaggtgtaacgacgtggttacaatttctattttgtttttcgtatataaaactagcggtaacgctagtaaaatattttccgcaagcgtatatgaatttttattataaatcgacggaaggttggtcgataggtaatgtattattagattttacgggtggttcgttttcgctattacaaatgtttctacaatcgtataataatgatcaatggacgttaatatttggtgatccgacgaaatttggtctaggtgtattttcgatagtttttgatgtagttttttttatacaacatttttgtctatatcgaaaacgtccgggttatgatcaattaaat

SEQ ID NO: 150935 - DNA, 1101 bp, Artificial Sequence
  derived and/or modified sequence
atgattcgcaactggctgaccatctttattctattcccattgaaattggttgagaaatgcgagtctagtgtatctctaacagtcccgcccgtggtgaagctggaaaacgggtccagcacaaatgtgtccttaacactccgcccccccctaaatgcaaccctagtcatcacctttgagataaccttcaggagcaaaaatatcaccatcttagaattgccagatgaagttgtggtaccgcctggggtaacaaatagttcctttcaggtgacctcacagaacgtgggccaactgaccgtgtacctacatggcaaccactcaaaccagacagggccccggattcgctttctagtgatccgcagttctgccatcagcatcatcaatcaggtcatcggatggatctacttcgtggcctggtcgatttctttttacccacaggtgattatgaactggagacgaaaatcagtgatcggtctgtccttcgatttcgttgctctgaatctgacgggatttgtggcttacagtgtgttcaacatcggcctcctgtgggtgccttacattaaagagcagttcttattgaaatatcccaacggcgtcaatcccgtgaattctaatgatgtctttttctccttacacgccgtggtactgacattgatcattatcgtgcagtgttgtctttatgagcgggggggccagagggtaagttggcctgcaataggatttcttgtccttgcatggctcttcgcatttgtgactatgatagtggctgccgtgggagtaaccacatggctccagtttttgttctgttttagttatattaagctcgcagtgaccttggtcaagtactttccacaggcgtacatgaacttctactacaagtccactgaggggtggagtatcggcaatgttctgttggatttcacaggcgggtcgttctcgttacttcagatgttcctccagtcatacaacaatgatcagtggaccctgatttttggcgacccaaccaaattcggccttggagtattttctattgttttcgacgtggtgttctttattcaacatttctgtctttatcgtaagagaccaggttatgatcaattgaat

SEQ ID NO: 150936 - DNA, 1101 bp, Artificial Sequence
  derived and/or modified sequence
atgatcagaaattggctgaccatatttatattgttcccacttaaattggtggagaagtgcgaaagttccgtctctctcactgtcccaccggtagtcaagcttgagaacggttctagtacaaatgtgtccctgactttgaggccgcccctgaacgccactcttgtaataacattcgaaataaccttccggagtaaaaatataacaatactcgagctccccgatgaagtcgtcgttccaccaggggtgacgaactcatcttttcaggtgacctcacagaatgtcgggcagcttactgtgtacttacatgggaatcacagcaatcaaaccggcccaagaatccgcttcctagtaattagaagctcagctattagcatcatcaaccaggtgatcggctggatctatttcgttgcttggagtatctctttctacccgcaagttatcatgaattggagaaggaaaagcgttatcgggctcagtttcgattttgtggcgctgaatctaacaggattcgttgcctactctgttttcaacatcggacttctctgggtgccttacatcaaagagcagtttctgctgaaatatccgaatggagtgaatcccgtgaactccaacgacgtttttttctccttgcacgccgtagtcttgactctgatcatcatcgtgcagtgttgcttgtatgagagaggcggtcagcgagtgagctggcccgccatcggattcttagttctggcttggttatttgctttcgtgacaatgattgtggccgccgttggggtaaccacttggctccagtttcttttctgtttctcctatattaagctcgccgtgacactcgtgaagtactttccacaagcatatatgaatttctactataaaagtaccgaaggatggtctattggaaatgtgctgcttgactttaccggcggatctttttctctactacaaatgttcctgcagtcttataacaacgatcaatggactctgatctttggtgacccaacaaagtttgggctgggtgtgttctcaatagtctttgacgtggtttttttcattcagcacttctgtctgtataggaagcggccgggttacgaccagctgaac

SEQ ID NO: 150937 - DNA, 1101 bp, Artificial Sequence
  derived and/or modified sequence
atgattcgaaattggctcaccatatttattttgttcccattaaagttggtcgaaaagtgcgaatcatctgtctctctgactgttccccctgttgttaaactggaaaacggatctagcacgaatgtttcgttgacactaagaccacctttgaacgctactttggtgattacattcgaaattacctttagaagtaagaatatcaccatccttgagctgccggatgaagttgtggtaccaccaggtgtcactaacagctcgttccaagtgacttcccaaaatgtcggacaacttacggtttatcttcacggcaaccattcaaaccaaactggaccgcgtattagatttcttgtgattagatcttcagccatttccatcatcaaccaagtaattggttggatttattttgtggcttggtctatcagcttctaccctcaggtcattatgaactggcgcagaaaatcggtgataggactatctttcgatttcgtcgcgttgaatctaaccggattcgttgcgtatagcgtttttaacatcgggcttctatgggttccatatatcaaagaacagttccttttgaaatatccgaatggtgttaaccctgttaattccaatgacgtgtttttctcgcttcacgctgttgttctcacacttattatcatcgtacaatgctgtctttatgaaaggggaggacaacgtgtatcatggccagcgattggattccttgttttggcttggcttttcgcgttcgttaccatgatcgttgctgccgtgggagtaactacgtggctgcaattccttttttgtttttcgtatatcaagctcgcggtaacattggttaagtattttcctcaggcttacatgaatttttactataagtcgacagagggatggtctattggaaacgttctacttgatttcacagggggttcgtttagtctgttgcaaatgtttctgcaatcatataataatgaccaatggactctcatcttcggcgatccaacgaagtttggactcggcgtattttccatcgtctttgatgttgtctttttcatccaacacttttgcctctacagaaaaagaccagggtatgaccaacttaat

SEQ ID NO: 150938 - DNA, 1101 bp, Artificial Sequence
  derived and/or modified sequence
atgattagaaactggctgaccatattcatcttgttcccactgaaactcgtcgaaaagtgcgagtcttcggttagtctaacagtgcccccagtcgttaaactggagaacggctcctcgacaaacgtctcattaacactacggccccctttgaatgccactctggtgatcacttttgaaataacctttcgttcaaagaatattactattctcgaactgcccgacgaggtcgtcgtgccacctggagtcactaatagttcgttccaggtgacatcacagaacgtgggccagcttactgtttatctccacgggaatcattccaaccagacaggaccccggatcagatttctggtgatccggagtagcgcaatatcgattatcaatcaggtgatcggctggatttacttcgtggcttggagcattagcttttatccccaagtgatcatgaactggcgaaggaaatctgtgattggactgtccttcgattttgtcgctctgaatttgaccgggttcgttgcttatagcgtttttaatatcggtttgttgtgggtaccatacatcaaggagcagttcttactcaagtacccaaatggtgtaaaccctgttaacagcaatgacgtattcttcagtcttcatgcggtcgtacttacgcttatcatcatcgtacaatgttgtttgtacgagcgaggaggtcaacgtgtttcttggccagctatcggcttccttgtgttggcctggctttttgctttcgtgaccatgattgtggctgccgtcggcgttactacttggctacagtttctcttctgtttctcctatatcaagctggctgtaaccctcgttaagtacttccctcaggcatatatgaatttctattacaagtctactgagggttggagcatagggaatgtgctcctggatttcacaggaggaagcttcagcctgctgcagatgttcctgcagtcatacaataatgatcagtggacgctgatcttcggggaccctaccaaattcgggcttggagtcttctcaatcgtgttcgacgttgtgttctttattcagcacttttgcttgtaccgaaagagacctggttacgatcagctgaat

SEQ ID NO: 150939 - DNA, 1101 bp, Artificial Sequence
  derived and/or modified sequence
atgatacgtaactggttgactatttttatactgtttccgcttaagttggtcgaaaagtgtgagtcatccgttagtctcacagtgccccctgtggtgaaactcgagaatggtagttccactaacgtatccctaaccctcaggcccccgttgaacgcgacgctcgtgatcactttcgagatcacctttaggtcaaagaatatcaccatcttggagctgccagacgaggttgtggtgcctcccggcgtgacaaactccagcttccaggttacctctcaaaacgttggtcaactcaccgtgtaccttcacgggaatcacagcaaccaaacggggccccggattcgctttctggttattcgctccagcgcgattagtataattaaccaagtgatcggctggatctattttgttgcctggtcaatcagtttttacccgcaggtaattatgaactggcgtcggaagtcagtcatcgggctgtctttcgatttcgttgccctgaaccttaccgggtttgttgcttattccgtgttcaacataggcctgttgtgggttccgtatattaaagagcagttcttactgaaatatccgaacggggttaaccccgtgaacagcaacgacgtattcttctcccttcacgccgtagtcttgaccttgatcatcatcgtacagtgctgtctgtatgagcgcggtggtcaacgggtgtcctggcccgcgataggattcttagtgctagcctggctgtttgctttcgtgaccatgatcgtggctgccgttggggtgacaacctggctgcagtttctgttctgcttctcttatatcaaactcgccgtgacattggtgaagtacttccctcaagcctacatgaacttttattacaaaagcaccgaggggtggagtattggtaacgttttacttgacttcaccggcgggtcattctcactcctacagatgttcttgcagtcgtacaataatgatcagtggacactcatatttggggacccgacaaagttcggtctgggagtgttctccattgtgttcgacgtcgttttctttattcagcacttctgtctttacaggaagagaccaggatacgaccagctcaac

SEQ ID NO: 150940 - DNA, 1101 bp, Artificial Sequence
  derived and/or modified sequence
atgattcgtaactggcttaccatcttcattctgttcccgctgaagttggttgaaaagtgtgagtcttcggtctcgctcaccgtcccccccgtcgtcaaattggagaacggttcctccaccaacgtcagccttacgttgcgtcctcctctgaacgctacccttgttatcaccttcgaaatcaccttccggtccaagaacattacgatcctggagctccctgatgaggtcgtcgtgccccctggcgtcacgaactcatctttccaggtcacctcgcagaatgtcggtcaactgacggtctacttgcacggcaaccactccaatcaaaccggcccgcgcatccggttcctggtcatacggtcctctgctatctcgatcatcaaccaagtgatcggatggatctacttcgttgcgtggtcaattagcttttacccacaggtgatcatgaactggcggagaaagagtgtaatcggcctgtcgttcgacttcgtggcgctgaacctgaccggttttgtggcttacagcgtcttcaatatcggcctgctttgggtcccctacattaaggagcagttcttgctcaagtaccctaacggagtgaaccctgtcaactcgaatgatgtctttttcagcctccacgcagtcgtattgaccttgattatcattgtacaatgctgcttatacgagcgcggcggtcaacgtgtgtcctggcctgctattggctttctagtgctggcgtggctgttcgcattcgtgaccatgatcgtcgccgccgttggtgtgaccacttggctgcagtttctcttctgcttctcctatatcaagctcgcagtcacccttgtgaagtatttcccccaagcttacatgaacttctactacaaatccacggagggatggtcaataggaaacgtgttgcttgacttcacagggggatcattctctctccttcaaatgttcctgcagtcgtacaataacgatcagtggacgctcatcttcggcgatccaaccaagtttggccttggtgtgttctctatcgtattcgacgtcgtcttctttattcagcacttttgcttgtacaggaagcgtcccggctatgatcaactcaac

SEQ ID NO: 150941 - DNA, 1101 bp, Artificial Sequence
  derived and/or modified sequence
atgatccgcaattggctgacaatcttcattctattcccccttaagttggtggaaaaatgtgagtcgtcggtttctctgacggtgccacctgttgttaaattggaaaacggttcatcaacgaacgtgtctctgacgcttcgcccgccgttgaacgctactctagtgataacattcgaaatcaccttccgtagcaaaaatataaccattctagagctccccgatgaggtggtcgtcccacccggtgttacgaattcatccttccaggtcaccagtcaaaacgtgggtcagcttactgtttatttacacggcaatcatagcaatcagactgggccccgaattagatttctggtcatccgatcaagcgccatctctattataaatcaggtcattggctggatctacttcgttgcatggtccatttccttttacccccaggtgatcatgaactggcgcaggaagagtgtgatcggcctctccttcgacttcgtcgccttaaatctcaccgggtttgtggcttattccgtttttaacatcggcctcttgtgggtcccatacatcaaagaacagtttctcctgaaatacccaaacggagtcaaccctgtaaatagcaacgacgtgtttttttccttgcacgccgtagtgctgacccttatcattatagtgcagtgttgtttgtacgagcgcggtggacagcgcgtgtcttggcccgcgatcgggtttctagttttagcctggttgttcgcgtttgtcacaatgatcgtggctgcagtgggcgtgaccacttggctgcagtttctcttctgcttttcctacatcaagcttgcagtaactctcgtgaaatacttccctcaggcttacatgaacttctactacaagagtaccgagggttggtctattggaaacgtcttgctcgatttcactggaggatctttctcactacttcaaatgtttctgcagtcctacaacaacgaccagtggaccctcatctttggcgaccccaccaaatttggcttgggcgtgtttagcattgtgtttgacgttgtattctttatccagcacttctgtctgtatcgcaaaagacccggttacgatcaactgaac

SEQ ID NO: 150942 - DNA, 1101 bp, Artificial Sequence
  derived and/or modified sequence
atgataaggaactggctgacaatctttattcttttccccttgaagctggtggaaaaatgtgagtccagcgtctcacttactgtcccacctgttgttaaactcgagaatggctcctccacaaacgtgagcctgacgttgcgcccccccctgaacgcaacattggtcatcacattcgagataacgttcaggtccaaaaacatcaccatactggagcttcccgatgaagtggtagttcccccgggtgtaacaaacagtagcttccaggtaacttcccagaacgtcggacagctcacggtgtacctgcacggtaaccattctaaccagactggccccaggatccgatttcttgtgataaggagttctgcaatcagtattataaatcaggtgattggctggatttactttgtggcgtggagcatctccttctaccctcaggtgattatgaattggaggcggaagtctgtcatcggactgtcattcgacttcgtggccctgaacctgacgggtttcgtggcctacagtgtctttaatattgggttgctgtgggtcccgtatataaaagagcagtttctcctcaagtaccccaacggagttaaccccgttaatagcaatgatgtgtttttctctctgcacgctgttgtcctcaccctcatcatcattgtgcagtgctgcctctatgagagagggggacagagagtctcttggcccgccattggattcttggtcctcgcatggttgttcgcctttgttaccatgatcgtggcggcggtcggggttactacctggcttcagtttctcttttgtttcagctacattaagttggcggtcactctcgtgaaatatttcccacaggcgtacatgaatttctactacaaatccaccgagggctggagcattggaaacgttctgttggattttactggaggctctttcagcctgctgcagatgtttctccagagttacaacaatgaccagtggacccttattttcggcgaccctacaaaatttggtttgggcgtgttttcaattgtcttcgacgttgttttctttatccagcatttttgtctgtacaggaagcggcccggatacgaccaactgaat

SEQ ID NO: 150943 - DNA, 1101 bp, Artificial Sequence
  derived and/or modified sequence
atgataaggaactggcttacaatcttcatccttttccccctcaaattagtggaaaaatgcgaatcctcggtctcgttaactgtccctcccgtggtgaagttggaaaacggatcaagtaccaatgtgtcactgaccctgaggcctcctctgaatgctacactggtaatcacatttgagataacattccgatccaagaacatcacaatactggaacttcctgacgaagtggttgtccctcctggggttacgaatagtagcttccaggtaacaagccagaacgttggacagttaacagtataccttcacgggaatcactccaaccagactgggccccgaatccggtttcttgttatccgttcttcggccatttctattattaatcaggtgatcggatggatatacttcgtggcgtggagtatctccttctacccccaggtgatcatgaactggcgccggaaatccgttattggactgagtttcgatttcgttgcactcaatctcacaggctttgtagcctacagcgtgtttaacatcgggctcctttgggtcccatatatcaaagagcaatttctcctaaagtatcccaacggcgtgaatccagtaaattccaatgatgtgttcttctctcttcatgccgtggtcctcacactgataatcatcgtgcagtgttgcctgtacgaaagagggggacagagggtgtcttggcccgccatcgggttcttggtcctcgcatggctttttgccttcgtgacaatgattgttgccgctgtcggcgtgaccacctggctgcagttcctgttttgtttttcctacattaaactggctgtgactctagtgaaatatttccctcaggcctacatgaatttctattacaaatctacggaaggttggtcaatcgggaacgtgctgttagatttcactgggggctcattcagccttctccagatgtttctgcagtcttataacaacgatcagtggacactcatcttcggggaccccaccaagtttggactgggcgtctttagcatcgtgttcgacgtggtgttctttatccagcacttttgcctgtataggaagcgccctgggtacgatcagctgaat

SEQ ID NO: 150944 - DNA, 1101 bp, Artificial Sequence
  derived and/or modified sequence
atgataagaaattggctgaccatattcattttgttcccactaaaactggtggagaagtgtgaatctagcgtgagtctaaccgtgcctcccgtagtaaagctggaaaacggttcctccacgaacgtcagtctgactcttcgccctcctttaaacgcgacattggtgattaccttcgaaattacctttcggtcgaaaaatattaccatcctggaattgccggatgaggtcgttgtccctccaggagttacaaactcgtccttccaagttacgtcgcagaatgttggccagctgaccgtctatttgcacggaaaccatagtaaccagacggggccacgtattaggttcctggtgatccgcagctcagccatttcgattatcaatcaggttattgggtggatttattttgtcgcctggtccatttccttctacccgcaagtcattatgaactggcgccgcaagtcggtgataggactctcgtttgatttcgtggccttgaatttgactggatttgttgcatactccgttttcaacattggtcttctttgggttccttatataaaggagcagttcctgctcaaatatcccaatggcgtgaaccccgtaaattctaatgacgtttttttctctctccacgccgtcgtcctcacgttgatcattatcgttcagtgctgtctatacgagaggggcgggcaacgcgtctcttggcccgcaatagggtttcttgtccttgcttggctctttgcttttgtgactatgattgtcgcagcagttggcgtgacgacttggctccagttcctattctgtttctcatatattaaactcgcagttactttagtcaagtatttccctcaagcctatatgaacttctactataagtcgacggagggctggagcatcggtaatgtattgttagattttacggggggaagcttcagcctgctccaaatgttcctgcaatcgtataataacgatcagtggacccttatctttggagatccgacaaaattcggtctgggcgtattctcaatcgtatttgatgtcgttttcttcatacagcatttctgtctttatcgtaagcgtccaggttacgaccagctgaac

SEQ ID NO: 150945 - DNA, 1101 bp, Artificial Sequence
  derived and/or modified sequence
atgatcaggaattggctcactatttttatactgtttccactaaagctggtggaaaaatgtgagagcagtgtgagccttacggtgcctcccgtggttaagttagagaacggatcatctaccaacgtaagcctgaccttgcggcctccactgaacgctacactggtaattacattcgagataactttccggagcaagaacatcactatcctggagctgccagatgaagtggtggtacccccaggggtgaccaacagttcctttcaggtgaccagccagaacgtggggcagctgactgtgtacctccacggcaaccatagtaatcagacggggccacgtattcggtttctggtcattagaagctcagcaatttctattattaatcaggttatcggctggatctatttcgtcgcttggtccatatctttctacccccaagtcattatgaattggaggagaaagagtgtgatcggtttgagctttgatttcgtcgcattgaatctgactggtttcgttgcgtactcagtgttcaacatcggccttctgtgggtgccttacataaaggaacagttcttattgaagtacccaaacggcgtgaatccagtcaattccaatgacgtgttcttctcactgcacgcggtcgtgcttacactaatcatcattgtccagtgttgtttgtacgaacgggggggtcagagggtttcatggccagctatcgggtttcttgtgcttgcctggctattcgcttttgtaacaatgatcgtagccgcggtaggcgttactacttggctgcaattcctcttttgttttagctacatcaaactagccgttacactcgttaagtattttcctcaggcctacatgaatttctattataagtccacagagggatggtcgatcgggaacgtgctgctggacttcacaggcggctctttcagtctgctccaaatgtttctccaaagttataataatgaccagtggacactcatcttcggagacccaacgaaatttggccttggggtattttccattgtgttcgacgtagtgttctttattcagcatttttgtctgtatcgaaaaaggcccgggtatgaccagctaaat

SEQ ID NO: 150946 - DNA, 1101 bp, Artificial Sequence
  derived and/or modified sequence
atgatcagaaactggctgaccatctttatcctgtttccattgaagctcgtggagaagtgtgagtctagtgtcagcctgactgtgcccccagtggtgaagctggagaatggctcttctaccaacgtttctctcaccttgcggccacctctgaatgcgactctagtgatcactttcgagatcacatttcggtccaaaaacatcacaatcctggaactaccggatgaagtggtagtgcctccaggagttactaactcttcatttcaggtgaccagccagaatgtcgggcaactgactgtgtatctacacggtaatcattccaatcagactggccctcgcatacggttcctggtgatccggagctccgctatctcaattatcaaccaagtgatcggttggatctactttgtcgcatggtctatctccttctatcctcaggtgatcatgaactggaggaggaaatccgtgatagggctatccttcgacttcgtcgctctgaaccttacggggttcgtcgcgtatagtgtgtttaatatcggcctgctgtgggtgccctacattaaggagcagtttctgctgaagtacccaaatggcgttaaccccgtgaacagcaacgacgtcttcttttctctccacgccgtggtcttgacgctgatcatcatcgtgcagtgctgtctgtacgaacgcggagggcagcgggtaagttggccagcaattgggttcctggttctggcctggcttttcgcattcgtgactatgatagtggccgcagtgggcgtgactacgtggctccagttcctgttttgcttctcctacattaagttggcagttaccctcgtgaagtacttcccgcaggcctacatgaacttctattataagtcaacggagggctggtcgatcggaaatgtcttgctcgacttcacagggggttctttttccttgctgcagatgttcctgcaatcatataataacgaccagtggaccttaatattcggagaccctaccaaattcggactgggcgtatttagcatcgtctttgacgtagttttctttattcagcacttctgcttgtacaggaagagacctggttatgatcagctgaac

SEQ ID NO: 150947 - DNA, 1101 bp, Artificial Sequence
  derived and/or modified sequence
atgattcggaactggctgaccattttcatcctgtttcccttaaaacttgtggagaagtgtgaaagcagcgtctcccttactgtgccacccgtggtaaaactggagaacggcagtagcactaacgtgagtttgaccttacgtccgcctctgaatgcaacattagtcattacatttgagataaccttccgcagtaaaaacatcacgatcctggaattaccggacgaggttgttgtcccacccggcgttaccaactcatccttccaggtgacctcccagaacgtgggccaactgactgtctatctgcatggcaatcacagtaatcagactggccccaggatcaggtttctcgtgattcgcagcagtgcgatatccatcattaatcaggtcattggctggatatacttcgtggcgtggtctatcagtttttatcctcaggtcattatgaattggagacgcaaaagcgtaattgggctcagttttgacttcgtggccttaaacctgaccggctttgtggcctattctgttttcaacatcggcctactgtgggttccatatataaaggagcagttcctgctgaagtacccaaatggcgtaaacccagttaattccaacgacgtgttttttagcttgcacgctgtagtcctcactctgattattatagtccagtgctgcctttacgagaggggcggtcagagggtgtcgtggcccgctatcggtttcctggtgcttgcctggctgttcgccttcgttactatgatcgtcgctgccgtaggagtgaccacttggctgcagttcctgttttgttttagttatatcaagttggccgtgacactggttaaatactttccacaggcttatatgaatttttactataagagtaccgagggctggtctataggaaatgtgctcctggacttcaccggcggctcctttagtctgctccagatgttcctgcaaagctacaataacgaccagtggaccttaatttttggcgatccaaccaagtttggcttgggagtattcagcatcgtgtttgatgttgtgttctttatccagcacttctgcctgtataggaagagaccgggatatgaccagctgaat

SEQ ID NO: 150948 - DNA, 1101 bp, Artificial Sequence
  derived and/or modified sequence
atgatccggaattggttgacaatcttcatcctattcccactgaagttagttgaaaaatgcgaatcttccgtctccctcacagtgccacccgtagtcaaactcgagaatggctcctcaactaatgtatcactgacgttacggccccccctgaacgcgactttggtgatcaccttcgagattacctttaggtctaaaaacatcactattctcgagcttcccgatgaagtggtggttcctccgggggttacgaactcctccttccaggtaacctctcagaatgtgggtcagctcactgtgtatttacacggcaaccactccaaccagacgggaccccggattcgatttcttgtgatcaggtcctccgctatttcaataattaaccaggtgataggctggatttattttgttgcttggagcattagcttttatccgcaggtgattatgaattggagaagaaagtccgtgatcggtctgagcttcgattttgtcgcccttaaccttaccggtttcgttgcttattctgtatttaacataggcctgctgtgggtgccctatatcaaggagcagtttctccttaagtatccgaatggtgttaatcctgtgaattcaaatgacgttttttttagcctacatgccgtggtcctgacgctgattatcatcgtacagtgttgcctgtatgaacgaggcgggcagagggttagctggcccgccatcggatttctggttctcgcctggcttttcgcatttgtcaccatgatagtggccgccgtcggggtgacgacctggttacagttccttttctgcttttcctacatcaaactcgcagttacactggtcaaatactttccacaggcctatatgaacttctattataaaagcactgaaggttggagcatcgggaatgtccttctggattttacaggagggtccttttccttactccagatgtttcttcagtcatacaataatgaccaatggacattaatttttggcgaccctacaaagtttggcctgggcgtgttctccatagttttcgatgtcgtattttttatccagcacttttgcctttacaggaagagacccggctatgatcagctgaat

SEQ ID NO: 150949 - DNA, 1101 bp, Artificial Sequence
  derived and/or modified sequence
atgattagaaactggctcactatcttcattctctttcctctgaagctcgttgaaaaatgtgagtcttcagtctctctgaccgtgccaccagttgtcaagttggaaaacggttcttctacaaacgtttcacttacactcaggccaccactcaatgctaccttggtaatcacctttgaaatcacattccgctcaaaaaacattactattctggaattgccagacgaggttgttgtgccaccgggcgtgaccaactcatccttccaggtaacgtctcagaacgtaggccagctcactgtctatttgcatggcaatcactcaaaccagactggacccagaatcagattcttggtgatccgcagttcagctattagcattataaaccaggtgattggttggatctactttgtggcctggtcaatcagtttctaccctcaggtcatcatgaactggagacgcaagtcagttatcggactctcttttgacttcgtggcactgaacctcaccggtttcgtggcttattctgtcttcaacatcggcctgttgtgggtcccatacatcaaggagcagttcctgctcaagtacccaaatggtgtaaaccccgttaactctaacgacgttttcttctccctgcacgccgtggtactgacgctcattataattgtacagtgttgcctgtacgagcgcggcggccaacgcgttagctggccagccattggttttttggttctggcctggcttttcgcatttgttacaatgatagtggcggccgtgggtgtgactacttggcttcagttcctcttctgcttcagttatataaagttggctgtgactctcgtgaagtacttcccacaagcctacatgaacttctactacaagtccactgagggctggagcattggtaatgttctgttggactttacaggtggttccttctctctgttgcagatgtttcttcaatcatacaacaacgatcagtggaccctgatctttggcgaccctaccaagttcggattgggagtcttctcaattgtgttcgacgtggtcttttttattcagcacttttgtttgtaccgcaagaggccaggatacgaccagcttaac

SEQ ID NO: 150950 - DNA, 1101 bp, Artificial Sequence
  derived and/or modified sequence
atgataaggaattggctgacaatcttcatactatttccgctcaaattggtcgaaaagtgcgaatcatcggtgagccttaccgtaccccctgttgttaaattggagaacggaagtagcaccaatgtgtcattgaccctcaggccccccttaaacgctaccctggtgattaccttcgaaattacatttcgctcaaagaacatcacaattcttgagctccccgacgaggtggtcgttcctcctggagttacaaacagctcctttcaagtgactagtcagaatgtgggtcaactgaccgtttacctccatggaaaccatagcaatcagaccgggccaaggatcagattcctggttatcagatcctcagccatttccattatcaaccaagttatcggctggatctatttcgtggcctggtcaatctccttttatcctcaggtgatcatgaactggcgaaggaagagtgtgatcggactgagtttcgattttgtggccctgaaccttacaggatttgttgcatatagtgtctttaacatcggcctcctttgggttccctacatcaaggaacagtttctcttgaagtatcctaatggcgtgaaccctgtaaacagtaatgacgtcttcttcagtcttcacgcagtggtgctcaccctgatcataatagtccaatgctgcctgtatgagagaggaggacagcgagtctcatggcctgcgattggcttcctcgtcctggcatggctgttcgccttcgtcacaatgatcgtggctgctgtgggagtcaccacctggctgcagtttcttttctgtttctcgtacatcaaactcgccgtgacccttgtgaagtattttccccaggcctacatgaatttttactacaaatctactgaaggatggtccataggcaatgtgctgctggacttcaccggaggttcgtttagtctgttacagatgttcctgcaaagctataacaacgaccaatggactttgatatttggggaccctaccaaattcggattaggggtcttcagcatagtgttcgatgtggtgtttttcatccagcacttctgtctgtatcgcaaaagaccaggttacgatcagctgaac

SEQ ID NO: 150951 - DNA, 1101 bp, Artificial Sequence
  derived and/or modified sequence
atgatcaggaactggcttacaatcttcatcttgttccccctcaagctcgtggagaagtgcgaatcatcagtgtcacttacagtcccaccagtcgtgaagctggaaaacggatcatccaccaatgtctctctgacacttagaccacctctgaacgccaccctggtgatcacattcgagataacctttcgcagtaagaatattacaattctggagctgccagatgaagtcgtcgttcctcctggtgtcacaaactcttccttccaagttacgtcccagaacgtgggacaactgaccgtctatctccatggcaatcactccaatcagacgggacccaggattcggtttctggtgatcaggtccagtgctatcagtattatcaaccaggtaatagggtggatttacttcgtggcttggtccatcagcttttatccacaggtgattatgaactggaggcgaaagtctgttataggacttagcttcgactttgtcgccctgaatctgacgggcttcgtggcgtacagcgtgttcaacatcgggttgctttgggtaccgtatataaaagagcagttcctcctgaagtatcctaacggagtgaatccagtgaattcaaacgacgtcttcttctctctccacgccgtggtgttgactctgattattatagtgcaatgttgcctgtacgagcgcggtggccagcgcgtcagctggcctgctattggtttcctggtgctggcttggctgttcgctttcgtcaccatgatcgtcgccgccgtaggggtgacaacttggctccagttcttgttttgctttagctacattaaattggcggtcacactcgttaaatactttccacaggcttacatgaacttctattacaagtccaccgaaggctggtccattggcaatgttctgttggattttacagggggaagcttttctctgctgcagatgttcctccagagctacaataacgaccagtggaccctgattttcggagatccaacgaaattcggactcggtgtgttttctatcgtgttcgacgtggtattcttcatacagcacttctgcctgtacagaaaaagacccggatatgatcagcttaat

SEQ ID NO: 150952 - DNA, 1101 bp, Artificial Sequence
  derived and/or modified sequence
atgatccggaattggctaactatttttatcctgttccctctgaagctcgttgaaaagtgtgagagttcagtgtcgctcaccgtgccccctgtggtgaagttggagaatggatccagtacgaatgtgtccttgaccctccgtcctcctctcaacgcgaccctggttataactttcgaaatcacttttagaagtaaaaatataaccatcctggagctgccagatgaagtggtagttccgccgggggtaactaactccagcttccaggtaacgtctcagaacgtcgggcaactcaccgtgtatctgcacggcaatcacagcaatcagacgggaccccggatacgcttcctggtcatacgatccagcgcgattagtattatcaaccaagtgataggttggatatattttgtggcatggtcgatctcattctacccacaggtgatcatgaattggaggcgcaaaagtgtcatcgggctttcgttcgacttcgtagccctgaatttaacgggcttcgtggcctattctgtttttaatattggtctactctgggtgccctatattaaggaacaattcctgcttaagtaccccaatggcgtgaaccctgttaacagcaacgacgtgttcttctccctgcacgccgttgtgttgacattaatcataattgtacagtgctgcttgtacgagagggggggccaaagggtgagttggccggctataggctttctagtcctggcatggctgtttgcttttgtcaccatgattgtggctgccgtgggagtcactacttggctacagtttttgttttgcttctcttacatcaaactggcagtgaccttggttaaatatttcccacaggcctatatgaatttctattacaagtctaccgaagggtggtcaatcggcaacgtgctgctcgatttcaccgggggctcattcagccttctacagatgttcctgcagtcatataacaacgatcagtggacgttgatctttggtgatcccaccaagtttggacttggcgtgttctccatagtgttcgacgtcgtcttttttattcagcatttttgcttatatcggaagagaccaggatacgatcagttgaac

SEQ ID NO: 150953 - DNA, 1101 bp, Artificial Sequence
  derived and/or modified sequence
atgattagaaattggttgaccattttcatactctttccccttaagctggtggaaaaatgtgaatcttctgtaagcttgaccgtgcccccggtcgtgaaactggaaaacggcagcagtaccaatgtgagcctgaccctcaggccgcccttaaatgctaccctggtgataactttcgagatcacgtttcggtctaagaatatcacaattctggagctaccagatgaggttgtggtcccaccgggggtcaccaacagctcctttcaagtcacgagccagaatgtgggacagctgacggtctacctccatggaaatcattcaaatcaaactggtccacgcatcaggtttttggtcatcagatcttcagctattagcattatcaaccaggtgatcgggtggatctattttgtcgcgtggagcatctccttctatccccaggttatcatgaattggcgacgtaaatcagtgatagggttgtcgttcgacttcgtcgcgttaaatcttaccggcttcgttgcatacagcgtgtttaacattggcctgctgtgggttccgtatattaaggaacagttcttgctaaaataccccaacggagtgaacccagtcaactctaatgacgtcttcttttcccttcacgccgtggtccttactttgataatcatagtgcagtgctgtctgtacgaaagaggcgggcagagagtttcatggcctgctatcggatttttggtcctcgcgtggctctttgcgttcgtcacgatgattgtagcggctgtgggggtgaccacctggcttcagtttctgttctgtttttcctatatcaagcttgcggtcaccctggtgaagtacttccctcaggcttacatgaatttttactataaatccactgagggctggtccatcggcaacgtgttgctcgattttactgggggttcctttagcttactgcagatgttcttacagtcctacaataatgaccagtggaccttgattttcggcgatcccactaaatttggtcttggagttttctcgatagtgtttgatgtggttttttttatccagcacttttgtctttatcgtaaacgtcctggctatgaccagctcaac

SEQ ID NO: 150954 - DNA, 1101 bp, Artificial Sequence
  derived and/or modified sequence
atgattaggaactggctgaccatctttatactgttccctcttaaactcgtagagaaatgcgaatcctcagtctctcttaccgtgcccccggtggtgaaactggagaatggatccagcaccaacgtctcattaaccttaagacctcctttgaacgccaccctggtcataacctttgaaattacctttagatcaaagaatattacaattctcgagctccccgacgaggtggtcgtgcctccaggtgtcacaaatagttcgtttcaggttacaagccagaacgtgggacagttgacagtctacctccacgggaatcactccaaccagaccggcccgaggatccggttcctggtcattcgcagcagcgctattagcataattaaccaggtgatcggttggatctatttcgtggcatggagtataagtttttatccccaggtaatcatgaactggagaaggaaaagcgtaatcggcctgtcatttgattttgtggcactgaacctgactggattcgttgcctattcggtgttcaacataggcctgctgtgggtgccgtacattaaagagcagttcttattgaaatatccaaatggagtgaatcccgtgaactcaaatgatgtgtttttttcccttcatgcagtggttctgacattgattattatcgttcagtgttgtctgtatgaaaggggagggcagcgtgtgagctggccagctatcgggttccttgtcttagcatggttattcgcattcgtgacaatgattgtagccgctgttggagtgaccacttggttgcagttcctgttttgtttctcatacattaagcttgcagtgaccctagttaagtattttcctcaggcctacatgaatttctactataagagcactgaaggctggtctatcggcaacgtcttgctcgattttacagggggtagcttcagcctcctgcagatgttcctccagtcatacaacaatgatcagtggacgttgatcttcggagatccaaccaagtttggacttggcgtgttcagtatagtttttgacgtggtatttttcatccaacacttttgcttgtatagaaaacggccaggctatgaccaactgaat

SEQ ID NO: 150955 - DNA, 1101 bp, Artificial Sequence
  derived and/or modified sequence
atgatccgaaattggcttactatatttattctgtttccactcaagttagttgaaaaatgcgagagtagtgtgtccctcacagtacctccagtggtgaagctggaaaatggttctagcacaaatgtgtcgctgacgctgaggccccctctgaatgcgacgctggtcataacgtttgagatcacttttcggtccaaaaatatcaccattctcgagctgcctgatgaagtcgtggtccctcccggcgtgacaaattcaagtttccaggtgacatcacaaaatgtcggacagctaacggtgtacctgcacggaaaccactctaatcagacgggaccccgtataagatttctggtgatccgaagctccgctattagcattattaaccaggttatcggatggatctactttgtcgcttggtctatatctttctatcctcaggtgattatgaattggcggcggaagagcgtgatcggcctgtcattcgacttcgtcgccctcaatctaactggctttgttgcctatagcgtcttcaacattgggctgttgtgggtgccctacatcaaagagcagtttctgctgaagtaccccaatggggtgaaccctgtgaactccaacgacgtgttcttctccctgcacgcggtcgtattgacgctgattattatcgtgcagtgttgtctatatgaaaggggtggccaacgcgtaagttggccagccataggcttcttggtcttagcttggttgtttgccttcgtcacaatgattgtggcagctgttggcgtaacaacatggctgcagttcctgttttgtttctcctatatcaaactcgcagtgactctcgtgaaatacttcccacaagcctacatgaacttctactacaaatcaactgagggctggagcataggaaacgtactgctcgactttaccggggggtccttcagtcttttgcagatgtttctccagtcatacaataatgaccagtggactcttatcttcggggatcctacaaagttcggactgggagttttttcgatcgtgttcgacgtcgtgttttttatccagcacttctgtctctacaggaagcgcccggggtatgatcaattgaac

SEQ ID NO: 150956 - DNA, 1101 bp, Artificial Sequence
  derived and/or modified sequence
atgattagaaactggttaactattttcattttattcccacttaaattagttgaaaagtgtgaaagttcagtttcattaacagtaccaccagtagtcaaacttgaaaatggatctagtacaaatgtttctttaacacttcgaccaccacttaatgctactttagtaattacatttgagattacttttagaagtaaaaatattacaattttagaattaccagatgaagttgttgttccaccaggtgttacaaattcatcatttcaagtaacgtcacaaaatgttggacaattgacagtttacttacatggtaatcatagtaatcaaacagggccaagaatacgttttttagttattagatcttcagccatttcaattattaatcaagttattggatggatttattttgttgcatggtctattagtttttatcctcaagttattatgaattggcgtagaaaatcagttatcggtttatcatttgattttgttgcattaaatttaacgggatttgttgcttatagtgtttttaacattggacttttatgggttccatatattaaagaacaatttttgttaaagtaccctaacggagtaaatccagtgaatagtaatgatgtttttttttcacttcatgctgtagttttaactcttattattattgtacaatgttgtttatacgaaagaggtggacaaagagtttcatggccagctataggtttccttgttcttgcttggttatttgcatttgtaactatgattgtagctgcagttggagtaactacatggcttcaattcttattttgtttctcatatataaaacttgcagttacactcgttaaatattttcctcaagcttacatgaatttttactataaatcaaccgaaggatggtcaataggaaatgttttattagattttactggaggatcatttagtcttttacaaatgtttttacaatcatataataatgatcaatggacattaatattcggagatccaacaaaatttggtcttggagttttctctattgttttcgatgtagtttttttcattcaacatttttgtctttatcgaaaaagaccagggtatgatcaattaaat

SEQ ID NO: 150957 - DNA, 1101 bp, Artificial Sequence
  derived and/or modified sequence
atgatccgcaactggttgacaatctttatcctgtttcccctcaagctggtcgagaagtgcgagtcttccgtcagtctgacagttcctcccgtggtcaagctggaaaacggttcctccaccaacgtttctctgacactgcgccccccacttaacgccacactggtgattacctttgaaatcaccttcagaagtaagaatattaccatcctcgagttgcctgatgaggtggtcgtaccccctggcgtgaccaactcttcctttcaggtcactagccaaaacgtcggccagttgaccgtgtacctgcatggaaatcactctaatcagaccggccctagaatacgctttttggtgattcgctccagtgccatcagcataattaaccaagtgatcggctggatctacttcgtcgcatggagcatttcattttaccctcaagtgatcatgaattggcgtcgtaagtccgtcatcggtctgtccttcgacttcgtcgccttgaaccttactggctttgtcgcttacagcgtgttcaacattggtctcctttgggtgccatatattaaggaacagtttctgttgaagtaccctaatggagtgaatcccgtcaatagcaacgatgtcttcttcagccttcacgctgtcgtcttgacacttataatcatcgtacagtgttgtctttatgaaaggggcggacagagggtctcatggcccgccattggattcttggtgctggcctggctgttcgcttttgttaccatgatcgtggcagctgtgggtgtcacaacttggctccagtttcttttttgcttctcttacatcaagctggcagtgactttggtgaaatacttccctcaagcatacatgaacttctactataagagcactgaaggttggtccatcggcaatgtgctgttggattttacaggcggaagtttctctctgctgcaaatgtttttgcaatcttataacaacgaccagtggactctgatatttggtgaccctaccaaattcggacttggtgtatttagcatcgtattcgacgttgtgtttttcattcagcatttctgcctctacagaaaacgccccggatacgaccaactcaat

SEQ ID NO: 150958 - DNA, 1101 bp, Artificial Sequence
  derived and/or modified sequence
atgatccggaattggttaacaatttttatcctgtttccactcaagcttgtggaaaagtgcgagtcaagcgtttcgctcactgtccctccggttgtaaagcttgagaacggttcgtcaaccaacgtgtcattgactttgaggcctccactcaatgctacactggttataacgtttgaaattacttttcgttcgaaaaatattaccatccttgaattgcccgatgaagtcgtcgttcctcctggcgttacaaactcctcgttccaagtcacctctcagaatgtcggtcaacttacagtttacttgcatgggaatcacagcaaccaaactgggcctcgaatcaggttcttagttattcgttcttctgctatatcgatcataaatcaggtcattggttggatatacttcgttgcttggtcaatatccttctaccctcaggttataatgaattggagaaggaagtccgtcatcggtctgtccttcgacttcgtcgctctcaacttgacgggcttcgtcgcctatagcgtgtttaacatcggtctgctttgggttccctacataaaggaacaatttctgctcaagtatcctaacggtgtgaatccagtgaattctaatgacgtttttttttccttgcatgcggttgttcttacccttattatcattgtgcaatgctgcctttatgaaagggggggacagagggtatcgtggcctgctataggatttctagtgcttgcatggcttttcgcttttgtcactatgatcgttgctgccgtcggggttactacttggttacagtttcttttttgcttctcttatatcaaactggctgtcaccctagtcaaatatttcccccaagcatatatgaacttttactacaaaagtacagaaggctggtcaatcggcaatgttctgttagacttcactggcgggagtttctcgttgcttcagatgtttctccaaagctataataatgatcagtggacacttatctttggagatcctactaagtttggtcttggcgttttttccattgtttttgatgtggtcttctttatccaacatttctgcctttataggaaacgtccaggatatgaccagttgaac

SEQ ID NO: 150959 - DNA, 1101 bp, Artificial Sequence
  derived and/or modified sequence
atgattcgtaactggctcacaatcttcattctctttccactgaagctggtggagaaatgcgagtctagcgtttcactaactgtgccacccgtcgttaagctggagaacggatctagtacaaacgtgtccctaaccctgaggcccccactaaatgctaccttggtgataaccttcgagattacattcaggagcaagaatataaccattctcgagcttcctgatgaggtagtcgtacccccaggtgtgactaactctagctttcaggtgacctcacagaacgtcgggcagttgaccgtctacctgcatgggaatcactcaaatcaaacaggaccccggatccggtttctggtaatcaggagttcagcgattagtatcatcaaccaggtgattggttggatctatttcgtggcgtggtctatctccttttacccacaagttatcatgaactggaggaggaaatccgtcattggcctgtcctttgattttgtggcccttaacctgacaggattcgtggcctatagtgtgtttaatatagggctgctttgggtaccgtatatcaaagagcagttcctactgaaatatcccaacggagtaaatcctgtaaactccaatgacgtgtttttttcgttgcatgccgttgtcctgaccctgatcattatcgtgcagtgctgcctgtacgaaaggggaggacagagggtttcgtggccagctatcggttttttggtgttggcatggctgtttgccttcgttactatgattgtcgctgcagtcggggtgaccacctggctgcagtttctgttctgcttctcttacataaaactggccgtgactctcgtcaagtatttcccccaggcttacatgaacttctattataagtctaccgagggatggagtataggcaatgtgcttctggatttcacaggcgggagctttagcctcctacaaatgtttctacaatcatataacaatgatcagtggacactgatttttggtgatccaacaaaatttgggctaggcgtcttcagtatcgtgttcgacgtcgtctttttcattcagcacttctgtctttaccgcaagcgccccggatatgaccaactgaat

SEQ ID NO: 150960 - DNA, 1101 bp, Artificial Sequence
  derived and/or modified sequence
atgatccggaattggctgactatttttatcctgttccctcttaaactcgtggaaaagtgcgagtcgagcgtgagcctcaccgtgccgcctgtcgtgaagctggaaaacggatcatctacgaacgtgagccttactctgcggccgcccctgaatgcgactctggtgattactttcgagatcaccttccgctcaaagaacatcacgatcctggaactgccggacgaagtggtcgtcccgccgggagtgacgaacagctccttccaggtcacttcccagaacgtggggcagctgactgtttacctgcacggcaatcatagcaaccagaccggacctcgcatcagattcctcgtgatcaggtcgagcgccatctcgattatcaatcaagtcatcgggtggatctattttgtggcatggtcaatcagcttttacccgcaagtgattatgaactggcgccgaaagtcggtgataggattgtcgttcgacttcgtggctttgaacctcactggattcgtggcatactccgtctttaacatcggactgctgtgggtgccctatatcaaggagcaattcctgctgaaatacccaaacggagtcaacccagtgaactccaatgatgtgttcttttccctgcacgccgtcgtgctcaccctcatcattatcgtgcagtgctgtctctacgagcggggaggacagagggtgtcatggcctgcgatcggtttcctcgtcctcgcctggctgttcgctttcgtaaccatgatcgttgcggccgtgggtgtgactacttggctgcagttccttttctgcttctcctacatcaaattggccgtcaccttggtgaagtactttccacaggcatacatgaatttctactacaagtcgaccgaaggttggtcaattggcaatgtccttctggactttaccggcggctcgttctcgctgctccaaatgttcctgcagtcttacaataacgaccaatggaccctgatcttcggagatccaaccaaattcggattgggggtgttctccatcgtctttgatgttgtgttcttcatccagcatttttgcctctacagaaagcgcccgggctacgaccaactcaac

SEQ ID NO: 150961 - DNA, 1101 bp, Artificial Sequence
  derived and/or modified sequence
atgattagaaactggttgacgatcttcattttgttccccctaaagttggtagaaaaatgcgagtcctccgtcagtctgactgtccctcctgtggttaagttggagaacggttcatctaccaacgtgtccttaacgttgcgacctcccttgaacgccactctggtgatcacatttgagatcacctttcgcagcaagaatattacgatcctagagttaccagatgaggttgttgttccgcccggcgtgaccaacagcagtttccaggtgacgagtcagaatgtgggacaattgactgtttatttgcacggtaaccattctaaccaaaccggcccaaggatccgctttctggtgatccgatccagtgccatctccatcatcaaccaggtcattgggtggatatatttcgtagcctggtccatctcgttctatccccaagtgattatgaattggcgaaggaaatctgtcataggcctgagcttcgatttcgtggctttgaacctgactggcttcgttgcgtactcagtgtttaatatcggtctcctgtgggtgccttacatcaaagaacagttcctgctgaaatatcctaatggagtgaatcccgtcaactctaacgacgtctttttttctcttcatgcggtggtcttaactctcataatcattgtccagtgctgcttgtacgaacgtggcgggcagagggtgtcatggccagcgatcggattcttggtcctcgcctggctatttgcgtttgtcacaatgattgtagcagccgtcggcgtgaccacgtggctgcagtttcttttttgtttcagttacatcaaactcgccgtcaccctcgtcaagtacttcccacaggcttatatgaatttctattacaagtcgacagagggttggtcaatcggtaacgtcctgctggacttcactggcggctccttcagtctgctgcagatgtttctgcagtcctacaacaacgatcagtggactctgatattcggagaccctaccaagttcggcctcggtgtcttttctattgtgtttgatgtggttttctttatccagcacttttgcctttaccgcaagcgtccaggatacgatcaactgaac

SEQ ID NO: 150962 - DNA, 1101 bp, Artificial Sequence
  derived and/or modified sequence
atgatccggaactggctgaccatttttattctgtttcccctcaaactagtcgagaaatgcgaatcaagcgtgtcacttactgtccctccagttgtgaaactcgaaaacggaagctccacaaatgtcagtctgacgttacggccacctttgaatgctacactggtaataaccttcgaaattacgttccggtcaaagaacataactatattagaacttccggatgaggtggtagtgccaccaggcgtcacaaatagctcttttcaggttaccagccaaaacgttgggcagttaactgtctatctccacggtaaccactcgaatcagaccggtccaaggatcagattcttagtcattaggtccagcgcgatatctatcatcaaccaggtcatcggttggatttacttcgttgcatggagcatcagcttttatccccaggtgatcatgaattggcgtcgcaaatcagtcatagggctatcctttgactttgtcgctctaaacctgactggcttcgttgcatatagtgtattcaatattggtctgctctgggtgccatatattaaggagcagtttttattaaagtatcctaacggagtcaatcccgtaaactccaatgatgtttttttcagcctgcacgcggttgtgctgacgctgatcataatcgtccagtgttgcctgtatgagagaggagggcagcgagtgtcctggcccgccatcgggttcttggtgctggcctggctgtttgcttttgtgactatgatcgtcgccgccgtgggcgtgacaacatggcttcagtttctgttctgtttttcctacatcaagttggccgtgaccctggtgaagtattttcctcaggcatacatgaacttctattataaatccacagagggatggagtattggcaacgtcctgctggattttacaggcggaagtttttcacttctacagatgtttttgcagtcttacaataacgaccagtggacactaatcttcggtgatcctacgaagtttgggctgggggttttttccattgttttcgatgtggtgttcttcatacagcatttttgtctttacagaaagagacccggctacgaccaattgaac

SEQ ID NO: 150963 - DNA, 1101 bp, Artificial Sequence
  derived and/or modified sequence
atgatccggaactggctcacgattttcatcctcttccctttaaaactggttgaaaagtgcgagagctccgtgagcctcacagtaccccccgtcgttaagttggaaaacgggagtagtaccaatgtgtccttgacactgcgtccaccgctgaacgcaacgcttgtgatcacattcgagataaccttccggtcgaaaaacatcaccatcctggagctgccggatgaagtagtcgtgccccccggtgttacaaactcctcgttccaagttacctctcagaatgtgggacagctaactgtgtacctgcacggaaaccacagtaatcagaccggtccgagaattagattcctagtgatccggagtagtgcgatctccatcataaatcaagttattggatggatttacttcgtggcctggagcatctctttctatccgcaggttataatgaattggcgccggaagagtgtcatcggattgagcttcgacttcgtcgcactaaacttgaccgggttcgtcgcttacagcgtgttcaatattggactgctgtgggtgccttatatcaaggaacaattcctgttaaagtaccccaacggcgtaaatccggtgaacagcaacgatgtattcttctccttgcatgccgtggtgttgactctgattattatcgttcagtgctgcctctatgagagaggcgggcaaagggtttcctggccagctattggcttcctcgtgctcgcgtggcttttcgcatttgttaccatgatagttgccgctgtcggtgtgacaacctggttacagttcctgttttgcttctcttacattaagctagccgtcacactcgtgaagtatttccctcaggcatatatgaatttctactataagagcactgaaggctggtctattggcaacgtgctgctcgactttacagggggttccttttcccttctccagatgttcttacagagttacaacaatgatcagtggacgctcattttcggggatcccacaaagttcgggctaggagtgttttccattgtctttgacgtggtgttttttattcaacacttttgtctttacagaaaacggccggggtacgatcaactcaat

SEQ ID NO: 150964 - DNA, 1101 bp, Artificial Sequence
  derived and/or modified sequence
atgatacgtaactggctgacaatatttattctcttccccctaaaactagtggagaaatgcgagtctagtgtgagtctcacagtgccacctgtcgtgaaactagagaatggatctagtacgaatgtgtccttgactctgcgcccacctctgaatgctacactagtgattacatttgaaataacatttaggtcaaaaaacataacaatactcgaactccccgatgaagtggtagtaccccctggggttactaactcttcatttcaggtgacatcccagaatgttggacagttaactgtttacctccatgggaatcattctaatcagacaggacccagaatcaggtttttagtgatccgctcttccgccatatcaatcataaaccaagtgattggatggatatattttgtcgcttggtctatctctttttatccacaggttataatgaactggaggcgcaaatcggttatagggctctcatttgatttcgtggcactgaatctcacagggttcgtggcctattctgtgtttaatattgggttgctttgggtaccctatataaaggaacagtttctactcaaatatccaaatggggtaaatccagtgaattcaaacgatgttttcttctccctgcacgccgtcgttctgactctcatcattatcgtacaatgttgcctttatgaacgaggaggacagcgggtgtcctggcccgccatagggttccttgttctcgcttggctcttcgcgttcgtcacaatgatagtggccgcagtcggagtgacaacttggctgcagtttcttttctgcttttcctatatcaaactcgcagtgacactcgtaaaatattttccacaggcatacatgaacttctattataaatcaacagaaggatggagtatagggaacgtgctcctagatttcacagggggatctttctcgctgcttcagatgttcttgcagtcttataataacgatcagtggactctaatattcggagacccaactaaatttggattaggagtatttagtatagtatttgatgtggtgttctttattcagcacttctgtctctacagaaaacggcccggatacgatcagttgaat

SEQ ID NO: 150965 - DNA, 1101 bp, Artificial Sequence
  derived and/or modified sequence
atgattcgtaattggcttacaatttttattttattcccgttaaaattagttgagaaatgcgagtcatccgttagtttaacggtaccgcctgttgtcaaactcgaaaacggctctagcacaaacgttagccttactttacgcccccctctgaatgcaacgttggtgattacatttgagattacattcagaagcaagaacatcacaatattagagctaccggacgaggttgtagtcccgccaggcgttacaaatagttcttttcaagtaacatcacagaatgtgggccagctgactgtgtatcttcatggcaatcactctaatcaaaccggcccgcgcattcgttttcttgtaatacgttcctctgccataagcattatcaatcaggtgattggttggatatactttgtcgcttggtcaatctctttttatccgcaagtgataatgaactggcgccggaagtccgttattggactttctttcgattttgtagccttgaatcttacgggcttcgttgcctattcagtattcaacatagggctgctgtgggtgccgtatattaaagaacagtttcttctgaaataccctaatggagttaaccctgtgaattctaacgatgtatttttcagccttcatgccgtcgttctgacgttaattatcatcgttcaatgttgcttgtacgaaaggggggggcaacgtgtatcttggccagctatcggcttcctggtccttgcttggttatttgcattcgtgaccatgattgtcgctgcggttggggtaacaacgtggcttcaatttttattttgtttctcatatatcaagcttgccgtaactcttgtgaaatattttcctcaggcttatatgaatttctactacaaatcaactgaagggtggtcaattggtaatgttctgttagattttacaggaggaagtttttcccttttacagatgtttttacaatcttacaacaacgatcagtggacactgatttttggggaccctactaagtttggattgggagtattctcaatcgtcttcgatgtcgttttttttattcaacatttctgcctttatcgaaaaagacctggctatgatcagctcaat

SEQ ID NO: 150966 - DNA, 1101 bp, Artificial Sequence
  derived and/or modified sequence
atgattcggaactggctgactatcttcatcctgttccccctgaagttggttgaaaagtgtgagtcgtcagtatctctgaccgtcccaccagtggtgaagctagagaatggatcctccaccaatgtgtcgttgacccttcggccccccttaaatgcaacactggtaataaccttcgaaataacattccgttctaagaatatcaccatcttggaattgcctgacgaagttgtagtaccccccggtgtgacgaactcctcgttccaagtgactagccagaatgttgggcagctcactgtgtacctacatggcaaccatagcaatcagaccggtccacggatcaggtttctggtgattcggtcctccgccatctcgattattaatcaggtgattggttggatctacttcgtggcatggtccatatctttttatcctcaggtgataatgaactggcgcaggaagtccgtcattgggttgtctttcgatttcgtggccctcaacctgacaggcttcgtggcttactcagtttttaacataggcctcctttgggtaccgtacataaaggaacagttcctactcaagtaccccaatggcgtgaaccctgtgaattcaaacgatgttttttttagcttacatgctgtagtcttgaccctgattatcatcgtacagtgctgcctgtacgagcgagggggccaacgcgtgagttggccggcaattgggtttctggtgctggcctggctgtttgcgttcgtgacaatgatagtggcagctgtcggtgtgaccacctggttacagtttttgttctgcttcagttatatcaagctagccgtgacactagtcaaatatttcccccaagcctacatgaacttctattacaagagtactgagggctggtccattgggaatgtattgctagattttaccggcggcagcttttccttactgcagatgttcttgcagtcctacaacaatgatcagtggacccttatcttcggggaccctacaaaattcggtctcggagtgttctccatcgtatttgacgtggttttctttattcagcatttctgcctctatcgcaagcggcccggatatgatcagttaaat

SEQ ID NO: 150967 - DNA, 1101 bp, Artificial Sequence
  derived and/or modified sequence
atgatcagaaactggcttactatcttcatattgttcccactcaaactggtcgaaaaatgcgagtcctccgtaagtctcacagtgccacccgtagttaaactggagaacggaagctccactaacgtgagtctcacactgcggccacccctgaatgctactttggttattacctttgaaatcaccttccggtcaaagaacatcactatcctggaactgcccgacgaggttgtggtccctcctggagtcacaaactcttccttccaggtcacaagccaaaacgtcggacaactcacagtgtatctccacggtaatcactctaaccagacgggccctcggatacgatttctggttattaggtcttccgccatcagtattatcaatcaagtcattggttggatctactttgttgcctggtctatcagtttctacccccaagtgatcatgaattggcgcaggaaatccgtcatcgggctgagttttgattttgtggcactcaatttgaccgggttcgtggcttatagcgtctttaacatcggcctcctgtgggtcccctatataaaagaacagttcctgttgaaataccctaatggggtgaatccagtgaactccaatgatgtgttcttctccttgcacgcagtggtgctcacattgataatcatcgtgcagtgctgtctgtacgaaagaggaggccagcgggtgagctggcctgcgattggctttctggtactggcatggctgtttgcctttgtcactatgatcgtcgcagctgtgggcgttactacctggctccagtttttgttctgcttctcttatattaagctggcagtaaccctggtgaaatattttccccaagcctatatgaacttttactacaaatccaccgagggttggagcataggcaatgttctgctcgactttactggcggctctttttccctcctgcagatgttcctccaaagttacaacaatgatcaatggaccctgatttttggggatcccactaagttcggactcggagtattcagcatcgtgttcgatgtcgtttttttcatccaacacttctgcctctacaggaaacggcctggttacgatcagttgaat

SEQ ID NO: 150968 - DNA, 1101 bp, Artificial Sequence
  derived and/or modified sequence
atgatccggaactggctgaccatcttcatcctgttcccactcaagctggtcgaaaagtgtgagtcttccgtgtcgctaactgtgccaccagtggtgaaacttgagaatggcagcagcaccaacgtgagtctaacactgcgccccccgcttaatgctacattggtgatcacgtttgagatcaccttccgctctaaaaacattaccatcttggagctgcccgacgaggttgtggttcctcctggtgtcaccaattctagcttccaggttacatcccaaaatgtaggtcagctgacagtctatctgcacggcaatcattccaaccagaccggcccccgtatccggttcttggtgatcaggagttccgccatctccatcattaaccaggtcattggctggatttacttcgttgcttggtcaatatcattttaccctcaggtgattatgaactggagacggaagtcagtcataggactatccttcgactttgtggcactcaacttaacaggtttcgtggcttacagcgtatttaacattggcctgctttgggtgccctacattaaagagcagttcctgctgaagtatcctaacggagttaatccagtcaattctaacgacgtgtttttttccctgcacgccgtggtgctgacactgatcatcatcgtgcagtgttgcctctacgaacgaggcggccagcgagtaagttggccagccatcggtttcctggttctggcctggctgttcgctttcgtgaccatgatagtggccgccgttggggtgacgacctggctgcagttcctgttttgtttctcctacattaagctcgcagtgacccttgtcaagtatttcccacaggcttacatgaacttttactataagtcgacagaaggctggagcataggtaacgtgctgctggatttcaccggagggagcttcagcctactgcagatgttccttcaatcctataacaatgaccaatggacacttatctttggcgatcccacaaaattcggactcggcgtgttctcaatcgttttcgatgtggtgttcttcatccagcacttttgtctgtatcggaagcggccaggttatgatcaactcaat

SEQ ID NO: 150969 - DNA, 1101 bp, Artificial Sequence
  derived and/or modified sequence
atgattaggaattggctcactatcttcattctgtttcctctgaaactcgtggaaaagtgcgagagctccgtgtcactaaccgttccacctgtggttaagctggaaaatggctcttctacaaacgtttccctgaccctcagaccccctttgaatgctacccttgttattacttttgagattacgttcaggagtaaaaacattaccatactggagcttccggacgaggtggtggtgccacccggtgtaactaattctagctttcaggtgacatcacagaatgtcgggcagttgactgtgtatcttcatggtaatcacagcaatcagacagggcctcggatccgttttctcgtgatccgctccagtgccatctctatcatcaatcaggtcatcggctggatctattttgtggcatggagcatttccttttacccacaggtcattatgaattggaggaggaagtccgtcatcggcctgagctttgatttcgtggctctgaaccttaccggcttcgtggcttactcggtgttcaatattggtcttctgtgggtgccctacatcaaggaacaatttctcttgaagtaccccaatggggtgaatcctgtgaactcaaacgacgttttcttttccctccacgctgtcgtcctgactctgataatcattgtgcagtgctgcctgtatgagaggggcggccagagagtgtcgtggcccgcaataggttttctggttctcgcatggctgttcgccttcgtcacaatgattgtagctgccgtgggggtaactacttggctgcagttcctgttttgtttttcttacatcaagcttgctgtcacactcgtgaaatacttcccccaagcctacatgaatttttattacaaatccacagagggttggagcatcggcaacgtactgctggactttaccggcggttctttctccctgctgcagatgtttttgcagtcctataacaatgatcagtggacactaatctttggtgatccgaccaagtttggactaggtgttttctcaatcgtcttcgatgtggtgtttttcatccagcatttttgtctctaccgtaagaggccaggctatgaccaactgaac

SEQ ID NO: 150970 - DNA, 1101 bp, Artificial Sequence
  derived and/or modified sequence
atgataaggaactggctgacaattttcatcctgtttccgttgaaactagttgagaagtgcgaatcctcagtttctctgaccgttccccccgtggttaagctagaaaacggctcatctactaatgtctccctcacgctgaggcctccgctcaacgccacccttgtgatcacatttgagatcacttttcgatccaagaacatcaccatactcgagctcccggacgaggtcgtcgtcccaccaggtgtgacgaattcttccttccaagtgacttcccagaatgtgggacagctgacagtttacctccatgggaaccatagcaaccagaccgggccgcggatccggtttctggtcatccgatccagcgcaatttccataattaaccaagttattggctggatttattttgtggcctggagtatttccttctatccacaggtaatcatgaattggcggcgcaagagtgttatcgggctttccttcgatttcgttgccctcaacctgacaggattcgtcgcctacagtgttttcaacattgggttgctgtgggtgccctatatcaaagaacagtttctgctcaaataccccaacggggtcaaccccgtgaacagtaatgatgtgttcttttccctgcatgccgtggtgctgaccttgataatcatcgtccaatgttgcttgtacgaaaggggagggcagagggtcagctggcctgccattggattcctagtgctcgcgtggcttttcgcattcgtgaccatgatcgtggctgccgttggcgtgaccacttggctccaattcctcttctgtttctcttacattaagctcgccgtgactctagtgaagtatttcccacaagcttatatgaatttttattacaagagcaccgagggctggtccatcggaaacgtgctgctggacttcacgggcgggtctttctcactgctgcagatgtttctgcagtcttataataacgatcagtggactctgatattcggagacccgactaagttcggcctgggggtattcagcatcgtgttcgatgtggtctttttcatccagcacttttgcctgtatcggaaacgtccgggttatgaccagcttaac

SEQ ID NO: 150971 - DNA, 1101 bp, Artificial Sequence
  derived and/or modified sequence
atgatacgaaattggctgacgatcttcatattgttcccgctaaagctggttgaaaaatgtgagagtagtgtaagcctaactgtgccacctgtggtgaagttggagaacggaagcagtactaacgtgagtctgacattgaggccacccctgaacgccacactggtgattaccttcgagatcactttccgctctaagaacattacgatcctggagctgccagacgaggtggtggtaccacctggagtgaccaactccagcttccaggtcacttcccagaatgtaggtcaactgacagtgtaccttcatggcaatcactcaaaccaaactggcccacgcattcgatttctcgttatacgctcatcagcaatttccattatcaaccaggtaatcggttggatatatttcgtggcgtggtcgatcagtttctatccgcaggtgatcatgaattggagacgcaagtccgttattgggctgtcatttgacttcgtggcgctgaatctgactggtttcgtagcatattcggtgttcaatataggcctactgtgggtgccctacatcaaggagcagttcttactgaagtaccccaatggtgtgaatcccgtgaactcaaacgatgtcttttttagcctgcatgcagtcgtgctaactctgatcattattgtccagtgctgtctttacgagagggggggccagcgcgtgtcctggcccgccataggatttttggtgctcgcgtggctatttgctttcgtaaccatgatcgtggccgccgtcggtgtcactacatggctgcaattcttgttttgcttctcctatattaagctagcggtgaccctggttaaatacttcccccaggcctatatgaatttctactacaaatcaacagaagggtggtctatcggaaacgtgcttctagatttcaccggcgggagcttttctttgttacaaatgtttctgcaaagttataacaatgatcagtggaccctgatcttcggggaccccactaaattcggtctgggcgtgttctctattgtttttgacgttgtgttctttatccagcatttctgtctctacagaaaacgaccaggctacgatcagcttaac

SEQ ID NO: 150972 - DNA, 1101 bp, Artificial Sequence
  derived and/or modified sequence
atgatacgcaactggttaacgatctttatcttattccccctgaaacttgtggaaaagtgcgagagttccgtctccctgacagttccccccgttgtgaaactggagaatgggtcctcaaccaatgttagcctgacactgagacctccattgaacgctactctcgttatcacctttgagatcacgttccggtcgaagaatattacaatactcgaactcccagacgaagtggtagtgcccccgggcgtgacgaacagttcgtttcaagtaacctcccagaacgttggccagctgaccgtgtatctgcacggaaatcatagcaaccaaaccggacccaggattcgatttctcgtcatcaggtccagcgccatttccattatcaaccaggtaataggctggatttactttgtggcctggagcatctcgttttacccacaagtaatcatgaactggagaaggaaatctgtcataggtctgtcgttcgattttgtcgcactgaatctgaccgggttcgtagcctattctgtttttaacatcgggctgctgtgggtgccatatatcaaggagcagtttcttttgaaatatcctaacggcgtgaaccccgtgaatagcaacgatgtctttttctccctccacgctgttgtccttacgctgattatcattgtgcagtgctgcctgtatgagcggggaggacagagggtctcatggccagccataggatttctggtcctggcctggctgttcgccttcgtcacaatgatagtagcggcggtgggagttactacctggctacagtttcttttttgcttctcttacatcaagttggcagtcacactggttaaatacttcccgcaggcttacatgaatttctactacaaatctacggagggctggtccattgggaacgtgctcttggactttaccggtggcagcttctcactgctgcagatgtttcttcagagttacaataatgaccagtggacactaatatttggagatcccacaaaattcggcctgggtgtattttccattgtttttgatgtggtcttctttatccagcatttttgcctgtatagaaagcgcccgggttacgaccaactgaac

SEQ ID NO: 150973 - DNA, 1101 bp, Artificial Sequence
  derived and/or modified sequence
atgatccggaactggctcaccatctttattctattccccttgaagctggtggagaagtgcgagtcgagcgtgtcgctgacagtccccccggtagttaaactagagaatggtagctcaacgaatgtgtccctaacgctgcggccccccttgaatgccactctggttatcacgttcgagataacgtttcgatcgaagaacatcacgattctcgagttgccggacgaagtggtagtgcctccaggagtcaccaactcgagcttccaagttacgtcgcagaacgttggacagcttaccgtttacctccacggcaatcatagcaaccagacaggtccccgaatcaggttcctggtgatccggagttcggctattagcatcattaaccaggttattgggtggatttattttgtagcgtggtcaataagcttttacccacaagtgataatgaactggcgtcggaagtcagtgataggactgtcgtttgactttgttgcacttaacttgaccggttttgtcgcctactcggttttcaacattggtttgctgtgggtgccgtatattaaggagcagttcctgttgaaatacccaaatggcgtgaatccggtgaactcgaacgacgtttttttctcgctgcacgccgtggtgctcactttaattatcattgttcagtgctgcttgtatgaacgaggtggccagcgcgtatcctggccagccattggcttcctggtcttggcgtggctttttgcatttgtaactatgatagtggccgccgttggcgtcacgacgtggctgcaattcttattctgcttcagctatatcaagctagccgtcacattggtaaaatatttcccccaggcgtacatgaacttctactacaagtcgaccgaggggtggtcaataggcaacgttttgctcgacttcacgggcggaagttttagtctgctgcagatgttcctgcagtcgtacaataatgaccaatggacgttgatttttggagacccaacaaagttcggccttggcgttttctccatcgtgttcgacgttgttttcttcatccaacacttctgtctataccgaaagcggccgggctacgaccagctgaac

SEQ ID NO: 150974 - DNA, 1101 bp, Artificial Sequence
  derived and/or modified sequence
atgatacggaactggctgaccatttttatcctgtttcctctgaaactagtagaaaaatgtgaaagcagtgtgtctttaaccgtcccgcccgttgtcaagctggaaaacggctcctctacaaatgtttcattgactcttcggccgcccctcaatgctactctagtaattaccttcgagattacattccgctctaagaatatcaccatccttgagctcccagatgaggtggtagtcccgccaggcgtgaccaattcttcatttcaggtgacatctcaaaatgtgggccagctgacagtgtatctgcatgggaaccactcgaatcagactggccctcgcatacgctttctcgttataaggtcctccgccataagcattattaaccaggttattggttggatatactttgtggcttggtctatctccttttatccacaggttatcatgaattggcgacggaagtctgtgattggcctctctttcgattttgtagccctgaacctgacaggtttcgtggcctattctgtgttcaacatcgggctgctgtgggtgccctacattaaggagcagtttttgctaaaataccccaatggcgtcaatccagtcaatagcaacgatgtcttcttttctctccatgccgtcgtgcttaccctgattattattgtgcagtgttgcttgtacgagcgcggcggacaacgagtaagttggccagccattggcttcctggtgctggcctggctcttcgccttcgtgactatgatcgttgctgctgtcggcgtcacaacttggctccagtttctcttctgtttctcctatatcaagctggccgtcacacttgtgaaatacttcccacaggcatacatgaacttctattataagagtaccgaaggttggtccatcggtaacgttctgctggatttcaccggcggctccttttctttgttgcaaatgttcctccagagctataataatgaccagtggacgctaattttcggcgaccccacaaagtttgggctgggcgtctttagcatagtctttgacgtggttttcttcattcagcatttctgtctttataggaaacgcccggggtacgaccagttaaac

SEQ ID NO: 150975 - DNA, 1101 bp, Artificial Sequence
  derived and/or modified sequence
atgatcaggaactggcttaccatcttcattctgtttccactaaaattggtagaaaagtgcgagagttctgtttccctgaccgtgcctcctgtggtgaaattggaaaacggatcctcaacgaacgtgtccctgacactccgccccccactgaatgctacccttgtcattacgttcgagatcacctttcgttctaagaacatcaccattctcgaattgcccgacgaagttgtggttcctccaggtgtgaccaacagtagcttccaggtgacctcccaaaacgtgggtcagctgaccgtatacctgcatggtaatcactctaatcagaccggcccaaggatccgttttctggtgatccggtcttccgcgatttctatcatcaaccaggttatcgggtggatttactttgtggcctggagtatctcattctacccccaagtgataatgaattggcgccggaagtccgtgattggactgagtttcgatttcgttgctttgaatcttaccggtttcgtagcatacagtgtattcaacatcggcctcctatgggtcccatatattaaggagcaatttctgcttaaatatccaaacggcgtgaatccggttaactcgaacgatgtctttttttccctgcacgctgtcgtgcttacgctgattatcattgtacagtgttgcctatacgaacggggtgggcaacgagtgtcctggccagcgatcggatttctggttctggcttggctgttcgcctttgttactatgatcgtggccgccgtgggcgttaccacctggcttcagtttttattttgtttttcctatattaagctagctgtgacattggtgaaatatttccctcaggcctacatgaacttctattacaaaagcacagaggggtggtcaattggaaatgtattgctcgattttactggtgggagctttagtctgctgcagatgtttctccagtcctacaacaatgaccagtggaccctgatctttggtgaccccacaaaatttggcctcggtgtatttagcatcgtgtttgacgttgtctttttcatccaacacttttgtctttataggaagaggcccgggtatgaccagttgaat

SEQ ID NO: 150976 - DNA, 1101 bp, Artificial Sequence
  derived and/or modified sequence
atgatcagaaattggctcaccatttttatcttatttcctctgaagttagtggagaagtgtgagtcatcagtgtctttgacggtgcctccagttgtcaagctggagaacggttcttctacaaacgtatccctcaccctgcgaccccccctcaatgcaaccctagtgatcaccttcgagattacattccgcagtaagaatatcacaatcctcgagctccccgacgaggtggtggtccctcccggagtaacaaactcatcctttcaagtgacctcccagaacgtgggtcagttgaccgtttatttacatggcaaccatagcaaccaaactgggcctagaataaggtttttggtcattaggagcagcgcaatttctattattaatcaggttattgggtggatttacttcgtggcttggtcaatttctttttatccccaagttattatgaactggcggagaaagtctgtgatcggactgtcatttgacttcgtcgcgctaaacctgactggattcgtcgcatactcagtgtttaacattgggttgctgtgggtaccctacattaaggagcagtttctcctgaaataccccaacggagtcaatccagtgaattcaaatgatgtgttcttcagtctgcacgcggtagttcttacacttatcattattgtccagtgctgcttgtatgagcgcgggggccaaagggtgagctggccagcgatcggctttcttgtacttgcctggctgtttgccttcgttacaatgattgtcgcggctgtcggggtcacaacttggctgcagtttctcttttgtttctcgtacattaagctcgcagtgacgctcgttaagtatttccctcaggcttacatgaacttctattataagagtactgaggggtggagcatcgggaatgtgttgctcgatttcacaggcggatcattctccttgctacagatgttcctgcagtcctacaacaacgaccagtggactcttatttttggcgatccgacaaaattcggactcggcgtgtttagcattgtgttcgacgtggtcttcttcatacagcatttttgcctgtatcggaagcggccgggttacgaccagttaaac

SEQ ID NO: 150977 - DNA, 1101 bp, Artificial Sequence
  derived and/or modified sequence
atgatccgcaattggctcacaatttttatcctgttcccactgaagctggtcgagaaatgcgaatcaagcgtctccttaacagttcccccagtggtgaaactggaaaacgggtccagcacaaatgtgagtttaactctcagacccccactgaatgccacactcgtgataaccttcgaaataaccttccgaagcaagaatattaccattttagaactgcccgacgaggtagtggtacctccaggagtgactaactcctccttccaggtgactagccagaacgttggacagttaaccgtgtacttgcacggaaaccacagtaatcagaccggacctcgcatcaggttcctggttatacgtagcagcgccatcagtatcataaaccaagtcattggctggatatatttcgtggcctggtccataagtttctatccccaggttattatgaactggaggaggaaaagcgtgataggcctcagcttcgattttgtggcactgaacttaaccggctttgtggcctactcagtgtttaatatcggcctactgtgggtgccctacatcaaagagcagtttctgcttaaatacccaaacggcgtgaatcccgtcaatagcaacgatgtgtttttcagcctgcatgcagtggtcctaaccctgattataattgttcagtgttgcctgtacgaacggggcggtcaacgagtatcttggccagccattggctttttggtgcttgcatggctgtttgctttcgtgaccatgattgtggccgccgtgggcgtcacaacctggttacagtttctcttctgtttttcctacattaaactggccgtcactctggtgaagtatttcccacaggcttatatgaatttttattataaaagcacagagggatggagtatcggcaatgtcctgctggatttcactgggggaagtttctccctgctgcagatgtttctgcagagctacaacaacgatcaatggacactgatcttcggagacccaaccaagtttggcctgggggttttcagcatcgtgtttgatgttgttttttttatacagcacttctgcctatacagaaagcgacccggctacgaccagctgaac

SEQ ID NO: 150978 - DNA, 1101 bp, Artificial Sequence
  derived and/or modified sequence
atgatccgaaattggctcacaatattcattctgtttcctctgaagctcgtggagaagtgcgagagttccgtcagtcttaccgtaccaccggtggtgaagcttgagaacgggtcttcaacaaacgtgagtttgacgcttagaccaccgctgaatgcgacactggtgattacatttgagattacatttaggtctaagaacatcacaattcttgaactacctgatgaagtcgtggtgcctcccggtgtgacgaacagcagcttccaggttacctcccagaatgttgggcagcttaccgtatacctgcacgggaatcactcgaatcaaacaggtccaaggattcggttcttagtcatcaggagctctgctatttcaatcataaaccaggtcattggctggatctacttcgttgcctggtcgattagtttctacccccaggttatcatgaattggcgtcggaagtccgtcattggcttgtcgtttgactttgtggcgcttaatctgaccggtttcgttgcatactccgtgttcaatattggcctgctttgggtcccctatattaaggagcagttcctcttgaaataccccaacggcgtcaaccctgtcaactcaaacgatgtattctttagtctacacgccgtggtgctaaccctgatcattattgtccagtgctgcctgtacgagagagggggtcagcgcgtatcctggcctgcaatagggttcttggtgcttgcctggcttttcgcctttgtgaccatgatcgtggcagcagtcggtgtgacaacatggctccagttcctgttttgtttctcttatattaaactggcagtcaccctggtcaagtatttcccacaggcctatatgaatttctactacaaatcaacagaaggttggtccatcggtaatgtccttctagactttacaggggggagctttagtttacttcagatgtttctgcagagctacaataatgatcaatggactctcatcttcggggatcccaccaaattcgggctgggagtattcagcatcgtgtttgatgtagtgttcttcatccagcacttctgtctataccggaaacgcccaggctacgatcagctgaat

SEQ ID NO: 150979 - DNA, 1101 bp, Artificial Sequence
  derived and/or modified sequence
atgatcaggaactggttaacaatattcattctatttcctctgaaactcgtggaaaaatgcgaatcctcagtgtctctcactgtgccacccgtcgtgaaactggaaaatggatccagtacaaacgtatccttgactctccgcccaccactgaatgccactctcgtgattactttcgaaataacattcaggtctaaaaatatcactatcctggagctgccagacgaagtcgtagtcccccctggagtgacaaattcctcctttcaggtcacgtcccagaatgtcggacagttgactgtatacttgcatggaaaccactccaaccagacggggccccggatacgctttctagtgattaggtcctccgccatttctattatcaatcaggtgatagggtggatctacttcgtcgcttggtctatttctttctatccacaggtgatcatgaactggaggcggaaatcggtcattggactcagtttcgatttcgtcgctctcaatctcactgggtttgtggcctatagtgtctttaatattggactattatgggtgccatacatcaaggaacagtttctgctcaaatacccaaatggggtgaacccagttaatagtaatgatgtcttttttagtctccatgctgtagttctcactttaataattatagtccagtgctgtctctatgagcgcgggggacagcgggtttcctggcctgccatagggttcctcgtgctcgcgtggctctttgcctttgtcactatgatcgtggccgctgtgggggtcacaacatggcttcagtttctattctgttttagttatattaaactcgcagtcacgcttgtgaaatattttccccaagcttatatgaacttctattacaaatcaacagaaggatggtcaataggaaatgtcctgctagactttactgggggatcgttctccttgttgcagatgttcttgcagtcctataacaacgatcagtggactctaattttcggagacccaactaaatttgggcttggggtgttttccatcgtgttcgatgtagtgttcttcatacagcatttttgcctatatcgaaaaagacctgggtacgatcaactaaat

SEQ ID NO: 150980 - DNA, 1101 bp, Artificial Sequence
  derived and/or modified sequence
atgatacgaaactggttaactatttttattttattccctctgaaactagtggagaagtgtgagagttccgtcagtttaacagtgccacctgttgttaagctggaaaacggtagttcaaccaacgtgtcactcacccttaggcctcccctgaatgctactctggttattaccttcgaaatcacatttagaagcaagaacattacaattctcgaactgcctgatgaagttgttgtgcctccgggagttaccaactccagcttccaggtcacatcccaaaacgtcggacaactgaccgtgtacctgcatgggaatcacagcaaccagactggtcctagaatcagatttctggttatccgtagctcagccatctcaatcattaaccaagtcatcggatggatctactttgtggcctggagtattagtttctacccccaggtgatcatgaactggcgtcgaaagtcagtgattggcttgtcatttgacttcgtggcccttaaccttaccggctttgtggcatactccgtctttaacatcgggctgctgtgggtcccatacatcaaggagcaattccttctgaaataccccaatggagtcaacccagtcaactccaacgacgtgtttttctctctgcacgcagtggtcctcacactgatcatcattgttcagtgttgtctgtatgagcgcggcggccagagggtaagctggccagcaatcgggtttctcgttctggcttggttattcgctttcgtgacaatgatcgtcgccgcagtcggcgtgaccacctggttgcaatttctgttttgcttcagctacatcaagctcgcagttaccttagttaagtactttccgcaggcgtacatgaatttttactataagtcaaccgaaggatggtccatcggcaatgtgctgcttgacttcacagggggatccttttctctcctccaaatgtttttgcagagttataataacgatcagtggaccctcatctttggggatcccacaaaattcggcttgggagtcttcagtatagtcttcgacgtcgttttctttatccaacacttttgcctttacagaaagagacctggctatgatcaattgaat

SEQ ID NO: 150981 - DNA, 1101 bp, Artificial Sequence
  derived and/or modified sequence
atgatccggaactggctcactatcttcattctgttccccctaaagcttgtcgagaaatgcgagtcaagcgtcagtttgacagtgcctccagtggtgaagctggaaaatggaagctccaccaatgtgtcactgactttacgtccaccattaaacgccacactggtgatcacttttgagatcaccttccgctccaaaaatatcacaatactagaactgcccgatgaagtagtggtccctcccggcgtgaccaattccagtttccaggttactagtcagaacgtcgggcagctaaccgtgtatttgcacgggaatcatagcaaccagactgggccccgcattcgttttcttgtgatacgctcatccgcgatctcgatcattaaccaagtcattggttggatctatttcgtggcttggtcaatctccttctacccacaggtcatcatgaattggagaagaaaatccgtcatagggcttagctttgatttcgttgccctgaacctgacgggcttcgttgcctattctgtgtttaatataggactactgtgggtaccttacatcaaggaacagttcctgctgaaataccccaacggcgtgaatcctgtgaactctaatgacgtgttcttcagcttgcacgcagttgtgctcactctcattattatcgtgcagtgttgtttgtacgagagaggaggtcaacgtgtttcgtggcccgcaattggcttcctggtgctcgcttggctgtttgcttttgtgactatgatagtggcggcggtaggggtcaccacctggctgcagtttttgttctgtttctcatatataaagcttgccgtgacgctggtgaagtactttccccaagcgtacatgaacttttattataagtccaccgagggttggtcgattggcaacgtcctgcttgattttactggcggatcattttcccttttacagatgttcttgcaaagctacaacaatgaccagtggactctgatcttcggcgaccccaccaaattcggcctgggcgtgtttagcatcgttttcgatgtggtcttctttattcaacacttttgcctgtacaggaagcggcctggctatgaccaactcaac

SEQ ID NO: 150982 - DNA, 1101 bp, Artificial Sequence
  derived and/or modified sequence
atgattagaaactggttaaccatatttatcttattccctctcaagctggtcgagaagtgtgagagcagtgtgagtctgacagtgccccccgtggtgaaactcgaaaatggtagcagtaccaacgtctctctgaccctgcgtccaccgctcaatgccacactggtcattacctttgaaattaccttccgaagcaagaacatcacaattcttgagttaccagacgaggtagtggtacctcccggcgtgacaaacagcagcttccaggtgacctcccagaatgtcggccagctcactgtttaccttcatggaaatcactctaatcagaccggccccagaatccggttcctggttatccggtccagcgccattagcattataaatcaggttataggatggatttacttcgtcgcatggtcgattagtttttatccacaagttataatgaattggcgacggaaaagcgtgatcggactttcttttgatttcgtagccttgaacctgacaggcttcgtggcctattcagtcttcaatatcggtcttctctgggttccatacatcaaagagcagtttttgctcaagtacccaaatggcgtgaatcctgtcaactctaacgacgtgttcttttctttgcacgctgtggttctgactcttattattatcgtgcagtgttgcctgtatgagagggggggacagagagtatcgtggcccgctattgggttcctcgtactggcctggctgtttgcgtttgtgaccatgattgtggccgccgttggggtcaccacatggcttcagtttctgttttgtttcagctacattaaactcgccgtgacgctcgtaaagtattttccccaggcatacatgaatttctattataaaagcacagagggctggtccatcgggaatgtgctcctcgactttacaggcgggtccttctcccttctgcagatgttccttcaatcctataacaatgatcagtggactctaatctttggggacccaaccaagttcggcctgggagtctttagtatcgtgtttgatgttgtgtttttcatccagcatttttgcctgtaccgtaagcgccctgggtatgaccaactgaat

SEQ ID NO: 150983 - DNA, 1101 bp, Artificial Sequence
  derived and/or modified sequence
atgatccgcaactggctgaccatcttcatcctgttccccctgaagctggtggagaagtgcgagagcagcgtgagcctgaccgtgccccccgtggtgaagctggagaacggcagcagcaccaacgtgagcctgaccctgcgcccccccctgaacgccaccctggtgatcaccttcgagatcaccttccgcagcaagaacatcaccatcctggagctgcccgacgaggtggtggtgccccccggcgtgaccaacagcagcttccaggtgaccagccagaacgtgggccagctgaccgtgtacctgcacggcaaccacagcaaccagaccggcccccgcatccgcttcctggtgatccgcagcagcgccatcagcatcatcaaccaggtgatcggctggatctacttcgtggcctggagcatcagcttctacccccaggtgatcatgaactggcgccgcaagagcgtgatcggcctgagcttcgacttcgtggccctgaacctgaccggcttcgtggcctacagcgtgttcaacatcggcctgctgtgggtgccctacatcaaggagcagttcctgctgaagtaccccaacggcgtgaaccccgtgaacagcaacgacgtgttcttcagcctgcacgccgtggtgctgaccctgatcatcatcgtgcagtgctgcctgtacgagcgcggcggccagcgcgtgagctggcccgccatcggcttcctggtgctggcctggctgttcgccttcgtgaccatgatcgtggccgccgtgggcgtgaccacctggctgcagttcctgttctgcttcagctacatcaagctggccgtgaccctggtgaagtacttcccccaggcctacatgaacttctactacaagagcaccgagggctggagcatcggcaacgtgctgctggacttcaccggcggcagcttcagcctgctgcagatgttcctgcagagctacaacaacgaccagtggaccctgatcttcggcgaccccaccaagttcggcctgggcgtgttcagcatcgtgttcgacgtggtgttcttcatccagcacttctgcctgtaccgcaagcgccccggctacgaccagctgaac

SEQ ID NO: 150984 - DNA, 660 bp, Artificial Sequence
  derived and/or modified sequence
atgaactggcgccgcaagagcgtgatcggcctgagcttcgacttcgtggccctgaacctgaccggcttcgtggcctacagcgtgttcaacatcggcctgctgtgggtgccctacatcaaggagcagttcctgctgaagtaccccaacggcgtgaaccccgtgaacagcaacgacgtgttcttcagcctgcacgccgtggtgctgaccctgatcatcatcgtgcagtgctgcctgtacgagcgcggcggccagcgcgtgagctggcccgccatcggcttcctggtgctggcctggctgttcgccttcgtgaccatgatcgtggccgccgtgggcgtgaccacctggctgcagttcctgttctgcttcagctacatcaagctggccgtgaccctggtgaagtacttcccccaggcctacatgaacttctactacaagagcaccgagggctggagcatcggcaacgtgctgctggacttcaccggcggcagcttcagcctgctgcagatgttcctgcagagctacaacaacgaccagtggaccctgatcttcggcgaccccaccaagttcggcctgggcgtgttcagcatcgtgttcgacgtggtgttcttcatccagcacttctgcctgtaccgcaagcgccccggctacgaccagctgaac

SEQ ID NO: 150985 - DNA, 225 bp, Artificial Sequence
  derived and/or modified sequence
atgatccgcaactggctgaccatcttcatcctgttccccctgaagctggtggagaagtgcgagagcagcgtgagcctgaccgtgccccccgtggtgaagctggagaacggcagcagcaccaacgtgagcctgaccctgcgcccccccctgaacgccaccctggtgatcaccttcgagatcaccttccgcagcaagaacatcaccatcctggagctgcccgacgag

SEQ ID NO: 150986 - DNA, 1104 bp, Artificial Sequence
  derived and/or modified sequence
atgatcagaaactggctgaccatcttcatcctgttccccctgaagctggtggagaagtgcgagagcagcgtgagcctgaccgtgccccccgtggtgaagctggagaacggcagcagcaccaacgtgagcctgaccctgagaccccccctgaacgccaccctggtgatcaccttcgagatcaccttcagaagcaagaacatcaccatcctggagctgcccgacgaggtggtggtgccccccggcgtgaccaacagcagcttccaggtgaccagccagaacgtgggccagctgaccgtgtacctgcacggcaaccacagcaaccagaccggccccagaatcagattcctggtgatcagaagcagcgccatcagcatcatcaaccaggtgatcggctggatctacttcgtggcctggagcatcagcttctacccccaggtgatcatgaactggagaagaaagagcgtgatcggcctgagcttcgacttcgtggccctgaacctgaccggcttcgtggcctacagcgtgttcaacatcggcctgctgtgggtgccctacatcaaggagcagttcctgctgaagtaccccaacggcgtgaaccccgtgaacagcaacgacgtgttcttcagcctgcacgccgtggtgctgaccctgatcatcatcgtgcagtgctgcctgtacgagagaggcggccagagagtgagctggcccgccatcggcttcctggtgctggcctggctgttcgccttcgtgaccatgatcgtggccgccgtgggcgtgaccacctggctgcagttcctgttctgcttcagctacatcaagctggccgtgaccctggtgaagtacttcccccaggcctacatgaacttctactacaagagcaccgagggctggagcatcggcaacgtgctgctggacttcaccggcggcagcttcagcctgctgcagatgttcctgcagagctacaacaacgaccagtggaccctgatcttcggcgaccccaccaagttcggcctgggcgtgttcagcatcgtgttcgacgtggtgttcttcatccagcacttctgcctgtacagaaagagacccggctacgaccagctgaactag

SEQ ID NO: 150987 - DNA, 663 bp, Artificial Sequence
  derived and/or modified sequence
atgaactggagaagaaagagcgtgatcggcctgagcttcgacttcgtggccctgaacctgaccggcttcgtggcctacagcgtgttcaacatcggcctgctgtgggtgccctacatcaaggagcagttcctgctgaagtaccccaacggcgtgaaccccgtgaacagcaacgacgtgttcttcagcctgcacgccgtggtgctgaccctgatcatcatcgtgcagtgctgcctgtacgagagaggcggccagagagtgagctggcccgccatcggcttcctggtgctggcctggctgttcgccttcgtgaccatgatcgtggccgccgtgggcgtgaccacctggctgcagttcctgttctgcttcagctacatcaagctggccgtgaccctggtgaagtacttcccccaggcctacatgaacttctactacaagagcaccgagggctggagcatcggcaacgtgctgctggacttcaccggcggcagcttcagcctgctgcagatgttcctgcagagctacaacaacgaccagtggaccctgatcttcggcgaccccaccaagttcggcctgggcgtgttcagcatcgtgttcgacgtggtgttcttcatccagcacttctgcctgtacagaaagagacccggctacgaccagctgaactag

SEQ ID NO: 150988 - DNA, 228 bp, Artificial Sequence
  derived and/or modified sequence
atgatcagaaactggctgaccatcttcatcctgttccccctgaagctggtggagaagtgcgagagcagcgtgagcctgaccgtgccccccgtggtgaagctggagaacggcagcagcaccaacgtgagcctgaccctgagaccccccctgaacgccaccctggtgatcaccttcgagatcaccttcagaagcaagaacatcaccatcctggagctgcccgacgagtag

SEQ ID NO: 150989 - DNA, 1104 bp, Artificial Sequence
  derived and/or modified sequence
atgattagaaattggttgacaatattcatcttattcccgctcaagttagtggaaaagtgtgaaagttctgtgtccttaactgtgcctcctgtggtaaagttagaaaatggctctagcaccaacgtgtctctcactctgcgacctcccttgaatgctacgctggttattacttttgagattaccttcagaagtaaaaacattacaatcctagaattgcccgatgaggttgtagtcccacccggtgtgactaacagcagctttcaggttaccagccagaacgtgggacagctgacggtgtatcttcacggaaatcacagcaaccagacaggcccgaggattcgctttctggttattaggagtagtgccatttcaatcattaaccaagtaatcggatggatctattttgtggcctggtcaatcagcttctaccctcaggtcataatgaattggagacggaagtctgttatcggactctccttcgactttgtcgcgctcaacctcaccgggtttgtggcttactcggttttcaacataggcttgctatgggtgccctacataaaagagcagtttttattaaagtaccccaacggcgtgaaccctgtgaacagtaacgacgtgttcttctcacttcacgccgttgtgcttaccctgatcattattgtccagtgttgcctttatgaaagggggggacaacgcgtgtcatggccagcgattggcttcctcgtgctcgcctggctctttgcctttgtgaccatgatcgtggcagccgtgggagttacgacatggctgcagtttctgttctgcttttcttacattaaactggccgtgaccctggtcaaatatttcccccaggcgtacatgaatttttactataagtcaacagagggatggagtataggcaacgtgctattagactttacgggtggcagcttttctttgctgcagatgttccttcagagctacaataacgaccagtggaccctaatattcggtgatcccaccaaatttggcctgggggtcttctcgatcgtcttcgacgtagtgtttttcattcagcacttctgtctgtataggaaaaggccagggtacgatcaattaaactag

SEQ ID NO: 150990 - DNA, 663 bp, Artificial Sequence
  derived and/or modified sequence
atgaactggaggagaaaatccgtcattgggttgtccttcgattttgtagctttgaatctcactgggtttgtcgcttattcagttttcaatattggtctactatgggtgccttatattaaggaacagtttctgctcaaatatcccaacggggttaatccagtgaactcaaacgacgtcttcttttcgctgcacgcagttgttctcacactgataattatcgtgcaatgttgcctgtatgagcgaggggggcaacgtgttagctggccggcaattggcttcctggttcttgcttggctatttgccttcgtcaccatgattgttgcggcagtgggggtgacgacatggttgcagttcctgttttgcttcagttacataaaactcgctgtaacgcttgtgaaatatttcccacaagcgtatatgaacttctactataagagcactgaaggctggtctattggcaacgtgcttctggattttaccggtggatccttttccctgctgcagatgttcctgcagtcctataataacgaccagtggactttgatctttggtgaccccacaaagtttgggctaggagtgttctccattgtgtttgacgtcgttttcttcatacagcatttttgtctttatcggaaaagaccaggatacgaccaactgaactag

SEQ ID NO: 150991 - DNA, 228 bp, Artificial Sequence
  derived and/or modified sequence
atgatccgaaactggctgaccattttcatactctttcctcttaagctcgtggagaaatgtgagagctctgtgtcacttaccgttccgccagtggtaaaattagaaaatgggtcctccaccaacgtgagcctgaccttacgaccccccctcaacgctaccttagtgatcacatttgagattacattcaggtcaaaaaatatcacaatcttggagctgccagacgaatag

SEQ ID NO: 150992 - DNA, 1104 bp, Artificial Sequence
  derived and/or modified sequence
atgatccggaactggctgaccatcttcatcctcttccccctgaagctggtggagaagtgtgagagctctgtgtccctgactgtgccccctgtggtgaagctggagaatggcagcagcaccaacgtgtccctgaccctgcggccccccctgaatgccaccctggtgatcacctttgagatcaccttccgcagcaagaacatcaccatcctggagctgcctgatgaggtggtggtgcccccaggagtgaccaacagcagcttccaggtgaccagccagaatgtgggccagctgactgtgtacctgcacggcaaccacagcaaccagacaggcccccgcatccgcttcctggtgatccgcagcagcgccatcagcatcatcaaccaggtgattggctggatctactttgtggcctggagcatctccttctacccccaggtgatcatgaactggaggaggaagagcgtcatcggcctgagctttgattttgtggccctgaacctgaccggctttgtggcctacagcgtcttcaacatcggcctgctgtgggtgccctacatcaaggagcagttcctgctgaagtaccccaacggggtgaaccctgtgaacagcaatgatgtgttcttcagcctgcatgctgtggtgctgaccctcatcatcatcgtgcagtgctgcctgtatgaaagaggaggccagagggtgtcctggccagccatcggcttcctggtgctggcctggctgtttgcctttgtgaccatgattgtggccgctgtgggcgtgaccacctggctgcagttcctgttctgcttctcctacatcaagctggccgtgaccctggtgaagtacttcccccaggcctacatgaacttctactacaagagcacagagggctggagcattggaaatgtgctgctggacttcaccggcggcagcttcagcctgctgcagatgttcctgcagagctacaacaatgaccagtggaccctcatctttggagaccccaccaagtttggcctgggcgtcttcagcatcgtgtttgatgtggtgttcttcatccagcacttctgcctgtacaggaagaggcctggctatgaccagctgaactag

SEQ ID NO: 150993 - DNA, 663 bp, Artificial Sequence
  derived and/or modified sequence
atgaactggaggaggaagtctgtgattggcctgagctttgattttgtggccctgaacctgactggatttgtggcctacagcgtcttcaacatcggcctgctgtgggtgccctacatcaaggagcagttcctgctgaagtacccaaatggagtgaaccctgtgaacagcaatgatgtgttcttcagcctgcatgctgtggtgctgaccctcatcatcatcgtgcagtgctgcctgtatgagcggggcggccagagggtgtcctggccagccatcggcttcctggtgctggcctggctgtttgcctttgtgaccatgattgtggccgctgtgggcgtgaccacctggctgcagttcctgttctgcttctcctacatcaagctggccgtgaccctggtgaagtacttcccccaggcctacatgaacttctactacaagagcacagagggctggagcattggaaatgtgctgctggacttcaccggcggcagcttcagcctgctgcagatgttcctgcagagctacaacaatgaccagtggaccctcatctttggagaccccaccaagtttggcctgggcgtcttcagcatcgtgtttgatgtggtgttcttcatccagcacttctgcctgtacaggaagaggcctggctatgaccagctgaactag

SEQ ID NO: 150994 - DNA, 228 bp, Artificial Sequence
  derived and/or modified sequence
atgatccggaactggctgaccatcttcatcctcttccccctgaagctggtggagaagtgtgagagctctgtgtccctgactgtgccccctgtggtgaagctggagaatggcagcagcaccaacgtgtccctgaccctgcggccccccctgaatgccaccctggtgatcacctttgagatcaccttccgcagcaagaacatcaccatcctggagctgcctgatgaatag

SEQ ID NO: 150995 - DNA, 2866 bp, Artificial Sequence
  derived and/or modified sequence
gatttccgcccaatggagggcggtctgagcttcgctcacgaaaggagccgggaggcgctggcggctccaagagtctctgtgtccctggcagcggacctcatcttccctcacgccggagccccgatctctgcgccccggcccgacccagctgcgctctgtccgtctaagacgcgcggaaactacaactcccagagctcatctcgccgagatccggccccacgagtcaggtggcggaggtcaggtgacagcggacccgcctctcccaaagtctagccgggcaggggaacgcggtgcattcctgaccggcacctggcgaggctcatgcgtcccgtgagggcggttcctcgagcctgggggcgctcagattgctttggagacgctgagagaacctttgcgagagcgccggttgacgtgcggagtgcggggctccgggggactgagcagcacgagaccccatcctcccctccgggttttcacactgggcgaagggaggactcctgagctctgcctcttccagtaacattgaggattactgtgttttgtgagagctcgctaggcgccctaagcaacagagttctgagaaatcgagaaacatgataaggaattggctgactatttttatcctttttcccctgaagctcgtagagaaatgtgagtcaagcgtcagcctcactgttcctcctgtcgtaaagctggagaacggcagctcgaccaacgtcagcctcaccctgcggccaccattaaatgcaaccctggtgatcacttttgaaatcacatttcgttccaaaaatattactatccttgagctccccgatgaagttgtggtgcctcctggagtgacaaactcctcttttcaagtgacatctcaaaatgttggacaacttactgtttatctacatggaaatcactccaatcagaccggcccgaggatacgctttcttgtgatccgcagcagcgccattagcatcataaaccaggtgattggctggatctactttgtggcctggtccatctccttctaccctcaggtgatcatgaattggaggcggaaaagtgtcattggtctgagcttcgacttcgtggctctgaacctgacgggcttcgtggcctacagtgtattcaacatcggcctcctctgggtgccctacatcaaggagcagtttctcctcaaataccccaacggagtgaaccccgtgaacagcaacgacgtcttcttcagcctgcacgcggttgtcctcacgctgatcatcatcgtgcagtgctgcctgtatgagcgcggtggccagcgcgtgtcctggcctgccatcggcttcctggtgctcgcgtggctcttcgcatttgtcaccatgatcgtggctgcagtgggagtgaccacgtggctgcagtttctcttctgcttctcctacatcaagctcgcagtcacgctggtcaagtattttccacaggcctacatgaacttttactacaaaagcactgagggctggagcattggcaacgtgctcctggacttcaccgggggcagcttcagcctcctgcagatgttcctccagtcctacaacaacgaccagtggacgctgatcttcggagacccaaccaagtttggactcggggtcttctccatcgtcttcgacgtcgtcttcttcatccagcacttctgtttgtacagaaagagaccggggtatgaccagctgaactagcacccagggacccagtgtacccagcctctggcctcgtgccctgctggggaaggcctcacccagcgaaggccggagaagcggttgggccctggcacacagggctggctcagtgtgcggacagaggagaccactctgctcctggggccagaggccattcaatagcctgccttcgtccgggcccctcctgggcctccccggccaggcacgtggcaccgtcgccttgacaccgccatctcttttctttaaggcttcaggcagcgcgcacaggctctggcagccgtctcaggcaggactgggcaccaagcttgcagccgaaggccttgccccaaactaccagcgtttctgcaagcagcttgaagggctgaccttgcagccgggtgagccaagggcactttgctgccaccgctgcattcccagagatcaagcagcccggtgccgtggccagtgaactcagaggtgctggtggacgggctaggactttggggttaggccatggggctctttctctgaaggccactttcctgacgtactctctgtacataactcagcgtccgtgactgcagtaacagccagccctacccagagtatttctgagccatgaggggcccaccagattggttctgaattggattcatgcccagcgcattagcatagtaactcctttcagattttttggagggacgtttggaagtggcttactctcttctgccctctctcctacctccaccttctcagattagccccatctgagcacatccagctgctccttacccagcatctggagtacaggacatagctctctcctgctaccagtctgtgccttagaggtctgttaggcctgccaaacggcgaccagctcccctggagcgagggcaggccccttccctctctttccccagacacctacttgagactcaccaatttctggcctgttcaggagcctcagataagtatttgtacttgagaccacctcacacaatctgtatgggcccaaccctgatctcaaacctccttccctctgcccaaagctgtccttcctatggcaggaggggtgggggtcccaggacgtgcctcatacatgacttgagcttgtcagtccactgagtttccttctacgagatcaacgcgaggggcctgtatcttgaattaaaacctactcgcttcctttc

SEQ ID NO: 150996 - DNA, 1506 bp, Artificial Sequence
  derived and/or modified sequence
aaagtctagccgggcaggggaacgcggtgcattcctgaccggcacctggcgaggctcatgcgtcccgtgagggcggttcctcgagcctgggggcgctcagattgctttggagacgctgagagaacctttgcgagagcgccggttgacgtgcggagtgcggggctccgggggactgagcagcacgagaccccatcctcccctccgggttttcacactgggcgaagggaggactcctgagctctgcctcttccagtaacattgaggattactgtgttttgtgagagctcgctaggcgccctaagcaacagaggttgtggtgcctcctggagtgacaaactcctcttttcaagtgacatctcaaaatgttggacaacttactgtttatctacatggaaatcactccaatcagaccggcccgaggatacgctttcttgtgatccgcagcagcgccattagcatcataaaccaggtgattggctggatctactttgtggcctggtccatctccttctaccctcaggtgatcatgaattggaggcggaaaagtgtcattggtctgagcttcgacttcgtggctctgaacctgacgggcttcgtggcctacagtgtattcaacatcggcctcctctgggtgccctacatcaaggagcagtttctcctcaaataccccaacggagtgaaccccgtgaacagcaacgacgtcttcttcagcctgcacgcggttgtcctcacgctgatcatcatcgtgcagtgctgcctgtatgagcgcggtggccagcgcgtgtcctggcctgccatcggcttcctggtgctcgcgtggctcttcgcatttgtcaccatgatcgtggctgcagtgggagtgaccacgtggctgcagtttctcttctgcttctcctacatcaagctcgcagtcacgctggtcaagtattttccacaggcctacatgaacttttactacaaaagcactgagggctggagcattggcaacgtgctcctggacttcaccgggggcagcttcagcctcctgcagatgttcctccagtcctacaacaacgaccagtggacgctgatcttcggagacccaaccaagtttggactcggggtcttctccatcgtcttcgacgtcgtcttcttcatccagcacttctgtttgtacagaaagagaccggggtatgaccagctgaactagcacccagggacccagtgtacccagcctctggcctcgtgccctgctggggaaggcctcacccagcgaaggccggagaagcggttgggccctggcacacagggctggctcagtgtgcggacagaggagaccactctgctcctggggccagaggccattcaatagcctgccttcgtccgggcccctcctgggcctccccggccaggcacgtggcaccgtcgccttgacaccgccatctcttttctttaaggcttcaggcagcgcgcacaggctctggcagccgtctcaggcaggactgggcaccaagcttgcagccgaag

SEQ ID NO: 150997 - DNA, 617 bp, Artificial Sequence
  derived and/or modified sequence
ctctcccaaagtctagccgggcaggggaacgcggtgcattcctgaccggcacctggcgaggctcatgcgtcccgtgagggcggttcctcgagcctgggggcgctcaggtgagagcggacgcggcctcccctgtttcccaggcggaccccttgaggcacagcagattgctttggagacgctgagagaacctttgcgagagcgccggttgacgtgcggagtgcggggctccgggggactgagcagcacgagaccccatcctcccctccgggttttcacactgggcgaagggaggactcctgagctctgcctcttccagtaacattgaggattactgtgttttgtgagagctcgctaggcgccctaagcaacagagttctgagaaatcgagaaacatgataaggaattggctgactatttttatcctttttcccctgaagctcgtagagaaatgtgagtcaagcgtcagcctcactgttcctcctgtcgtaaagctggagaacggcagctcgaccaacgtcagcctcaccctgcggccaccattaaatgcaaccctggtgatcacttttgaaatcacatttcgttccaaaaatattactatccttgagctccccgatgaa

SEQ ID NO: 150998 - DNA, 1104 bp, Artificial Sequence
  derived and/or modified sequence
atgatccggaactggctgaccatcttcatcctgttccccctgaagctggtagaaaaatgcgagagctcagtctccctgacagtcccgcccgttgtgaagttggaaaacgggagcagcactaatgtcagccttaccttaaggccccccctgaacgccacactggtcatcacattcgagattacattccgaagcaaaaacataactatccttgaattgccagacgaagtcgtggtgcctccaggggtcacgaattcttcatttcaggttacctctcagaatgttgggcagctgactgtttatttacacggaaatcactctaaccagacagggccacggatcaggttcctggtaatcagaagctctgcaatatccatcattaaccaggtgatcggatggatttattttgtcgcctggtctatctcattttatcctcaggtaattatgaactggaggcgtaagagtgtgatcggactgtcattcgattttgtggcgttaaacctcacgggattcgtcgcatacagcgtgtttaatataggtctgctgtgggttccatatattaaggagcagtttctgctcaagtatcccaatggagtcaaccccgtgaacagcaatgacgtttttttcagtctgcacgcagtggttctcaccctgataatcattgtacagtgctgtctgtacgagcgtgggggacagagagtttcctggcccgccatagggtttctcgtgctggcctggttgttcgccttcgtgaccatgatcgtggctgctgttggagtgacgacgtggctgcaatttttgttctgcttttcctacattaaactggccgtaacgttggtaaaatacttccctcaagcatacatgaacttttactataagtccaccgaaggctggtctataggtaacgttttattagactttacaggaggatcattcagcctccttcagatgtttctgcagtcatacaataacgaccagtggaccctgatttttggagatcctaccaaattcggactgggggtgttcagtatcgtctttgacgtggtgttttttatccaacacttctgcctgtacagaaagagacctggttacgatcagctgaactag

SEQ ID NO: 150999 - DNA, 663 bp, Artificial Sequence
  derived and/or modified sequence
atgaactggcggcggaagagcgtgatcggcctgagcttcgacttcgttgccttgaaccttacgggcttcgtcgcctactctgtgtttaatattggcctactctgggtgccctatattaaggagcagttcctgctgaaataccctaatggcgtgaacccagtcaactccaacgacgtgttcttttctctccacgccgtcgtgctgactctcatcatcattgtccagtgttgtctttatgagaggggaggtcaacgtgtaagctggccggctatcggattcctcgttctggcttggctttttgcctttgtgaccatgattgtggctgccgtcggggtgacaacatggctgcagttcctgttctgctttagttatattaagctggcagttacattagtgaaatattttccccaggcatatatgaacttctactataaaagtactgagggatggagtatcggcaacgtgctactcgacttcactggtgggtcattttcacttttacagatgtttttgcaatcctataacaatgaccagtggactctcattttcggagatcctaccaagttcggtctaggagtgttcagtattgtgttcgatgttgtgttcttcattcagcatttctgtctgtacagaaaacggccaggttatgaccagctgaactag

SEQ ID NO: 151000 - DNA, 228 bp, Artificial Sequence
  derived and/or modified sequence
atgatccggaactggctgaccatcttcatcctgttccccctgaagcttgttgagaagtgcgagtcatccgttagcctaacagtgcctcctgtggtcaagctcgagaatggcagttccacgaacgtgtcgctgactctcaggccccctttaaacgctacccttgtgattacgtttgagataacatttcggtccaagaatattacaatcctcgaactacccgacgagtag

SEQ ID NO: 151001 - DNA, 1104 bp, Artificial Sequence
  derived and/or modified sequence
atgatcagaaattggctgacaatcttcatccttttcccattaaagctggtggaaaagtgcgagtcttctgtgtcactcacagtcccaccggtagtaaagctggaaaatggatctagcactaacgtaagcttaaccttgcggcctcccctcaatgctaccttggttatcacattcgagattaccttcagatctaagaacataacgatcctggagttgcccgacgaagtcgtggttcccccaggggtgaccaattcatcattccaggtaacttcccagaacgtggggcaactgacggtctatctccacggcaaccatagcaatcagaccgggccacgaattcgcttcctggtcatccggtctagcgcgatctccattatcaaccaggtgatcggctggatctactttgtggcatggagcatctctttttaccctcaggtcatcatgaattggcggcgaaaaagtgtgattgggctttcgttcgacttcgtggccctgaacctgaccggctttgtggcctattccgtattcaacatcggtctgttatgggttccttacataaaagagcaattccttctgaaatatcctaacggggtgaaccccgtcaacagtaatgacgttttcttttcacttcacgcagtcgtgttaacactgattataattgtacagtgttgtctgtacgagagaggcggtcagcgagtgtcttggccagccatcggttttctggtcttggcgtggctgtttgcattcgtgacaatgatcgtggcagccgtgggggtcacaacttggcttcaatttttgttttgcttctcttacatcaaactggcagtaacactggtcaaatacttcccacaggcttatatgaatttttactacaaatcgaccgagggatggtctataggcaacgtcctcttggatttcactggaggaagcttttcacttctgcagatgtttctgcagtcctacaacaacgaccagtggacgcttatattcggcgaccccaccaaattcgggctgggagtgttttcaattgtatttgacgtggttttctttatccaacacttttgcctgtatcggaagcgccctgggtacgaccagcttaactag

SEQ ID NO: 151002 - DNA, 663 bp, Artificial Sequence
  derived and/or modified sequence
atgaactggcgtaggaagtcagttattgggctcagctttgatttcgtcgccctcaatcttactggctttgtggcctattcggtgttcaatatcggcctgctatgggtgccttacattaaggagcagttcctgttgaaataccctaatggagtaaatccagtgaactctaacgatgttttcttcagcctgcatgcagtggtcctgacactgattattatcgtccagtgctgtctttatgaaagggggggacaacgggtttcctggccagcaatcggcttcttggtcctagcctggcttttcgcgttcgttaccatgatagttgctgcagtcggggtgacgacctggctgcagttcctgttctgtttctcatatattaagctggccgtgactctggtgaagtactttccccaggcctacatgaacttttactataagagtactgagggctggagcatcgggaatgtcctgctcgactttaccggaggatccttcagcttacttcaaatgtttttacagtcttacaataatgaccagtggacactcatttttggagaccccaccaaattcggactgggcgtgttttccatcgtttttgacgtcgtcttctttatccagcatttttgtctgtaccggaagcggcctggatatgaccagcttaattag

SEQ ID NO: 151003 - DNA, 228 bp, Artificial Sequence
  derived and/or modified sequence
atgattcgaaattggttgacaatcttcatcctgtttcccctgaaattggtcgaaaagtgtgaatcctctgtatcccttaccgttcccccagttgtgaaactcgaaaatggcagtagcaccaacgtcagtcttactctgcggcctcccctgaatgccaccctggtgatcacattcgaaattaccttccgaagcaagaatatcacaatcctagaattgcctgacgagtag

SEQ ID NO: 151004 - DNA, 1104 bp, Artificial Sequence
  derived and/or modified sequence
atgataagaaattggctcacaatcttcattttgtttcctctcaagctagttgaaaaatgcgagagctctgtgtctcttacggtgcctcctgttgtaaagttggagaacggatcatcgaccaatgttagccttacactcagacctccactgaacgctacgctggtgattacatttgaaattacctttagatctaagaatattacaatcctcgagctccccgacgaggttgtcgtgccaccaggcgtgactaattcatcctttcaggttacgtcccaaaatgtcggtcagttgactgtgtacttgcatggtaatcattctaatcaaactgggcctagaataagatttctcgtcattagatccagcgccatatctatcattaaccaggtaataggctggatttattttgttgcttggagcataagtttctacccgcaagtaattatgaactggcgccgaaagtctgttattggcctctcctttgatttcgtagcactgaacctgactggattcgtggcatatagtgtgtttaacataggactgttgtgggtgccttatatcaaggagcagtttctcctaaaataccccaatggcgttaaccccgtgaacagtaatgacgtttttttttcactgcatgccgttgtgcttacgctgataatcattgtccagtgttgtctctacgagagagggggacagcgggtctcgtggcccgctataggcttcctagtgcttgcctggctgttcgctttcgtgaccatgatcgtggctgccgttggggtgacaacatggctgcagttccttttttgtttctcttatatcaagctggcagtcactttggtaaagtatttcccacaggcctatatgaacttttattacaaatcaaccgaaggttggagcattggaaacgtgctgctcgatttcacagggggaagtttcagtctgcttcaaatgttcttgcagagttacaacaatgaccaatggacattaatttttggggatccgactaagttcggcctgggagttttcagtattgtctttgatgtggtcttctttattcaacacttctgtctttatcggaaacgaccaggatacgatcagctcaactag

SEQ ID NO: 151005 - DNA, 1104 bp, Artificial Sequence
  derived and/or modified sequence
atgataagaaattggctcacaatcttcattttgtttcctctcaagctagttgaaaaatgcgagagctctgtgtctcttacggtgcctcctgttgtaaagttggagaacggatcatcgaccaatgttagccttacactcagacctccactgaacgctacgctggtgattacatttgaaattacctttagatctaagaatattacaatcctcgagctccccgacgaggttgtcgtgccaccaggcgtgactaattcatcctttcaggttacgtcccaaaatgtcggtcagttgactgtgtacttgcatggtaatcattctaatcaaactgggcctagaataagatttctcgtcattagatccagcgccatatctatcattaaccaggtaataggctggatttattttgttgcttggagcataagtttctacccgcaagtaattatgaactggcgccgaaagtctgttattggcctctcctttgatttcgtagcactgaacctgactggattcgtggcatatagtgtgtttaacataggactgttgtgggtgccttatatcaaggagcagtttctcctaaaataccccaatggcgttaaccccgttaattccaacgatgtcttttttagcctgcacgcagtagtcctgacactcattatcatagttcaatgttgcttatatgagaggggaggtcaaagagtaagctggcccgcaattggatttctagtcctggcttggctgtttgcgttcgtgaccatgattgttgccgctgttggtgtgacaacctggcttcagtttttgttctgttttagctatattaaactggccgtaactttagtgaagtattttccacaggcttacatgaatttctactacaagtcaaccgagggatggagcataggtaacgtattattggacttcactggcggctctttttctttgctccaaatgttcctccagagctacaacaacgatcagtggacgctcattttcggcgacccaacaaaattcgggctaggcgtattctcaattgtcttcgacgttgtgttcttcattcagcacttctgtctctacaggaaaaggcctgggtatgatcaacttaattag

SEQ ID NO: 151006 - RNA, 1104 nt, Artificial Sequence
  derived and/or modified sequence
augauaagaaauuggcucacaaucuucauuuuguuuccucucaagcuaguugaaaaaugcgagagcucugugucucuuacggugccuccuguuguaaaguuggagaacggaucaucgaccaauguuagccuuacacucagaccuccacugaacgcuacgcuggugauuacauuugaaauuaccuuuagaucuaagaauauuacaauccucgagcuccccgacgagguugucgugccaccaggcgugacuaauucauccuuucagguuacgucccaaaaugucggucaguugacuguguacuugcaugguaaucauucuaaucaaacugggccuagaauaagauuucucgucauuagauccagcgccauaucuaucauuaaccagguaauaggcuggauuuauuuuguugcuuggagcauaaguuucuacccgcaaguaauuaugaacuggcgccgaaagucuguuauuggccucuccuuugauuucguagcacugaaccugacuggauucguggcauauaguguguuuaacauaggacuguugugggugccuuauaucaaggagcaguuucuccuaaaauaccccaauggcguuaaccccgugaacaguaaugacguuuuuuuuucacugcaugccguugugcuuacgcugauaaucauuguccaguguugucucuacgagagagggggacagcgggucucguggcccgcuauaggcuuccuagugcuugccuggcuguucgcuuucgugaccaugaucguggcugccguuggggugacaacauggcugcaguuccuuuuuuguuucucuuauaucaagcuggcagucacuuugguaaaguauuucccacaggccuauaugaacuuuuauuacaaaucaaccgaagguuggagcauuggaaacgugcugcucgauuucacagggggaaguuucagucugcuucaaauguucuugcagaguuacaacaaugaccaauggacauuaauuuuuggggauccgacuaaguucggccugggaguuuucaguauugucuuugauguggucuucuuuauucaacacuucugucuuuaucggaaacgaccaggauacgaucagcucaacuag

SEQ ID NO: 151007 - RNA, 1104 nt, Artificial Sequence
  derived and/or modified sequence
augauaagaaauuggcucacaaucuucauuuuguuuccucucaagcuaguugaaaaaugcgagagcucugugucucuuacggugccuccuguuguaaaguuggagaacggaucaucgaccaauguuagccuuacacucagaccuccacugaacgcuacgcuggugauuacauuugaaauuaccuuuagaucuaagaauauuacaauccucgagcuccccgacgagguugucgugccaccaggcgugacuaauucauccuuucagguuacgucccaaaaugucggucaguugacuguguacuugcaugguaaucauucuaaucaaacugggccuagaauaagauuucucgucauuagauccagcgccauaucuaucauuaaccagguaauaggcuggauuuauuuuguugcuuggagcauaaguuucuacccgcaaguaauuaugaacuggcgccgaaagucuguuauuggccucuccuuugauuucguagcacugaaccugacuggauucguggcauauaguguguuuaacauaggacuguugugggugccuuauaucaaggagcaguuucuccuaaaauaccccaauggcguuaaccccguuaauuccaacgaugucuuuuuuagccugcacgcaguaguccugacacucauuaucauaguucaauguugcuuauaugagaggggaggucaaagaguaagcuggcccgcaauuggauuucuaguccuggcuuggcuguuugcguucgugaccaugauuguugccgcuguuggugugacaaccuggcuucaguuuuuguucuguuuuagcuauauuaaacuggccguaacuuuagugaaguauuuuccacaggcuuacaugaauuucuacuacaagucaaccgagggauggagcauagguaacguauuauuggacuucacuggcggcucuuuuucuuugcuccaaauguuccuccagagcuacaacaacgaucaguggacgcucauuuucggcgacccaacaaaauucgggcuaggcguauucucaauugucuucgacguuguguucuucauucagcacuucugucucuacaggaaaaggccuggguaugaucaacuuaauuag

SEQ ID NO: 151008 - protein, 1430 aa, Artificial Sequence
  derived and/or modified sequence
MTVFRQENVDDYYDTGEELGSGQFAVVKKCREKSTGLQYAAKFIKKRRTKSSRRGVSREDIEREVSILKEIQHPNVITLHEVYENKTDVILILELVAGGELFDFLAEKESLTEEEATEFLKQILNGVYYLHSLQIAHFDLKPENIMLLDRNVPKPRIKIIDFGLAHKIDFGNEFKNIFGTPEFVAPEIVNYEPLGLEADMWSIGVITYILLSGASPFLGDTKQETLANVSAVNYEFEDEYFSNTSALAKDFIRRLLVKDPKKRMTIQDSLQHPWIKPKDTQQALSRKASAVNMEKFKKFAARKKWKQSVRLISLCQRLSRSFLSRSNMSVARSDDTLDEEDSFVMKAIIHAINDDNVPGLQHLLGSLSNYDVNQPNKHGTPPLLIAAGCGNIQILQLLIKRGSRIDVQDKGGSNAVYWAARHGHVDTLKFLSENKCPLDVKDKSGEMALHVAARYGHADVAQLLCSFGSNPNIQDKEEETPLHCAAWHGYYSVAKALCEAGCNVNIKNREGETPLLTASARGYHDIVECLAEHGADLNACDKDGHIALHLAVRRCQMEVIKTLLSQGCFVDYQDRHGNTPLHVACKDGNMPIVVALCEANCNLDISNKYGRTPLHLAANNGILDVVRYLCLMGASVEALTTDGKTAEDLARSEQHEHVAGLLARLRKDTHRGLFIQQLRPTQNLQPRIKLKLFGHSGSGKTTLVESLKCGLLRSFFRRRRPRLSSTNSSRFPPSPLASKPTVSVSINNLYPGCENVSVRSRSMMFEPGLTKGMLEVFVAPTHHPHCSADDQSTKAIDIQNAYLNGVGDFSVWEFSGNPVYFCCYDYFAANDPTSIHVVVFSLEEPYEIQLNQVIFWLSFLKSLVPVEEPIAFGGKLKNPLQVVLVATHADIMNVPRPAGGEFGYDKDTSLLKEIRNRFGNDLHISNKLFVLDAGASGSKDMKVLRNHLQEIRSQIVSVCPPMTHLCEKIISTLPSWRKLNGPNQLMSLQQFVYDVQDQLNPLASEEDLRRIAQQLHSTGEINIMQSETVQDVLLLDPRWLCTNVLGKLLSVETPRALHHYRGRYTVEDIQRLVPDSDVEELLQILDAMDICARDLSSGTMVDVPALIKTDNLHRSWADEEDEVMVYGGVRIVPVEHLTPFPCGIFHKVQVNLCRWIHQQSTEGDADIRLWVNGCKLANRGAELLVLLVNHGQGIEVQVRGLETEKIKCCLLLDSVCSTIENVMATTLPGLLTVKHYLSPQQLREHHEPVMIYQPRDFFRAQTLKETSLTNTMGGYKESFSSIMCFGCHDVYSQASLGMDIHASDLNLLTRRKLSRLLDPPDPLGKDWCLLAMNLGLPDLVAKYNTSNGAPKDFLPSPLHALLREWTTYPESTVGTLMSKLRELGRRDAADFLLKASSVFKINLDGNGQEAYASSCNSGTSYNSISSVVSR

SEQ ID NO: 151009 - protein, 1455 aa, Artificial Sequence
  derived and/or modified sequence
MTVFRQENVDDYYDTGEELGSGQFAVVKKCREKSTGLQYAAKFIKKRRTKSSRRGVSREDIEREVSILKEIQHPNVITLHEVYENKTDVILILELVAGGELFDFLAEKESLTEEEATEFLKQILNGVYYLHSLQIAHFDLKPENIMLLDRNVPKPRIKIIDFGLAHKIDFGNEFKNIFGTPEFVAPEIVNYEPLGLEADMWSIGVITYILLSGASPFLGDTKQETLANVSAVNYEFEDEYFSNTSALAKDFIRRLLVKDPKKRMTIQDSLQHPWIKPKDTQQALSRKASAVNMEKFKKFAARKKWKQSVRLISLCQRLSRSFLSRSNMSVARSDDTLDEEDSFVMKAIIHAINDDNVPGLQHLLGSLSNYDVNQPNKHGTPPLLIAAGCGNIQILQLLIKRGSRIDVQDKGGSNAVYWAARHGHVDTLKFLSENKCPLDVKDKSGEMALHVAARYGHADVAQLLCSFGSNPNIQDKEEETPLHCAAWHGYYSVAKALCEAGCNVNIKNREGETPLLTASARGYHDIVECLAEHGADLNACDKDGHIALHLAVRRCQMEVIKTLLSQGCFVDYQDRHGNTPLHVACKDGNMPIVVALCEANCNLDISNKYGRTPLHLAANNGILDVVRYLCLMGASVEALTTDGKTAEDLARSEQHEHVAGLLARLRKDTHRGLFIQQLRPTQNLQPRIKLKLFGHSGSGKTTLVESLKCGLLRSFFRRRRPRLSSTNSSRFPPSPLASKPTVSVSINNLYPGCENVSVRSRSMMFEPGLTKGMLEVFVAPTHHPHCSADDQSTKAIDIQNAYLNGVGDFSVWEFSGNPVYFCCYDYFAANDPTSIHVVVFSLEEPYEIQLNQVIFWLSFLKSLVPVEEPIAFGGKLKNPLQVVLVATHADIMNVPRPAGGEFGYDKDTSLLKEIRNRFGNDLHISNKLFVLDAGASGSKDMKVLRNHLQEIRSQIVSKTLPFTPDILVGVPLWHHQKIGGSPVCPPMTHLCEKIISTLPSWRKLNGPNQLMSLQQFVYDVQDQLNPLASEEDLRRIAQQLHSTGEINIMQSETVQDVLLLDPRWLCTNVLGKLLSVETPRALHHYRGRYTVEDIQRLVPDSDVEELLQILDAMDICARDLSSGTMVDVPALIKTDNLHRSWADEEDEVMVYGGVRIVPVEHLTPFPCGIFHKVQVNLCRWIHQQSTEGDADIRLWVNGCKLANRGAELLVLLVNHGQGIEVQVRGLETEKIKCCLLLDSVCSTIENVMATTLPGLLTVKHYLSPQQLREHHEPVMIYQPRDFFRAQTLKETSLTNTMGGYKESFSSIMCFGCHDVYSQASLGMDIHASDLNLLTRRKLSRLLDPPDPLGKDWCLLAMNLGLPDLVAKYNTSNGAPKDFLPSPLHALLREWTTYPESTVGTLMSKLRELGRRDAADFLLKASSVFKINLDGNGQEAYASSCNSGTSYNSISSVVSR

SEQ ID NO: 151010 - DNA, 4293 bp, Artificial Sequence
  derived and/or modified sequence
atgaccgtgttcagacaggagaacgtggacgactactacgacaccggcgaggagctgggcagcggccagttcgccgtggtgaagaagtgcagagagaagagcaccggcctgcagtacgccgccaagttcatcaagaagagaagaaccaagagcagcagaagaggcgtgagcagagaggacatcgagagagaggtgagcatcctgaaggagatccagcaccccaacgtgatcaccctgcacgaggtgtacgagaacaagaccgacgtgatcctgatcctggagctggtggccggcggcgagctgttcgacttcctggccgagaaggagagcctgaccgaggaggaggccaccgagttcctgaagcagatcctgaacggcgtgtactacctgcacagcctgcagatcgcccacttcgacctgaagcccgagaacatcatgctgctggacagaaacgtgcccaagcccagaatcaagatcatcgacttcggcctggcccacaagatcgacttcggcaacgagttcaagaacatcttcggcacccccgagttcgtggcccccgagatcgtgaactacgagcccctgggcctggaggccgacatgtggagcatcggcgtgatcacctacatcctgctgagcggcgccagccccttcctgggcgacaccaagcaggagaccctggccaacgtgagcgccgtgaactacgagttcgaggacgagtacttcagcaacaccagcgccctggccaaggacttcatcagaagactgctggtgaaggaccccaagaagagaatgaccatccaggacagcctgcagcacccctggatcaagcccaaggacacccagcaggccctgagcagaaaggccagcgccgtgaacatggagaagttcaagaagttcgccgccagaaagaagtggaagcagagcgtgagactgatcagcctgtgccagagactgagcagaagcttcctgagcagaagcaacatgagcgtggccagaagcgacgacaccctggacgaggaggacagcttcgtgatgaaggccatcatccacgccatcaacgacgacaacgtgcccggcctgcagcacctgctgggcagcctgagcaactacgacgtgaaccagcccaacaagcacggcaccccccccctgctgatcgccgccggctgcggcaacatccagatcctgcagctgctgatcaagagaggcagcagaatcgacgtgcaggacaagggcggcagcaacgccgtgtactgggccgccagacacggccacgtggacaccctgaagttcctgagcgagaacaagtgccccctggacgtgaaggacaagagcggcgagatggccctgcacgtggccgccagatacggccacgccgacgtggcccagctgctgtgcagcttcggcagcaaccccaacatccaggacaaggaggaggagacccccctgcactgcgccgcctggcacggctactacagcgtggccaaggccctgtgcgaggccggctgcaacgtgaacatcaagaacagagagggcgagacccccctgctgaccgccagcgccagaggctaccacgacatcgtggagtgcctggccgagcacggcgccgacctgaacgcctgcgacaaggacggccacatcgccctgcacctggccgtgagaagatgccagatggaggtgatcaagaccctgctgagccagggctgcttcgtggactaccaggacagacacggcaacacccccctgcacgtggcctgcaaggacggcaacatgcccatcgtggtggccctgtgcgaggccaactgcaacctggacatcagcaacaagtacggcagaacccccctgcacctggccgccaacaacggcatcctggacgtggtgagatacctgtgcctgatgggcgccagcgtggaggccctgaccaccgacggcaagaccgccgaggacctggccagaagcgagcagcacgagcacgtggccggcctgctggccagactgagaaaggacacccacagaggcctgttcatccagcagctgagacccacccagaacctgcagcccagaatcaagctgaagctgttcggccacagcggcagcggcaagaccaccctggtggagagcctgaagtgcggcctgctgagaagcttcttcagaagaagaagacccagactgagcagcaccaacagcagcagattcccccccagccccctggccagcaagcccaccgtgagcgtgagcatcaacaacctgtaccccggctgcgagaacgtgagcgtgagaagcagaagcatgatgttcgagcccggcctgaccaagggcatgctggaggtgttcgtggcccccacccaccacccccactgcagcgccgacgaccagagcaccaaggccatcgacatccagaacgcctacctgaacggcgtgggcgacttcagcgtgtgggagttcagcggcaaccccgtgtacttctgctgctacgactacttcgccgccaacgaccccaccagcatccacgtggtggtgttcagcctggaggagccctacgagatccagctgaaccaggtgatcttctggctgagcttcctgaagagcctggtgcccgtggaggagcccatcgccttcggcggcaagctgaagaaccccctgcaggtggtgctggtggccacccacgccgacatcatgaacgtgcccagacccgccggcggcgagttcggctacgacaaggacaccagcctgctgaaggagatcagaaacagattcggcaacgacctgcacatcagcaacaagctgttcgtgctggacgccggcgccagcggcagcaaggacatgaaggtgctgagaaaccacctgcaggagatcagaagccagatcgtgagcgtgtgcccccccatgacccacctgtgcgagaagatcatcagcaccctgcccagctggagaaagctgaacggccccaaccagctgatgagcctgcagcagttcgtgtacgacgtgcaggaccagctgaaccccctggccagcgaggaggacctgagaagaatcgcccagcagctgcacagcaccggcgagatcaacatcatgcagagcgagaccgtgcaggacgtgctgctgctggaccccagatggctgtgcaccaacgtgctgggcaagctgctgagcgtggagacccccagagccctgcaccactacagaggcagatacaccgtggaggacatccagagactggtgcccgacagcgacgtggaggagctgctgcagatcctggacgccatggacatctgcgccagagacctgagcagcggcaccatggtggacgtgcccgccctgatcaagaccgacaacctgcacagaagctgggccgacgaggaggacgaggtgatggtgtacggcggcgtgagaatcgtgcccgtggagcacctgacccccttcccctgcggcatcttccacaaggtgcaggtgaacctgtgcagatggatccaccagcagagcaccgagggcgacgccgacatcagactgtgggtgaacggctgcaagctggccaacagaggcgccgagctgctggtgctgctggtgaaccacggccagggcatcgaggtgcaggtgagaggcctggagaccgagaagatcaagtgctgcctgctgctggacagcgtgtgcagcaccatcgagaacgtgatggccaccaccctgcccggcctgctgaccgtgaagcactacctgagcccccagcagctgagagagcaccacgagcccgtgatgatctaccagcccagagacttcttcagagcccagaccctgaaggagaccagcctgaccaacaccatgggcggctacaaggagagcttcagcagcatcatgtgcttcggctgccacgacgtgtacagccaggccagcctgggcatggacatccacgccagcgacctgaacctgctgaccagaagaaagctgagcagactgctggacccccccgaccccctgggcaaggactggtgcctgctggccatgaacctgggcctgcccgacctggtggccaagtacaacaccagcaacggcgcccccaaggacttcctgcccagccccctgcacgccctgctgagagagtggaccacctaccccgagagcaccgtgggcaccctgatgagcaagctgagagagctgggcagaagagacgccgccgacttcctgctgaaggccagcagcgtgttcaagatcaacctggacggcaacggccaggaggcctacgccagcagctgcaacagcggcaccagctacaacagcatcagcagcgtggtgagcagatag

SEQ ID NO: 151011 - DNA, 4368 bp, Artificial Sequence
  derived and/or modified sequence
atgaccgtgttcagacaggagaacgtggacgactactacgacaccggcgaggagctgggcagcggccagttcgccgtggtgaagaagtgcagagagaagagcaccggcctgcagtacgccgccaagttcatcaagaagagaagaaccaagagcagcagaagaggcgtgagcagagaggacatcgagagagaggtgagcatcctgaaggagatccagcaccccaacgtgatcaccctgcacgaggtgtacgagaacaagaccgacgtgatcctgatcctggagctggtggccggcggcgagctgttcgacttcctggccgagaaggagagcctgaccgaggaggaggccaccgagttcctgaagcagatcctgaacggcgtgtactacctgcacagcctgcagatcgcccacttcgacctgaagcccgagaacatcatgctgctggacagaaacgtgcccaagcccagaatcaagatcatcgacttcggcctggcccacaagatcgacttcggcaacgagttcaagaacatcttcggcacccccgagttcgtggcccccgagatcgtgaactacgagcccctgggcctggaggccgacatgtggagcatcggcgtgatcacctacatcctgctgagcggcgccagccccttcctgggcgacaccaagcaggagaccctggccaacgtgagcgccgtgaactacgagttcgaggacgagtacttcagcaacaccagcgccctggccaaggacttcatcagaagactgctggtgaaggaccccaagaagagaatgaccatccaggacagcctgcagcacccctggatcaagcccaaggacacccagcaggccctgagcagaaaggccagcgccgtgaacatggagaagttcaagaagttcgccgccagaaagaagtggaagcagagcgtgagactgatcagcctgtgccagagactgagcagaagcttcctgagcagaagcaacatgagcgtggccagaagcgacgacaccctggacgaggaggacagcttcgtgatgaaggccatcatccacgccatcaacgacgacaacgtgcccggcctgcagcacctgctgggcagcctgagcaactacgacgtgaaccagcccaacaagcacggcaccccccccctgctgatcgccgccggctgcggcaacatccagatcctgcagctgctgatcaagagaggcagcagaatcgacgtgcaggacaagggcggcagcaacgccgtgtactgggccgccagacacggccacgtggacaccctgaagttcctgagcgagaacaagtgccccctggacgtgaaggacaagagcggcgagatggccctgcacgtggccgccagatacggccacgccgacgtggcccagctgctgtgcagcttcggcagcaaccccaacatccaggacaaggaggaggagacccccctgcactgcgccgcctggcacggctactacagcgtggccaaggccctgtgcgaggccggctgcaacgtgaacatcaagaacagagagggcgagacccccctgctgaccgccagcgccagaggctaccacgacatcgtggagtgcctggccgagcacggcgccgacctgaacgcctgcgacaaggacggccacatcgccctgcacctggccgtgagaagatgccagatggaggtgatcaagaccctgctgagccagggctgcttcgtggactaccaggacagacacggcaacacccccctgcacgtggcctgcaaggacggcaacatgcccatcgtggtggccctgtgcgaggccaactgcaacctggacatcagcaacaagtacggcagaacccccctgcacctggccgccaacaacggcatcctggacgtggtgagatacctgtgcctgatgggcgccagcgtggaggccctgaccaccgacggcaagaccgccgaggacctggccagaagcgagcagcacgagcacgtggccggcctgctggccagactgagaaaggacacccacagaggcctgttcatccagcagctgagacccacccagaacctgcagcccagaatcaagctgaagctgttcggccacagcggcagcggcaagaccaccctggtggagagcctgaagtgcggcctgctgagaagcttcttcagaagaagaagacccagactgagcagcaccaacagcagcagattcccccccagccccctggccagcaagcccaccgtgagcgtgagcatcaacaacctgtaccccggctgcgagaacgtgagcgtgagaagcagaagcatgatgttcgagcccggcctgaccaagggcatgctggaggtgttcgtggcccccacccaccacccccactgcagcgccgacgaccagagcaccaaggccatcgacatccagaacgcctacctgaacggcgtgggcgacttcagcgtgtgggagttcagcggcaaccccgtgtacttctgctgctacgactacttcgccgccaacgaccccaccagcatccacgtggtggtgttcagcctggaggagccctacgagatccagctgaaccaggtgatcttctggctgagcttcctgaagagcctggtgcccgtggaggagcccatcgccttcggcggcaagctgaagaaccccctgcaggtggtgctggtggccacccacgccgacatcatgaacgtgcccagacccgccggcggcgagttcggctacgacaaggacaccagcctgctgaaggagatcagaaacagattcggcaacgacctgcacatcagcaacaagctgttcgtgctggacgccggcgccagcggcagcaaggacatgaaggtgctgagaaaccacctgcaggagatcagaagccagatcgtgagcaagaccctgcccttcacccccgacatcctggtgggcgtgcccctgtggcaccaccagaagatcggcggcagccccgtgtgcccccccatgacccacctgtgcgagaagatcatcagcaccctgcccagctggagaaagctgaacggccccaaccagctgatgagcctgcagcagttcgtgtacgacgtgcaggaccagctgaaccccctggccagcgaggaggacctgagaagaatcgcccagcagctgcacagcaccggcgagatcaacatcatgcagagcgagaccgtgcaggacgtgctgctgctggaccccagatggctgtgcaccaacgtgctgggcaagctgctgagcgtggagacccccagagccctgcaccactacagaggcagatacaccgtggaggacatccagagactggtgcccgacagcgacgtggaggagctgctgcagatcctggacgccatggacatctgcgccagagacctgagcagcggcaccatggtggacgtgcccgccctgatcaagaccgacaacctgcacagaagctgggccgacgaggaggacgaggtgatggtgtacggcggcgtgagaatcgtgcccgtggagcacctgacccccttcccctgcggcatcttccacaaggtgcaggtgaacctgtgcagatggatccaccagcagagcaccgagggcgacgccgacatcagactgtgggtgaacggctgcaagctggccaacagaggcgccgagctgctggtgctgctggtgaaccacggccagggcatcgaggtgcaggtgagaggcctggagaccgagaagatcaagtgctgcctgctgctggacagcgtgtgcagcaccatcgagaacgtgatggccaccaccctgcccggcctgctgaccgtgaagcactacctgagcccccagcagctgagagagcaccacgagcccgtgatgatctaccagcccagagacttcttcagagcccagaccctgaaggagaccagcctgaccaacaccatgggcggctacaaggagagcttcagcagcatcatgtgcttcggctgccacgacgtgtacagccaggccagcctgggcatggacatccacgccagcgacctgaacctgctgaccagaagaaagctgagcagactgctggacccccccgaccccctgggcaaggactggtgcctgctggccatgaacctgggcctgcccgacctggtggccaagtacaacaccagcaacggcgcccccaaggacttcctgcccagccccctgcacgccctgctgagagagtggaccacctaccccgagagcaccgtgggcaccctgatgagcaagctgagagagctgggcagaagagacgccgccgacttcctgctgaaggccagcagcgtgttcaagatcaacctggacggcaacggccaggaggcctacgccagcagctgcaacagcggcaccagctacaacagcatcagcagcgtggtgagcagatag

SEQ ID NO: 151012 - DNA, 4095 bp, Artificial Sequence
  derived and/or modified sequence
atgaccgtgttcagacaggagaacgtggacgactactacgacaccggcgaggagctgggcagcggccagttcgccgtggtgaagaagtgcagagagaagagcaccggcctgcagtacgccgccaagttcatcaagaagagaagaaccaagagcagcagaagaggcgtgagcagagaggacatcgagagagaggtgagcatcctgaaggagatccagcaccccaacgtgatcaccctgcacgaggtgtacgagaacaagaccgacgtgatcctgatcctggagctggtggccggcggcgagctgttcgacttcctggccgagaaggagagcctgaccgaggaggaggccaccgagttcctgaagcagatcctgaacggcgtgtactacctgcacagcctgcagatcgcccacttcgacctgaagcccgagaacatcatgctgctggacagaaacgtgcccaagcccagaatcaagatcatcgacttcggcctggcccacaagatcgacttcggcaacgagttcaagaacatcttcggcacccccgagttcgtggcccccgagatcgtgaactacgagcccctgggcctggaggccgacatgtggagcatcggcgtgatcacctacatcctgctgagcggcgccagccccttcctgggcgacaccaagcaggagaccctggccaacgtgagcgccgtgaactacgagttcgaggacgagtacttcagcaacaccagcgccctggccaaggacttcatcagaagactgctggtgaaggaccccaagaagagaatgaccatccaggacagcctgcagcacccctggatcaagcccaaggacacccagcaggccctgagcagaaaggccagcgccgtgaacatggagaagttcaagaagttcgccgccagaaagaagtggaagcagagcgtgagactgatcagcctgtgccagagactgagcagaagcttcctgagcagaagcaacatgagcgtggccagaagcgacgacaccctggacgaggaggacagcttcgtgatgaaggccatcatccacgccatcaacgacgacaacgtgcccggcctgcagcacctgctgggcagcctgagcaactacgacgtgaaccagcccaacaagcacggcaccccccccctgctgatcgccgccggctgcggcaacatccagatcctgcagctgctgatcaagagaggcagcagaatcgacgtgcaggacaagggcggcagcaacgccgtgtactgggccgccagacacggccacgtggacaccctgaagttcctgagcgagaacaagtgccccctggacgtgaaggacaagagcggcgagatggccctgcacgtggccgccagatacggccacgccgacgtggcccagctgctgtgcagcttcggcagcaaccccaacatccaggacaaggaggaggagacccccctgcactgcgccgcctggcacggctactacagcgtggccaaggccctgtgcgaggccggctgcaacgtgaacatcaagaacagagagggcgagacccccctgctgaccgccagcgccagaggctaccacgacatcgtggagtgcctggccgagcacggcgccgacctgaacgcctgcgacaaggacggccacatcgccctgcacctggccgtgagaagatgccagatggaggtgatcaagaccctgctgagccagggctgcttcgtggactaccaggacagacacggcaacacccccctgcacgtggcctgcaaggacggcaacatgcccatcgtggtggccctgtgcgaggccaactgcaacctggacatcagcaacaagtacggcagaacccccctgcacctggccgccaacaacggcatcctggacgtggtgagatacctgtgcctgatgggcgccagcgtggaggccctgaccaccgacggcaagaccgccgaggacctggccagaagcgagcagcacgagcacgtggccggcctgctggccagactgagaaaggacacccacagaggcctgttcatccagcagctgagacccacccagaacctgcagcccagaatcaagctgaagctgttcggccacagcggcagcggcaagaccaccctggtggagagcctgaagtgcggcctgctgagaagcttcttcagaagaagaagacccagactgagcagcaccaacagcagcagattcccccccagccccctggccagcaagcccaccgtgagcgtgagcatcaacaacctgtaccccggctgcgagaacgtgagcgtgagaagcagaagcatgatgttcgagcccggcctgaccaagggcatgctggaggtgttcgtggcccccacccaccacccccactgcagcgccgacgaccagagcaccaaggccatcgacatccagaacgcctacctgaacgccttcggcggcaagctgaagaaccccctgcaggtggtgctggtggccacccacgccgacatcatgaacgtgcccagacccgccggcggcgagttcggctacgacaaggacaccagcctgctgaaggagatcagaaacagattcggcaacgacctgcacatcagcaacaagctgttcgtgctggacgccggcgccagcggcagcaaggacatgaaggtgctgagaaaccacctgcaggagatcagaagccagatcgtgagcgtgtgcccccccatgacccacctgtgcgagaagatcatcagcaccctgcccagctggagaaagctgaacggccccaaccagctgatgagcctgcagcagttcgtgtacgacgtgcaggaccagctgaaccccctggccagcgaggaggacctgagaagaatcgcccagcagctgcacagcaccggcgagatcaacatcatgcagagcgagaccgtgcaggacgtgctgctgctggaccccagatggctgtgcaccaacgtgctgggcaagctgctgagcgtggagacccccagagccctgcaccactacagaggcagatacaccgtggaggacatccagagactggtgcccgacagcgacgtggaggagctgctgcagatcctggacgccatggacatctgcgccagagacctgagcagcggcaccatggtggacgtgcccgccctgatcaagaccgacaacctgcacagaagctgggccgacgaggaggacgaggtgatggtgtacggcggcgtgagaatcgtgcccgtggagcacctgacccccttcccctgcggcatcttccacaaggtgcaggtgaacctgtgcagatggatccaccagcagagcaccgagggcgacgccgacatcagactgtgggtgaacggctgcaagctggccaacagaggcgccgagctgctggtgctgctggtgaaccacggccagggcatcgaggtgcaggtgagaggcctggagaccgagaagatcaagtgctgcctgctgctggacagcgtgtgcagcaccatcgagaacgtgatggccaccaccctgcccggcctgctgaccgtgaagcactacctgagcccccagcagctgagagagcaccacgagcccgtgatgatctaccagcccagagacttcttcagagcccagaccctgaaggagaccagcctgaccaacaccatgggcggctacaaggagagcttcagcagcatcatgtgcttcggctgccacgacgtgtacagccaggccagcctgggcatggacatccacgccagcgacctgaacctgctgaccagaagaaagctgagcagactgctggacccccccgaccccctgggcaaggactggtgcctgctggccatgaacctgggcctgcccgacctggtggccaagtacaacaccagcaacggcgcccccaaggacttcctgcccagccccctgcacgccctgctgagagagtggaccacctaccccgagagcaccgtgggcaccctgatgagcaagctgagagagctgggcagaagagacgccgccgacttcctgctgaaggccagcagcgtgttcaagatcaacctggacggcaacggccaggaggcctacgccagcagctgcaacagcggcaccagctacaacagcatcagcagcgtggtgagcagatag

SEQ ID NO: 151013 - DNA, 5743 bp, Artificial Sequence
  derived and/or modified sequence
cttcagattgcaaaccttcttgccttcaagcctcggctccaacaccagtccggcagaggaacccagtctaatgaggactggagactgatgcatgagggggctacggaggcgcaggagcggtggtgatggtctgggaagcggagctgaagtgccctgggctttggtgaggcgtgacagtttatcatgaccgtgttcaggcaggaaaacgtggatgattactacgacaccggcgaggaacttggcagtggacagtttgcggttgtgaagaaatgccgtgagaaaagcaccggcctccagtatgccgccaaattcatcaagaaaaggaggactaagtccagccggcggggtgtgagccgcgaggacatcgagcgggaggtcagcatcctgaaggagatccagcaccccaatgtcatcaccctgcacgaggtctatgagaacaagacggacgtcatcctgatcttggaactcgttgcaggtggcgagctgtttgacttcttagctgaaaaggaatctttaactgaagaggaagcaactgaatttctcaaacaaattcttaatggtgtttactacctgcactcccttcaaatcgcccactttgatcttaagcctgagaacataatgcttttggatagaaatgtccccaaacctcggatcaagatcattgactttgggttggcccataaaattgactttggaaatgaatttaaaaacatatttgggactccagagtttgtcgctcctgagatagtcaactatgaacctcttggtcttgaggcagatatgtggagtatcggggtaataacctatatcctcctaagtggggcctccccatttcttggagacactaagcaagaaacgttagcaaatgtatccgctgtcaactacgaatttgaggatgaatacttcagtaataccagtgccctagccaaagatttcataagaagacttctggtcaaggatccaaagaagagaatgacaattcaagatagtttgcagcatccctggatcaagcctaaagatacacaacaggcacttagtagaaaagcatcagcagtaaacatggagaaattcaagaagtttgcagcccggaaaaaatggaaacaatccgttcgcttgatatcactgtgccaaagattatccaggtcattcctgtccagaagtaacatgagtgttgccagaagcgatgatactctggatgaggaagactcctttgtgatgaaagccatcatccatgccatcaacgatgacaatgtcccaggcctgcagcaccttctgggctcattatccaactatgatgttaaccaacccaacaagcacgggacacctccattactcattgctgctggctgtgggaatattcaaatactacagttgctcattaaaagaggctcgagaatcgatgtccaggataagggcgggtccaatgccgtctactgggctgctcggcatggccacgtcgataccttgaaatttctcagtgagaacaaatgccctttggatgtgaaagacaagtctggagagatggccctccacgtggcagctcgctatggccatgctgacgtggctcagttactgtgcagcttcggctcaaatcccaatatccaggacaaggaagaagaaacccccctgcactgtgctgcttggcacggctattactctgtggccaaagccctttgtgaagccggctgtaacgtgaacatcaagaaccgagaaggagagacgcccctcctgacagcctctgccaggggctaccacgacatcgtggagtgtctggccgaacatggagccgaccttaatgcttgcgacaaggacggacacattgcccttcatctggctgtaagacggtgtcagatggaggtaatcaagactctcctcagccaagggtgtttcgtcgattatcaagacaggcacggcaatactcccctccatgtggcatgtaaagatggcaacatgcctatcgtggtggccctctgtgaagcaaactgcaatttggacatctccaacaagtatgggcgaacgcctctgcaccttgcggccaacaacggaatcctagacgtggtccggtatctctgtctgatgggagccagcgttgaggcgctgaccacggacggaaagacggcagaagatcttgctagatcggaacagcacgagcacgtagcaggtctccttgcaagacttcgaaaggatacgcaccgaggactcttcatccagcagctccgacccacacagaacctgcagccaagaattaagctcaagctgtttggccactcgggatccgggaaaaccacccttgtagaatctctcaagtgtgggctgctgaggagctttttcagaaggcgtcggcccagactgtcttccaccaactccagcaggttcccaccttcacccctggcttctaagcccacagtctcagtgagcatcaacaacctgtacccaggctgcgagaacgtgagtgtgaggagccgcagcatgatgttcgagccgggtcttaccaaagggatgctggaggtgtttgtggccccgacccaccacccgcactgctcggccgatgaccagtccaccaaggccatcgacatccagaacgcttatttgaatggagttggcgatttcagcgtgtgggagttctctggaaatcctgtgtatttctgctgttatgactattttgctgcaaatgatcccacgtcaatccatgttgttgtctttagtctagaagagccctatgagatccagctgaaccaagtgattttctggctcagtttcctgaagtcccttgtcccagttgaagaacccatagccttcggtggcaagctgaagaacccactccaagttgtcctggtggccacccacgctgacatcatgaatgttcctcgaccggctggaggcgagtttggatatgacaaagacacatcgttgctgaaagagattaggaacaggtttggaaatgatcttcacatttcaaataagctgtttgttctggatgctggggcttctgggtcaaaggacatgaaggtacttcgaaatcatctgcaagaaatacgaagccagattgtttcggtctgtcctcccatgactcacctgtgtgagaaaatcatctccacgctgccttcctggaggaagctcaatggacccaaccagctgatgtcgctgcagcagtttgtgtacgacgtgcaggaccagctgaaccccctggccagcgaggaggacctcaggcgcattgctcagcagctccacagcacaggcgagatcaacatcatgcaaagtgaaacagttcaggacgtgctgctcctggacccccgctggctctgcacaaacgtcctggggaagttgctgtccgtggagaccccacgggcgctgcaccactaccggggccgctacaccgtggaggacatccagcgcctggtgcccgacagcgacgtggaggagctgctgcagatcctcgatgccatggacatctgcgcccgggacctgagcagcgggaccatggtggacgtcccagccctgatcaagacagacaacctgcaccgctcctgggctgatgaggaggacgaggtgatggtgtatggtggcgtgcgcatcgtgcccgtggaacacctcacccccttcccatgtggcatctttcacaaggtccaggtgaacctgtgccggtggatccaccagcaaagcacagagggcgacgcggacatccgcctgtgggtgaatggctgcaagctggccaaccgtggggccgagctgctggtgctgctggtcaaccacggccagggcattgaggtccaggtccgcggcctggagacggagaagatcaagtgctgcctgctgctggactcggtgtgcagcaccattgagaacgtcatggccaccacgctgccagggctcctgaccgtgaagcattacctgagcccccagcagctgcgggagcaccatgagcccgtcatgatctaccagccacgggacttcttccgggcacagactctgaaggaaacctcactgaccaacaccatgggggggtacaaggaaagcttcagcagcatcatgtgcttcgggtgtcacgacgtctactcacaggccagcctcggcatggacatccatgcatcagacctgaacctcctcactcggaggaaactgagtcgcctgctggacccgcccgaccccctggggaaggactggtgccttctcgccatgaacttaggcctccctgacctcgtggcaaagtacaacaccagtaacggggctcccaaggatttcctccccagccccctccacgccctgctgcgggaatggaccacctaccctgagagcacagtgggcaccctcatgtccaaactgagggagctgggtcgccgggatgccgcagactttttgctgaaggcatcctctgtgttcaaaatcaacctggatggcaatggccaggaggcctatgcctcgagctgcaacagcggcacctcttacaattccattagctctgttgtatcccggtgagggcagcctctggcttgggcagggtctgtttggactgcagaagcaagggggtgatgtagcccatccttccctttggagatgctgagggtgtttcttcctgcacccacagccagggggatgccactcctccctccggcttgacctgtttctctgccgctacctccctccccgtctcattccgttgtctgtggatggtcattgcagtttaagagcagaacagatcttttactttggccgcttgaaaagctagtgtacctcctctcagtgttttggactccatctctcatcctccagtaccttgcttcttactgataattttgctggaattcctaacttttcaatgacattttttttaactactatattgattgtcctttaaaaaagaaaagtgcatatttatccaaaatgtgtatttcttatacgcttttctttgttataccatttcctcagcttatctcttttatatttgtaggagaaactcccatgtatggaatcccactgtatgatttataaacagacaatatgtgagtgccttttgcagaagagggtgtgtttgaaatcatcggagtcagccaggagctgtcaccaaggaaacgctacctctctgtcccttgctgtatgctgatcatcgccagaggtgcttcaccctgagttttgttttgtattgttttctgacagtttttctgttttgtttggcaaggaaaggggagaagggaatcctcctccagggtgattttatgatcagtgttgttgctctaggaagacatttttccgtttgcttttgttccaatgtcaatgtgaacgtccacatgaaacctacacactgtcatgcttcatcattccctctcatctcaggtagaaggttgacacagttgtagggttacagagacctatgtaagaattcagaagacccctgactcatcatttgtggcagtcccttataattggtgcatagcagatggtttccacatttagatcctggtttcataacttcctgtacttgaagtctaaaagcagaaaataaaggaagcaagttttcttccatgattttaaattgtgatcgagttttaaattgataggagggaacatgtcctaattcttctgtcctgagaagcatgtaatgttaatgttatatcatatgtatatatatatatgcactatgtatatacatatatattaatactggtatttttacttaatctataaaatgtcgttaaaaagttgtttgtttttttctttttttataaataaactgttgctcgttgca

SEQ ID NO: 151014 - DNA, 5892 bp, Artificial Sequence
  derived and/or modified sequence
ggaggacagccggaccgagccaacgccggggactttgttccctccgcggaggggactcggcaactcgcagcggcagggtctggggccggcgcctgggagggatctgcgccccccactcactccctagctgtgttcccgccgccgccccggctagtctccggcgctggcgcctatggtcggcctccgacagcgctccggagggaccgggggagctcccaggcgcccgggactggagactgatgcatgagggggctacggaggcgcaggagcggtggtgatggtctgggaagcggagctgaagtgccctgggctttggtgaggcgtgacagtttatcatgaccgtgttcaggcaggaaaacgtggatgattactacgacaccggcgaggaacttggcagtggacagtttgcggttgtgaagaaatgccgtgagaaaagcaccggcctccagtatgccgccaaattcatcaagaaaaggaggactaagtccagccggcggggtgtgagccgcgaggacatcgagcgggaggtcagcatcctgaaggagatccagcaccccaatgtcatcaccctgcacgaggtctatgagaacaagacggacgtcatcctgatcttggaactcgttgcaggtggcgagctgtttgacttcttagctgaaaaggaatctttaactgaagaggaagcaactgaatttctcaaacaaattcttaatggtgtttactacctgcactcccttcaaatcgcccactttgatcttaagcctgagaacataatgcttttggatagaaatgtccccaaacctcggatcaagatcattgactttgggttggcccataaaattgactttggaaatgaatttaaaaacatatttgggactccagagtttgtcgctcctgagatagtcaactatgaacctcttggtcttgaggcagatatgtggagtatcggggtaataacctatatcctcctaagtggggcctccccatttcttggagacactaagcaagaaacgttagcaaatgtatccgctgtcaactacgaatttgaggatgaatacttcagtaataccagtgccctagccaaagatttcataagaagacttctggtcaaggatccaaagaagagaatgacaattcaagatagtttgcagcatccctggatcaagcctaaagatacacaacaggcacttagtagaaaagcatcagcagtaaacatggagaaattcaagaagtttgcagcccggaaaaaatggaaacaatccgttcgcttgatatcactgtgccaaagattatccaggtcattcctgtccagaagtaacatgagtgttgccagaagcgatgatactctggatgaggaagactcctttgtgatgaaagccatcatccatgccatcaacgatgacaatgtcccaggcctgcagcaccttctgggctcattatccaactatgatgttaaccaacccaacaagcacgggacacctccattactcattgctgctggctgtgggaatattcaaatactacagttgctcattaaaagaggctcgagaatcgatgtccaggataagggcgggtccaatgccgtctactgggctgctcggcatggccacgtcgataccttgaaatttctcagtgagaacaaatgccctttggatgtgaaagacaagtctggagagatggccctccacgtggcagctcgctatggccatgctgacgtggctcagttactgtgcagcttcggctcaaatcccaatatccaggacaaggaagaagaaacccccctgcactgtgctgcttggcacggctattactctgtggccaaagccctttgtgaagccggctgtaacgtgaacatcaagaaccgagaaggagagacgcccctcctgacagcctctgccaggggctaccacgacatcgtggagtgtctggccgaacatggagccgaccttaatgcttgcgacaaggacggacacattgcccttcatctggctgtaagacggtgtcagatggaggtaatcaagactctcctcagccaagggtgtttcgtcgattatcaagacaggcacggcaatactcccctccatgtggcatgtaaagatggcaacatgcctatcgtggtggccctctgtgaagcaaactgcaatttggacatctccaacaagtatgggcgaacgcctctgcaccttgcggccaacaacggaatcctagacgtggtccggtatctctgtctgatgggagccagcgttgaggcgctgaccacggacggaaagacggcagaagatcttgctagatcggaacagcacgagcacgtagcaggtctccttgcaagacttcgaaaggatacgcaccgaggactcttcatccagcagctccgacccacacagaacctgcagccaagaattaagctcaagctgtttggccactcgggatccgggaaaaccacccttgtagaatctctcaagtgtgggctgctgaggagctttttcagaaggcgtcggcccagactgtcttccaccaactccagcaggttcccaccttcacccctggcttctaagcccacagtctcagtgagcatcaacaacctgtacccaggctgcgagaacgtgagtgtgaggagccgcagcatgatgttcgagccgggtcttaccaaagggatgctggaggtgtttgtggccccgacccaccacccgcactgctcggccgatgaccagtccaccaaggccatcgacatccagaacgcttatttgaatggagttggcgatttcagcgtgtgggagttctctggaaatcctgtgtatttctgctgttatgactattttgctgcaaatgatcccacgtcaatccatgttgttgtctttagtctagaagagccctatgagatccagctgaaccaagtgattttctggctcagtttcctgaagtcccttgtcccagttgaagaacccatagccttcggtggcaagctgaagaacccactccaagttgtcctggtggccacccacgctgacatcatgaatgttcctcgaccggctggaggcgagtttggatatgacaaagacacatcgttgctgaaagagattaggaacaggtttggaaatgatcttcacatttcaaataagctgtttgttctggatgctggggcttctgggtcaaaggacatgaaggtacttcgaaatcatctgcaagaaatacgaagccagattgtttcggtctgtcctcccatgactcacctgtgtgagaaaatcatctccacgctgccttcctggaggaagctcaatggacccaaccagctgatgtcgctgcagcagtttgtgtacgacgtgcaggaccagctgaaccccctggccagcgaggaggacctcaggcgcattgctcagcagctccacagcacaggcgagatcaacatcatgcaaagtgaaacagttcaggacgtgctgctcctggacccccgctggctctgcacaaacgtcctggggaagttgctgtccgtggagaccccacgggcgctgcaccactaccggggccgctacaccgtggaggacatccagcgcctggtgcccgacagcgacgtggaggagctgctgcagatcctcgatgccatggacatctgcgcccgggacctgagcagcgggaccatggtggacgtcccagccctgatcaagacagacaacctgcaccgctcctgggctgatgaggaggacgaggtgatggtgtatggtggcgtgcgcatcgtgcccgtggaacacctcacccccttcccatgtggcatctttcacaaggtccaggtgaacctgtgccggtggatccaccagcaaagcacagagggcgacgcggacatccgcctgtgggtgaatggctgcaagctggccaaccgtggggccgagctgctggtgctgctggtcaaccacggccagggcattgaggtccaggtccgcggcctggagacggagaagatcaagtgctgcctgctgctggactcggtgtgcagcaccattgagaacgtcatggccaccacgctgccagggctcctgaccgtgaagcattacctgagcccccagcagctgcgggagcaccatgagcccgtcatgatctaccagccacgggacttcttccgggcacagactctgaaggaaacctcactgaccaacaccatgggggggtacaaggaaagcttcagcagcatcatgtgcttcgggtgtcacgacgtctactcacaggccagcctcggcatggacatccatgcatcagacctgaacctcctcactcggaggaaactgagtcgcctgctggacccgcccgaccccctggggaaggactggtgccttctcgccatgaacttaggcctccctgacctcgtggcaaagtacaacaccagtaacggggctcccaaggatttcctccccagccccctccacgccctgctgcgggaatggaccacctaccctgagagcacagtgggcaccctcatgtccaaactgagggagctgggtcgccgggatgccgcagactttttgctgaaggcatcctctgtgttcaaaatcaacctggatggcaatggccaggaggcctatgcctcgagctgcaacagcggcacctcttacaattccattagctctgttgtatcccggtgagggcagcctctggcttgggcagggtctgtttggactgcagaagcaagggggtgatgtagcccatccttccctttggagatgctgagggtgtttcttcctgcacccacagccagggggatgccactcctccctccggcttgacctgtttctctgccgctacctccctccccgtctcattccgttgtctgtggatggtcattgcagtttaagagcagaacagatcttttactttggccgcttgaaaagctagtgtacctcctctcagtgttttggactccatctctcatcctccagtaccttgcttcttactgataattttgctggaattcctaacttttcaatgacattttttttaactactatattgattgtcctttaaaaaagaaaagtgcatatttatccaaaatgtgtatttcttatacgcttttctttgttataccatttcctcagcttatctcttttatatttgtaggagaaactcccatgtatggaatcccactgtatgatttataaacagacaatatgtgagtgccttttgcagaagagggtgtgtttgaaatcatcggagtcagccaggagctgtcaccaaggaaacgctacctctctgtcccttgctgtatgctgatcatcgccagaggtgcttcaccctgagttttgttttgtattgttttctgacagtttttctgttttgtttggcaaggaaaggggagaagggaatcctcctccagggtgattttatgatcagtgttgttgctctaggaagacatttttccgtttgcttttgttccaatgtcaatgtgaacgtccacatgaaacctacacactgtcatgcttcatcattccctctcatctcaggtagaaggttgacacagttgtagggttacagagacctatgtaagaattcagaagacccctgactcatcatttgtggcagtcccttataattggtgcatagcagatggtttccacatttagatcctggtttcataacttcctgtacttgaagtctaaaagcagaaaataaaggaagcaagttttcttccatgattttaaattgtgatcgagttttaaattgataggagggaacatgtcctaattcttctgtcctgagaagcatgtaatgttaatgttatatcatatgtatatatatatatgcactatgtatatacatatatattaatactggtatttttacttaatctataaaatgtcgttaaaaagttgtttgtttttttctttttttataaataaactgttgctcgtt

SEQ ID NO: 151015 - DNA, 6012 bp, Artificial Sequence
  derived and/or modified sequence
aaaaggcggcaaggagccgagaggctgcttcggagtgtgaggaggacagccggaccgagccaacgccggggactttgttccctccgcggaggggactcggcaactcgcagcggcagggtctggggccggcgcctgggagggatctgcgccccccactcactccctagctgtgttcccgccgccgccccggctagtctccggcgctggcgcctatggtcggcctccgacagcgctccggagggaccgggggagctcccaggcgcccgggactggagactgatgcatgagggggctacggaggcgcaggagcggtggtgatggtctgggaagcggagctgaagtgccctgggctttggtgaggcgtgacagtttatcatgaccgtgttcaggcaggaaaacgtggatgattactacgacaccggcgaggaacttggcagtggacagtttgcggttgtgaagaaatgccgtgagaaaagcaccggcctccagtatgccgccaaattcatcaagaaaaggaggactaagtccagccggcggggtgtgagccgcgaggacatcgagcgggaggtcagcatcctgaaggagatccagcaccccaatgtcatcaccctgcacgaggtctatgagaacaagacggacgtcatcctgatcttggaactcgttgcaggtggcgagctgtttgacttcttagctgaaaaggaatctttaactgaagaggaagcaactgaatttctcaaacaaattcttaatggtgtttactacctgcactcccttcaaatcgcccactttgatcttaagcctgagaacataatgcttttggatagaaatgtccccaaacctcggatcaagatcattgactttgggttggcccataaaattgactttggaaatgaatttaaaaacatatttgggactccagagtttgtcgctcctgagatagtcaactatgaacctcttggtcttgaggcagatatgtggagtatcggggtaataacctatatcctcctaagtggggcctccccatttcttggagacactaagcaagaaacgttagcaaatgtatccgctgtcaactacgaatttgaggatgaatacttcagtaataccagtgccctagccaaagatttcataagaagacttctggtcaaggatccaaagaagagaatgacaattcaagatagtttgcagcatccctggatcaagcctaaagatacacaacaggcacttagtagaaaagcatcagcagtaaacatggagaaattcaagaagtttgcagcccggaaaaaatggaaacaatccgttcgcttgatatcactgtgccaaagattatccaggtcattcctgtccagaagtaacatgagtgttgccagaagcgatgatactctggatgaggaagactcctttgtgatgaaagccatcatccatgccatcaacgatgacaatgtcccaggcctgcagcaccttctgggctcattatccaactatgatgttaaccaacccaacaagcacgggacacctccattactcattgctgctggctgtgggaatattcaaatactacagttgctcattaaaagaggctcgagaatcgatgtccaggataagggcgggtccaatgccgtctactgggctgctcggcatggccacgtcgataccttgaaatttctcagtgagaacaaatgccctttggatgtgaaagacaagtctggagagatggccctccacgtggcagctcgctatggccatgctgacgtggctcagttactgtgcagcttcggctcaaatcccaatatccaggacaaggaagaagaaacccccctgcactgtgctgcttggcacggctattactctgtggccaaagccctttgtgaagccggctgtaacgtgaacatcaagaaccgagaaggagagacgcccctcctgacagcctctgccaggggctaccacgacatcgtggagtgtctggccgaacatggagccgaccttaatgcttgcgacaaggacggacacattgcccttcatctggctgtaagacggtgtcagatggaggtaatcaagactctcctcagccaagggtgtttcgtcgattatcaagacaggcacggcaatactcccctccatgtggcatgtaaagatggcaacatgcctatcgtggtggccctctgtgaagcaaactgcaatttggacatctccaacaagtatgggcgaacgcctctgcaccttgcggccaacaacggaatcctagacgtggtccggtatctctgtctgatgggagccagcgttgaggcgctgaccacggacggaaagacggcagaagatcttgctagatcggaacagcacgagcacgtagcaggtctccttgcaagacttcgaaaggatacgcaccgaggactcttcatccagcagctccgacccacacagaacctgcagccaagaattaagctcaagctgtttggccactcgggatccgggaaaaccacccttgtagaatctctcaagtgtgggctgctgaggagctttttcagaaggcgtcggcccagactgtcttccaccaactccagcaggttcccaccttcacccctggcttctaagcccacagtctcagtgagcatcaacaacctgtacccaggctgcgagaacgtgagtgtgaggagccgcagcatgatgttcgagccgggtcttaccaaagggatgctggaggtgtttgtggccccgacccaccacccgcactgctcggccgatgaccagtccaccaaggccatcgacatccagaacgcttatttgaatggagttggcgatttcagcgtgtgggagttctctggaaatcctgtgtatttctgctgttatgactattttgctgcaaatgatcccacgtcaatccatgttgttgtctttagtctagaagagccctatgagatccagctgaaccaagtgattttctggctcagtttcctgaagtcccttgtcccagttgaagaacccatagccttcggtggcaagctgaagaacccactccaagttgtcctggtggccacccacgctgacatcatgaatgttcctcgaccggctggaggcgagtttggatatgacaaagacacatcgttgctgaaagagattaggaacaggtttggaaatgatcttcacatttcaaataagctgtttgttctggatgctggggcttctgggtcaaaggacatgaaggtacttcgaaatcatctgcaagaaatacgaagccagattgtttcgaaaaccctgcccttcacaccagatatcctcgttggggtcccactgtggcatcatcagaagatagggggtagtccggtctgtcctcccatgactcacctgtgtgagaaaatcatctccacgctgccttcctggaggaagctcaatggacccaaccagctgatgtcgctgcagcagtttgtgtacgacgtgcaggaccagctgaaccccctggccagcgaggaggacctcaggcgcattgctcagcagctccacagcacaggcgagatcaacatcatgcaaagtgaaacagttcaggacgtgctgctcctggacccccgctggctctgcacaaacgtcctggggaagttgctgtccgtggagaccccacgggcgctgcaccactaccggggccgctacaccgtggaggacatccagcgcctggtgcccgacagcgacgtggaggagctgctgcagatcctcgatgccatggacatctgcgcccgggacctgagcagcgggaccatggtggacgtcccagccctgatcaagacagacaacctgcaccgctcctgggctgatgaggaggacgaggtgatggtgtatggtggcgtgcgcatcgtgcccgtggaacacctcacccccttcccatgtggcatctttcacaaggtccaggtgaacctgtgccggtggatccaccagcaaagcacagagggcgacgcggacatccgcctgtgggtgaatggctgcaagctggccaaccgtggggccgagctgctggtgctgctggtcaaccacggccagggcattgaggtccaggtccgcggcctggagacggagaagatcaagtgctgcctgctgctggactcggtgtgcagcaccattgagaacgtcatggccaccacgctgccagggctcctgaccgtgaagcattacctgagcccccagcagctgcgggagcaccatgagcccgtcatgatctaccagccacgggacttcttccgggcacagactctgaaggaaacctcactgaccaacaccatgggggggtacaaggaaagcttcagcagcatcatgtgcttcgggtgtcacgacgtctactcacaggccagcctcggcatggacatccatgcatcagacctgaacctcctcactcggaggaaactgagtcgcctgctggacccgcccgaccccctggggaaggactggtgccttctcgccatgaacttaggcctccctgacctcgtggcaaagtacaacaccagtaacggggctcccaaggatttcctccccagccccctccacgccctgctgcgggaatggaccacctaccctgagagcacagtgggcaccctcatgtccaaactgagggagctgggtcgccgggatgccgcagactttttgctgaaggcatcctctgtgttcaaaatcaacctggatggcaatggccaggaggcctatgcctcgagctgcaacagcggcacctcttacaattccattagctctgttgtatcccggtgagggcagcctctggcttgggcagggtctgtttggactgcagaagcaagggggtgatgtagcccatccttccctttggagatgctgagggtgtttcttcctgcacccacagccagggggatgccactcctccctccggcttgacctgtttctctgccgctacctccctccccgtctcattccgttgtctgtggatggtcattgcagtttaagagcagaacagatcttttactttggccgcttgaaaagctagtgtacctcctctcagtgttttggactccatctctcatcctccagtaccttgcttcttactgataattttgctggaattcctaacttttcaatgacattttttttaactactatattgattgtcctttaaaaaagaaaagtgcatatttatccaaaatgtgtatttcttatacgcttttctttgttataccatttcctcagcttatctcttttatatttgtaggagaaactcccatgtatggaatcccactgtatgatttataaacagacaatatgtgagtgccttttgcagaagagggtgtgtttgaaatcatcggagtcagccaggagctgtcaccaaggaaacgctacctctctgtcccttgctgtatgctgatcatcgccagaggtgcttcaccctgagttttgttttgtattgttttctgacagtttttctgttttgtttggcaaggaaaggggagaagggaatcctcctccagggtgattttatgatcagtgttgttgctctaggaagacatttttccgtttgcttttgttccaatgtcaatgtgaacgtccacatgaaacctacacactgtcatgcttcatcattccctctcatctcaggtagaaggttgacacagttgtagggttacagagacctatgtaagaattcagaagacccctgactcatcatttgtggcagtcccttataattggtgcatagcagatggtttccacatttagatcctggtttcataacttcctgtacttgaagtctaaaagcagaaaataaaggaagcaagttttcttccatgattttaaattgtgatcgagttttaaattgataggagggaacatgtcctaattcttctgtcctgagaagcatgtaatgttaatgttatatcatatgtatatatatatatgcactatgtatatacatatatattaatactggtatttttacttaatctataaaatgtcgttaaaaagttgtttgtttttttctttttttataaataaactgttgctcgttgcatt

SEQ ID NO: 151016 - DNA, 5759 bp, Artificial Sequence
  derived and/or modified sequence
agagcgcgccagcgagcccggagcgcggagctgggaggagcagcgagcgccgcgcagaacccgcagcgccggcctggcagggcagctcggaggactggagactgatgcatgagggggctacggaggcgcaggagcggtggtgatggtctgggaagcggagctgaagtgccctgggctttggtgaggcgtgacagtttatcatgaccgtgttcaggcaggaaaacgtggatgattactacgacaccggcgaggaacttggcagtggacagtttgcggttgtgaagaaatgccgtgagaaaagcaccggcctccagtatgccgccaaattcatcaagaaaaggaggactaagtccagccggcggggtgtgagccgcgaggacatcgagcgggaggtcagcatcctgaaggagatccagcaccccaatgtcatcaccctgcacgaggtctatgagaacaagacggacgtcatcctgatcttggaactcgttgcaggtggcgagctgtttgacttcttagctgaaaaggaatctttaactgaagaggaagcaactgaatttctcaaacaaattcttaatggtgtttactacctgcactcccttcaaatcgcccactttgatcttaagcctgagaacataatgcttttggatagaaatgtccccaaacctcggatcaagatcattgactttgggttggcccataaaattgactttggaaatgaatttaaaaacatatttgggactccagagtttgtcgctcctgagatagtcaactatgaacctcttggtcttgaggcagatatgtggagtatcggggtaataacctatatcctcctaagtggggcctccccatttcttggagacactaagcaagaaacgttagcaaatgtatccgctgtcaactacgaatttgaggatgaatacttcagtaataccagtgccctagccaaagatttcataagaagacttctggtcaaggatccaaagaagagaatgacaattcaagatagtttgcagcatccctggatcaagcctaaagatacacaacaggcacttagtagaaaagcatcagcagtaaacatggagaaattcaagaagtttgcagcccggaaaaaatggaaacaatccgttcgcttgatatcactgtgccaaagattatccaggtcattcctgtccagaagtaacatgagtgttgccagaagcgatgatactctggatgaggaagactcctttgtgatgaaagccatcatccatgccatcaacgatgacaatgtcccaggcctgcagcaccttctgggctcattatccaactatgatgttaaccaacccaacaagcacgggacacctccattactcattgctgctggctgtgggaatattcaaatactacagttgctcattaaaagaggctcgagaatcgatgtccaggataagggcgggtccaatgccgtctactgggctgctcggcatggccacgtcgataccttgaaatttctcagtgagaacaaatgccctttggatgtgaaagacaagtctggagagatggccctccacgtggcagctcgctatggccatgctgacgtggctcagttactgtgcagcttcggctcaaatcccaatatccaggacaaggaagaagaaacccccctgcactgtgctgcttggcacggctattactctgtggccaaagccctttgtgaagccggctgtaacgtgaacatcaagaaccgagaaggagagacgcccctcctgacagcctctgccaggggctaccacgacatcgtggagtgtctggccgaacatggagccgaccttaatgcttgcgacaaggacggacacattgcccttcatctggctgtaagacggtgtcagatggaggtaatcaagactctcctcagccaagggtgtttcgtcgattatcaagacaggcacggcaatactcccctccatgtggcatgtaaagatggcaacatgcctatcgtggtggccctctgtgaagcaaactgcaatttggacatctccaacaagtatgggcgaacgcctctgcaccttgcggccaacaacggaatcctagacgtggtccggtatctctgtctgatgggagccagcgttgaggcgctgaccacggacggaaagacggcagaagatcttgctagatcggaacagcacgagcacgtagcaggtctccttgcaagacttcgaaaggatacgcaccgaggactcttcatccagcagctccgacccacacagaacctgcagccaagaattaagctcaagctgtttggccactcgggatccgggaaaaccacccttgtagaatctctcaagtgtgggctgctgaggagctttttcagaaggcgtcggcccagactgtcttccaccaactccagcaggttcccaccttcacccctggcttctaagcccacagtctcagtgagcatcaacaacctgtacccaggctgcgagaacgtgagtgtgaggagccgcagcatgatgttcgagccgggtcttaccaaagggatgctggaggtgtttgtggccccgacccaccacccgcactgctcggccgatgaccagtccaccaaggccatcgacatccagaacgcttatttgaatggagttggcgatttcagcgtgtgggagttctctggaaatcctgtgtatttctgctgttatgactattttgctgcaaatgatcccacgtcaatccatgttgttgtctttagtctagaagagccctatgagatccagctgaaccaagtgattttctggctcagtttcctgaagtcccttgtcccagttgaagaacccatagccttcggtggcaagctgaagaacccactccaagttgtcctggtggccacccacgctgacatcatgaatgttcctcgaccggctggaggcgagtttggatatgacaaagacacatcgttgctgaaagagattaggaacaggtttggaaatgatcttcacatttcaaataagctgtttgttctggatgctggggcttctgggtcaaaggacatgaaggtacttcgaaatcatctgcaagaaatacgaagccagattgtttcggtctgtcctcccatgactcacctgtgtgagaaaatcatctccacgctgccttcctggaggaagctcaatggacccaaccagctgatgtcgctgcagcagtttgtgtacgacgtgcaggaccagctgaaccccctggccagcgaggaggacctcaggcgcattgctcagcagctccacagcacaggcgagatcaacatcatgcaaagtgaaacagttcaggacgtgctgctcctggacccccgctggctctgcacaaacgtcctggggaagttgctgtccgtggagaccccacgggcgctgcaccactaccggggccgctacaccgtggaggacatccagcgcctggtgcccgacagcgacgtggaggagctgctgcagatcctcgatgccatggacatctgcgcccgggacctgagcagcgggaccatggtggacgtcccagccctgatcaagacagacaacctgcaccgctcctgggctgatgaggaggacgaggtgatggtgtatggtggcgtgcgcatcgtgcccgtggaacacctcacccccttcccatgtggcatctttcacaaggtccaggtgaacctgtgccggtggatccaccagcaaagcacagagggcgacgcggacatccgcctgtgggtgaatggctgcaagctggccaaccgtggggccgagctgctggtgctgctggtcaaccacggccagggcattgaggtccaggtccgcggcctggagacggagaagatcaagtgctgcctgctgctggactcggtgtgcagcaccattgagaacgtcatggccaccacgctgccagggctcctgaccgtgaagcattacctgagcccccagcagctgcgggagcaccatgagcccgtcatgatctaccagccacgggacttcttccgggcacagactctgaaggaaacctcactgaccaacaccatgggggggtacaaggaaagcttcagcagcatcatgtgcttcgggtgtcacgacgtctactcacaggccagcctcggcatggacatccatgcatcagacctgaacctcctcactcggaggaaactgagtcgcctgctggacccgcccgaccccctggggaaggactggtgccttctcgccatgaacttaggcctccctgacctcgtggcaaagtacaacaccagtaacggggctcccaaggatttcctccccagccccctccacgccctgctgcgggaatggaccacctaccctgagagcacagtgggcaccctcatgtccaaactgagggagctgggtcgccgggatgccgcagactttttgctgaaggcatcctctgtgttcaaaatcaacctggatggcaatggccaggaggcctatgcctcgagctgcaacagcggcacctcttacaattccattagctctgttgtatcccggtgagggcagcctctggcttgggcagggtctgtttggactgcagaagcaagggggtgatgtagcccatccttccctttggagatgctgagggtgtttcttcctgcacccacagccagggggatgccactcctccctccggcttgacctgtttctctgccgctacctccctccccgtctcattccgttgtctgtggatggtcattgcagtttaagagcagaacagatcttttactttggccgcttgaaaagctagtgtacctcctctcagtgttttggactccatctctcatcctccagtaccttgcttcttactgataattttgctggaattcctaacttttcaatgacattttttttaactactatattgattgtcctttaaaaaagaaaagtgcatatttatccaaaatgtgtatttcttatacgcttttctttgttataccatttcctcagcttatctcttttatatttgtaggagaaactcccatgtatggaatcccactgtatgatttataaacagacaatatgtgagtgccttttgcagaagagggtgtgtttgaaatcatcggagtcagccaggagctgtcaccaaggaaacgctacctctctgtcccttgctgtatgctgatcatcgccagaggtgcttcaccctgagttttgttttgtattgttttctgacagtttttctgttttgtttggcaaggaaaggggagaagggaatcctcctccagggtgattttatgatcagtgttgttgctctaggaagacatttttccgtttgcttttgttccaatgtcaatgtgaacgtccacatgaaacctacacactgtcatgcttcatcattccctctcatctcaggtagaaggttgacacagttgtagggttacagagacctatgtaagaattcagaagacccctgactcatcatttgtggcagtcccttataattggtgcatagcagatggtttccacatttagatcctggtttcataacttcctgtacttgaagtctaaaagcagaaaataaaggaagcaagttttcttccatgattttaaattgtgatcgagttttaaattgataggagggaacatgtcctaattcttctgtcctgagaagcatgtaatgttaatgttatatcatatgtatatatatatatgcactatgtatatacatatatattaatactggtatttttacttaatctataaaatgtcgttaaaaagttgtttgtttttttctttttttataaataaactgttgctcgttgc

SEQ ID NO: 151017 - DNA, 4186 bp, Artificial Sequence
  derived and/or modified sequence
gcaggagcggtggtgatggtctgggaagcggagctgaagtgccctgggctttggtgaggcgtgacagtttatcatgaccgtgttcaggcaggaaaacgtggatgattactacgacaccggcgaggaacttggcagtggacagtttgcggttgtgaagaaatgccgtgagaaaagcaccggcctccagtatgccgccaaattcatcaagaaaaggaggactaagtccagccggcggggtgtgagccgcgaggacatcgagcgggaggtcagcatcctgaaggagatccagcaccccaatgtcatcaccctgcacgaggtctatgagaacaagacggacgtcatcctgatcttggaactcgttgcaggtggcgagctgtttgacttcttagctgaaaaggaatctttaactgaagaggaagcaactgaatttctcaaacaaattcttaatggtgtttactacctgcactcccttcaaatcgcccactttgatcttaagcctgagaacataatgcttttggatagaaatgtccccaaacctcggatcaagatcattgactttgggttggcccataaaattgactttggaaatgaatttaaaaacatatttgggactccagagtttgtcgctcctgagatagtcaactatgaacctcttggtcttgaggcagatatgtggagtatcggggtaataacctatatcctcctaagtggggcctccccatttcttggagacactaagcaagaaacgttagcaaatgtatccgctgtcaactacgaatttgaggatgaatacttcagtaataccagtgccctagccaaagatttcataagaagacttctggtcaaggatccaaagaagagaatgacaattcaagatagtttgcagcatccctggatcaagcctaaagatacacaacaggcacttagtagaaaagcatcagcagtaaacatggagaaattcaagaagtttgcagcccggaaaaaatggaaacaatccgttcgcttgatatcactgtgccaaagattatccaggtcattcctgtccagaagtaacatgagtgttgccagaagcgatgatactctggatgaggaagactcctttgtgatgaaagccatcatccatgccatcaacgatgacaatgtcccaggcctgcagcaccttctgggctcattatccaactatgatgttaaccaacccaacaagcacgggacacctccattactcattgctgctggctgtgggaatattcaaatactacagttgctcattaaaagaggctcgagaatcgatgtccaggataagggcgggtccaatgccgtctactgggctgctcggcatggccacgtcgataccttgaaatttctcagtgagaacaaatgccctttggatgtgaaagacaagtctggagagatggccctccacgtggcagctcgctatggccatgctgacgtggctcagttactgtgcagcttcggctcaaatcccaatatccaggacaaggaagaagaaacccccctgcactgtgctgcttggcacggctattactctgtggccaaagccctttgtgaagccggctgtaacgtgaacatcaagaaccgagaaggagagacgcccctcctgacagcctctgccaggggctaccacgacatcgtggagtgtctggccgaacatggagccgaccttaatgcttgcgacaaggacggacacattgcccttcatctggctgtaagacggtgtcagatggaggtaatcaagactctcctcagccaagggtgtttcgtcgattatcaagacaggcacggcaatactcccctccatgtggcatgtaaagatggcaacatgcctatcgtggtggccctctgtgaagcaaactgcaatttggacatctccaacaagtatgggcgaacgcctctgcaccttgcggccaacaacggaatcctagacgtggtccggtatctctgtctgatgggagccagcgttgaggcgctgaccacggacggaaagacggcagaagatcttgctagatcggaacagcacgagcacgtagcaggtctccttgcaagacttcgaaaggatacgcaccgaggactcttcatccagcagctccgacccacacagaacctgcagccaagaattaagctcaagctgtttggccactcgggatccgggaaaaccacccttgtagaatctctcaagtgtgggctgctgaggagctttttcagaaggcgtcggcccagactgtcttccaccaactccagcaggttcccaccttcacccctggcttctaagcccacagtctcagtgagcatcaacaacctgtacccaggctgcgagaacgtgagtgtgaggagccgcagcatgatgttcgagccgggtcttaccaaagggatgctggaggtgtttgtggccccgacccaccacccgcactgctcggccgatgaccagtccaccaaggccatcgacatccagaacgcttatttgaatgccttcggtggcaagctgaagaacccactccaagttgtcctggtggccacccacgctgacatcatgaatgttcctcgaccggctggaggcgagtttggatatgacaaagacacatcgttgctgaaagagattaggaacaggtttggaaatgatcttcacatttcaaataagctgtttgttctggatgctggggcttctgggtcaaaggacatgaaggtacttcgaaatcatctgcaagaaatacgaagccagattgtttcggtctgtcctcccatgactcacctgtgtgagaaaatcatctccacgctgccttcctggaggaagctcaatggacccaaccagctgatgtcgctgcagcagtttgtgtacgacgtgcaggaccagctgaaccccctggccagcgaggaggacctcaggcgcattgctcagcagctccacagcacaggcgagatcaacatcatgcaaagtgaaacagttcaggacgtgctgctcctggacccccgctggctctgcacaaacgtcctggggaagttgctgtccgtggagaccccacgggcgctgcaccactaccggggccgctacaccgtggaggacatccagcgcctggtgcccgacagcgacgtggaggagctgctgcagatcctcgatgccatggacatctgcgcccgggacctgagcagcgggaccatggtggacgtcccagccctgatcaagacagacaacctgcaccgctcctgggctgatgaggaggacgaggtgatggtgtatggtggcgtgcgcatcgtgcccgtggaacacctcacccccttcccatgtggcatctttcacaaggtccaggtgaacctgtgccggtggatccaccagcaaagcacagagggcgacgcggacatccgcctgtgggtgaatggctgcaagctggccaaccgtggggccgagctgctggtgctgctggtcaaccacggccagggcattgaggtccaggtccgcggcctggagacggagaagatcaagtgctgcctgctgctggactcggtgtgcagcaccattgagaacgtcatggccaccacgctgccagggctcctgaccgtgaagcattacctgagcccccagcagctgcgggagcaccatgagcccgtcatgatctaccagccacgggacttcttccgggcacagactctgaaggaaacctcactgaccaacaccatgggggggtacaaggaaagcttcagcagcatcatgtgcttcgggtgtcacgacgtctactcacaggccagcctcggcatggacatccatgcatcagacctgaacctcctcactcggaggaaactgagtcgcctgctggacccgcccgaccccctggggaaggactggtgccttctcgccatgaacttaggcctccctgacctcgtggcaaagtacaacaccagtaacggggctcccaaggatttcctccccagccccctccacgccctgctgcgggaatggaccacctaccctgagagcacagtgggcaccctcatgtccaaactgagggagctgggtcgccgggatgccgcagactttttgctgaaggcatcctctgtgttcaaaatcaacctggatggcaatggccaggaggcctatgcctcgagctgcaacagcggcacctcttacaattccattagctctgttgtatcccggtgagggcagcctctggcttgg

SEQ ID NO: 151018 - DNA, 4293 bp, Artificial Sequence
  derived and/or modified sequence
atgacagtctttcgccaagagaacgtggacgattactatgacacaggggaagagctggggagcggccagttcgctgtagtgaagaagtgccgcgagaagagcaccggcttgcagtatgccgcgaagtttatcaagaagcgacgaaccaagtcctcccgtcgtggcgtctcaagggaagacattgaacgcgaagtcagcatcctcaaggaaatccagcaccccaacgtcattaccctccacgaagtgtacgagaacaagactgacgtgattctaattctggagctggtggctgggggggaactattcgacttcttggcggagaaggaaagtctaacagaggaagaggctactgagttcctcaaacagatattaaacggcgtctattacctgcactcattgcagattgctcactttgatttgaagccagagaacatcatgttgctggatagaaatgtgccaaaacctaggatcaagatcatcgactttggcctcgcgcacaaaatagacttcggaaacgagttcaagaacatttttggaactcctgagttcgtggcgcccgagatagtaaactacgagccactgggtctagaggctgacatgtggagtatcggagtgataacctacatactcctgtccggagcctcaccattccttggcgacacaaaacaggagacactagccaatgtaagtgccgtgaattacgaattcgaggatgagtactttagtaatactagcgcgctcgccaaagatttcatcagacggcttctggtcaaggaccccaagaaacgaatgaccatccaggattctctgcagcatccctggataaagcccaaggatacccagcaagcactgtctaggaaggcaagtgcggtgaacatggagaaatttaagaaatttgcagcacgcaaaaagtggaagcagagcgttcgtctgatctccctttgtcaaagactctccaggagctttctgagccgctcgaacatgtcagtggctcgcagtgatgataccctggatgaggaggattctttcgtcatgaaagccattatccacgctattaatgacgacaacgttcctggtcttcagcacctgcttggcagtctgtccaattacgatgtaaaccagccaaacaagcacgggactcctcccctgctcattgctgccggttgtggaaatatacaaattctccaactgttgattaaaagggggagtaggatcgacgttcaggataaaggtggcagcaacgcggtgtactgggcagccaggcatggacacgtggatactctcaagtttctgtccgaaaacaagtgccccctcgacgtcaaagacaaaagcggggaaatggccctgcacgtggctgcccgatatgggcacgctgacgttgctcagctgctgtgctcttttggttccaaccctaatattcaagacaaggaggaagagacgcctctgcactgtgccgcttggcacggctattacagtgtggccaaggccctgtgtgaggccggatgcaatgtcaatattaaaaatagagaaggtgaaacacccttactgacagcaagtgctcggggatatcatgacatcgtagaatgcctcgccgagcacggcgctgatctcaacgcctgcgacaaagacggtcatattgccttgcacctcgccgtccgtaggtgccagatggaagtgattaaaacactgctcagccaaggatgcttcgtagattaccaagaccgccacggaaatactccactccacgtggcttgcaaggacggcaacatgcctatcgtggtcgctctctgcgaggcaaattgtaaccttgatatatccaataaatatgggagaacacccctgcatctggctgcaaataatggcattcttgacgtagtgcgatacctgtgccttatgggcgcaagcgtggaggccctgaccaccgacggcaagacagcagaggatcttgcgcgctcagagcagcacgagcatgtggctggtcttcttgcgagattaagaaaggacactcacagaggactgttcatacagcagcttagacctacacagaacctccagcccagaattaagctcaagctgtttggtcactctgggtcaggcaaaacaacgttggtggaatcattgaaatgcggattgttaagatcattttttcgtcgtcgccggcccagactttctagcaccaattcttcaaggttcccaccatcccctctggcctccaagccgaccgtgtctgtgagtataaataacctctatcccggatgcgagaacgtttctgtgcgtagcagatccatgatgttcgagcccggcctgacaaagggaatgttggaggtgttcgtggctccaactcaccacccccactgctccgcagatgatcaatcaacaaaagcaatcgatatccagaacgcctacctcaatggcgttggcgattttagcgtttgggagttctcaggcaatccagtgtacttttgttgttacgactattttgccgcaaacgaccctactagtatccatgtggtggtcttctctctggaggagccctacgaaatccagctgaaccaagtcattttctggctgtccttcctgaagagtttggtacccgtggaagaacccatagccttcggtggaaagttgaaaaaccccctccaggtggtcctcgtggcgacccacgccgatataatgaatgtgcctaggcctgctggcggcgagtttggctacgataaggacacttccttgttaaaggaaatccggaacagatttgggaatgatctgcatatcagcaacaagctgtttgtgctcgatgccggcgcttcagggtctaaggacatgaaggtgctccgcaatcacctccaggagatcagatctcaaattgtgtcagtctgtccccctatgactcatctttgcgaaaagatcattagtactctgcccagctggcgtaaacttaatggtcctaaccagctgatgagtctgcagcagtttgtgtatgacgttcaggaccagttgaaccccctggcgtccgaagaggatttacgccggatagcccagcagctgcatagtacaggggagatcaacatcatgcagagtgagacggttcaggatgttttattactggatcccaggtggctgtgcaccaacgtcctgggcaaactgttatccgtggagaccccacgtgctctccaccactatcgggggcggtacacagtggaggacatccagcgactggtgccagacagcgacgttgaggaactcctgcaaatattggacgctatggatatatgcgccagggatttgtcttcaggcacaatggtagacgtacctgcactcataaagacagataacctgcaccgaagttgggccgatgaagaggatgaagtcatggtatacggtggagtgcgcatagtgccggttgaacatttgactccttttccctgtggcatcttccataaggtgcaggtgaatctgtgtcgctggatccaccagcaatctactgaaggggacgccgacattaggctgtgggtgaacgggtgcaagttagctaaccgaggagcggagctgctcgtccttctggtgaatcacggccagggcatcgaggtacaggtgcgcggattggaaaccgagaagattaagtgttgcctcctattggattctgtgtgcagcacaatagagaacgtgatggcaactaccctgccaggccttttgaccgtgaagcactatctgagccctcaacaacttagagagcatcacgagcccgtgatgatttaccagccacgcgatttttttcgggcacaaacgctgaaagagacaagcctcaccaacacaatgggcggttacaaagagtcgtttagcagcatcatgtgttttggttgtcatgacgtctactcccaagccagcctgggtatggatatccatgcatcggacctgaatcttctcacacgtcgcaaactgtcgcggctgctggaccctcctgaccccctgggtaaggattggtgtttgctcgccatgaacttgggcctgccagacctggtcgccaaatacaatacatctaacggtgctcctaaagacttcctgccatctcctctgcatgcccttctgagagaatggacaacataccccgagagcacggtgggcacgctaatgtcgaaactcagggagttaggccggcgcgacgccgccgatttcttgctgaaagcatcgtccgtctttaagatcaacctggatggaaacgggcaagaggcgtatgctagcagttgcaattcagggacctcctacaattccatcagcagtgtcgtatctaggtag

SEQ ID NO: 151019 - DNA, 4293 bp, Artificial Sequence
  derived and/or modified sequence
atgaccgtcttccgacaggagaatgtggacgattactacgacactggcgaagagcttggctcgggccaattcgctgtcgtaaagaaatgccgggaaaagagcaccgggctgcagtacgctgccaagttcattaagaagcgacggactaagagttcacgacggggagtgtcacgggaggatattgaacgggaagtgtctatcttaaaggagattcaacaccctaacgttataaccctccacgaggtctatgaaaacaagacagacgtgattctcattctggaactagtggcaggaggcgagttgtttgacttcttggccgagaaggaatctctcaccgaggaggaggccaccgagttcctcaagcagatcctcaacggtgtgtattatttgcacagcttgcagatcgcacactttgacctgaaacccgaaaacattatgttactggataggaatgtgcccaaacccagaatcaagattatcgatttcggcttagcccataaaattgactttggaaacgagtttaagaacatctttgggactcccgaattcgtcgctccagagatcgtaaattacgagccacttggtctggaggcagacatgtggtcaatcggggtgatcacctacatcctgctctcaggagcctccccttttctcggggatactaaacaggagacgctggctaatgtgagcgcggtcaactacgagttcgaagacgagtacttcagcaacacttccgctttggctaaggatttcatccgcaggttgctggtgaaggacccaaagaaacgcatgaccatccaggattcattacagcatccatggatcaaaccaaaagacactcagcaggccctgtcgagaaaagcctctgcagtgaacatggagaagtttaaaaagtttgctgctaggaagaagtggaaacaatccgtgaggctgatatccctctgccagagattgagtcgatcctttctttcgagatccaatatgagtgttgccagatccgatgacaccctggacgaggaggactcatttgtgatgaaggcgatcattcacgctataaatgacgacaacgtgcctgggctacagcacctcctggggtctctatctaattatgacgtgaaccagccgaacaaacatggaaccccccccctgcttatagccgcgggttgcgggaacattcagatcctccagctgcttattaaaaggggtagccgcattgacgtgcaggataagggtggcagcaacgcagtctattgggccgcaagacacgggcacgtagacaccttgaaatttctcagcgagaataaatgcccactagatgttaaggacaagtcaggagagatggctctgcatgtcgccgcccgatacgggcatgcggacgtggcgcagctcctttgtagcttcggctcgaaccccaatattcaagataaagaggaagaaacccctctgcattgtgccgcttggcatggctattattccgtcgcgaaagccttgtgtgaagccgggtgtaatgtcaacatcaagaacagggagggggagactcctctcctgaccgcctctgctcgcggctaccatgacatagtcgagtgtttggctgagcacggggccgacctgaatgcatgtgacaaggatggccacatcgcactgcatttagccgtgcgtaggtgtcagatggaagtgattaagactcttctcagccaaggatgcttcgtagactaccaggaccgacacggcaacaccccattgcatgttgcatgtaaggacggcaatatgcctatcgtcgttgctctatgtgaggccaattgcaacctggacatttcgaataaatacggtaggacacccctgcatctggccgcaaataatggcattttggacgtcgtacgctatctttgtctgatgggggcctctgtggaggctttaacaaccgatggaaaaaccgccgaggatctggctcggtccgagcagcatgagcatgtggctggactgctggccagactccgtaaggatacacaccggggcttgttcatccagcagttgcgccccacccagaacctgcagccaaggatcaagctcaagctgtttggccatagcggcagcgggaagactactctcgtggagagcctgaagtgtgggcttctacgaagtttctttagacgtcgtcgcccccgtctctcaagcaccaattccagcagatttccacctagtccgctggcatcaaaaccaaccgtgtcagtgtcaatcaataacctgtatccgggttgcgagaatgtatcagttcgaagccgatccatgatgttcgagcctggcctcacgaaggggatgctggaggtgtttgtagcgcctacacaccacccacactgctctgcagatgatcagtcaacaaaggccattgacatacagaatgcctatcttaacggcgtcggagacttttctgtgtgggaattctcggggaatcccgtgtacttctgctgctatgattattttgcagcaaacgatcctacctctattcacgtcgttgtcttctctttggaagagccctatgagatacagctcaaccaggtcattttctggctgtcattcttaaaatcccttgttcctgttgaagagcctatagcattcggtggcaaactgaagaatccactacaagtcgtactggtagctacacatgccgatattatgaacgtcccccggccggcaggaggggagtttggctacgataaggacaccagcttgctcaaagagattcgaaacaggttcggaaacgacttgcatatctccaataaactcttcgtgctcgacgccggagcctctggttccaaggatatgaaggtacttcgaaaccacctacaggaaatccgcagtcagatcgtgagcgtgtgtccccctatgacacatctgtgtgaaaaaataatttctacattgcctagctggcgcaaactgaatggaccaaatcagctgatgtcactccagcagtttgtgtatgatgtgcaagaccagctcaaccctctggcgtccgaggaggaccttcggcggattgctcagcaacttcacagcactggcgaaattaacatcatgcagagcgaaactgtgcaggacgtgctgcttctagatccacggtggctttgtaccaacgtgctgggcaaattgttgagcgtagaaactccgcgggccctgcatcactacagggggcgctacaccgtagaggacatccaaaggctggtccctgactctgacgtggaggaactgctccagatcttagatgccatggacatctgcgctcgcgatctgagcagtggcaccatggtagatgtacccgccctgatcaagaccgataacctccaccggagctgggccgacgaggaggatgaggttatggtctatggaggtgtcagaattgttccagtagaacatctcacacccttcccctgcgggatttttcataaggttcaggttaatctgtgtcgatggatccatcaacagtccaccgaaggtgacgctgacatcaggctgtgggtaaatgggtgcaaactggccaacagaggagctgagctgttggtgttactggtgaatcatggtcagggcatcgaggtgcaggtccggggcttagagacagagaaaatcaaatgctgcctgctccttgattccgtgtgttcaacaatagaaaatgtcatggctacaacattgcccggacttctaaccgtgaaacattacctgtccccccaacagctccgcgaacaccatgagcctgtgatgatctaccagcctagggattttttccgggcacagacattgaaagagacgagtctgacgaataccatgggcggatataaggaaagcttcagttccatcatgtgttttggttgccacgatgtgtactcacaagcttctctgggcatggatatccatgccagtgacctcaacttgctgacaaggcgaaaactgagtcggcttttggatccccccgaccctctggggaaagactggtgccttttggctatgaacttaggactcccggacctcgttgccaaatataatacctccaacggggcaccaaaagactttctcccaagccctttacacgccctgcttcgtgaatggaccacttatcctgagtccaccgtcggtaccctgatgtcaaagctacgtgaattgggacgtcgcgacgctgcggactttttgttaaaggcatcatccgtttttaagataaacctggacggcaatggacaggaggcatatgctagctcatgcaattctggcacaagctacaactcaatctcttccgtggtcagccggtag

SEQ ID NO: 151020 - DNA, 4368 bp, Artificial Sequence
  derived and/or modified sequence
atgacggtgttccgccaggagaacgtcgatgactactacgatacaggagaggagctggggagtggtcaatttgccgtggttaagaagtgcagggaaaagagcaccgggttgcagtatgccgcaaagttcattaaaaaacggaggaccaaaagcagcagacggggcgtgtcacgcgaggacatcgaaagggaggtctcaattctgaaggaaatacagcatcctaacgtgatcacgctgcatgaagtctacgagaataagacagatgtgattctaattctcgagctggttgccgggggagagctcttcgacttcctcgcagagaaggagtccctgaccgaggaggaagcaacagagtttttaaagcagattctcaatggcgtctattatctacatagcctccaaattgcccacttcgatcttaaaccagagaatatcatgctcctagatcggaacgtgccgaaaccaagaatcaaaatcatcgactttgggctcgctcacaagatagacttcggaaatgaattcaagaacattttcggaactcctgagtttgtggcgcccgaaattgttaactatgaaccattggggctcgaagctgacatgtggagtatcggagtgattacatatatcctgctctcaggcgccagcccgttcctcggtgacactaaacaggaaacgctggcgaacgtgtcagctgtaaactatgaatttgaagacgagtatttcagcaatacctcagccttggctaaagacttcatccgcaggttgctggtgaaggatccaaagaaacggatgacaattcaggatagcctgcagcatccatggatcaaacctaaggacacacaacaggccctcagtagaaaggcaagtgcagtcaatatggagaagttcaaaaagttcgcagctaggaagaagtggaagcagtcggtccgcctaatctccctttgccagcggctgtctagatccttcctcagtcggtccaacatgtcagtggcgaggtccgatgatactttagatgaagaagactcttttgtgatgaaagccataatccatgccataaatgatgacaacgtgccaggtctccagcatctgcttggatcactgagtaattatgacgtgaatcagccaaataagcacggaactccccccctgctcattgcagctggatgcggcaatatccagatactccagctcctcatcaaacgaggcagtcgcatcgacgtgcaggacaagggcggctccaacgccgtctactgggcagccagacatggccacgttgacactctgaaattcttatccgagaacaagtgtccattagatgtgaaagataagtccggcgagatggccctgcacgtcgctgcacggtacggtcacgcagacgttgctcagttgttgtgttcatttggatccaatcctaatatccaggataaggaggaggagaccccgctgcattgcgccgcatggcacggctattacagtgtcgccaaagctctttgtgaagcggggtgcaacgtcaatataaagaatcgcgagggagagaccccccttctgacggcctctgctaggggttaccatgacatcgtggagtgtctcgctgagcatggtgctgacctcaacgcctgtgacaaagacggccatattgctttgcaccttgccgtccgccggtgtcaaatggaggtcattaagaccctcttaagccagggctgctttgtggactatcaggacaggcacggaaatactccactccatgtggcttgcaaggatggtaatatgcccatcgttgtggcactttgtgaagccaattgcaacctggacatctctaataaatacggcagaacccctctgcacctggcagccaacaacgggatccttgatgtcgtacggtacctctgtttgatgggagcaagtgtggaggccctaactaccgacggaaaaaccgccgaagacctggcccgaagcgagcagcatgagcacgtggccggcttgctggcccggctgcggaaagatactcaccgtgggttgttcattcagcagctgcgaccaacacagaacctccaaccccgtattaaactgaagctctttggtcatagcggcagtggtaagactacattagttgaatcgttaaagtgcggattactgaggtcttttttccgcagacggagacccagattgtcatccaccaactccagccgatttccaccatctcctctggcttctaagcctaccgtcagtgtcagtatcaataacttgtacccagggtgtgaaaatgtgtctgtgcgctctcgctccatgatgtttgagccaggactcacaaagggcatgcttgaggtctttgtcgctccgactcaccacccgcactgctctgctgacgatcagtcaacaaaagctatagatatccagaacgcatatttaaacggggtgggcgatttctctgtgtgggagttttctggcaaccctgtctatttttgttgttatgattattttgccgcgaatgatccgacatctatccacgtagttgtcttttccttagaagagccttacgaaatccagcttaatcaggtaattttttggctctcctttctgaagtcactggtgccggtggaagaacctatcgccttcggaggcaagttgaagaatcccctgcaggtggtgctcgtggccacccatgccgacataatgaacgtccctcggcccgcgggtggcgagttcggctacgataaagataccagcttgcttaaggagatcagaaacaggttcggcaatgacctccatatttctaacaaactcttcgtgcttgacgctggagcctccgggtccaaggatatgaaagtcttaaggaaccatctgcaggagattcgaagccagatagtcagtaaaacgttaccattcactcccgatatactggtaggagttcctttatggcatcatcagaaaattgggggatccccagtgtgccctcctatgactcacctgtgcgaaaaaataatctcaaccttgcccagctggcgaaaattgaacggacctaaccagcttatgtcactgcaacaattcgtgtacgacgtacaggaccagctgaatcctctggccagcgaggaagacctgagaaggatcgcccagcagttgcactccaccggagagattaacataatgcagagcgaaaccgtgcaagacgttctcctgctagacccaagatggttgtgtaccaatgttctgggcaagttattgtccgtggagactccacgtgctttgcaccactacagggggagatataccgtcgaagacattcagagacttgtcccagatagcgatgtcgaagagttattacagatcctggatgcgatggatatttgtgcccgggacttgtcctcgggcaccatggtcgatgttccggcactgatcaaaaccgacaatctgcaccgctcatgggctgacgaggaagacgaggttatggtgtacgggggcgtacgcattgttccagttgagcaccttactccatttccctgtggcattttccacaaggtgcaggttaacctttgccgatggatacatcagcagtcaaccgagggcgacgccgacattagactttgggtcaacggctgcaagctggctaacaggggcgcagagttactggtgcttctggtgaaccatggccagggtatcgaagttcaggtacgggggctcgaaaccgagaaaatcaaatgctgcttgcttctcgacagcgtctgctcaacgatcgagaacgtaatggctaccactctgccaggcctcctgactgttaaacactatctgtctccacagcaactgagagaacaccatgagccagtcatgatctaccaaccaagagacttcttcagagctcaaacccttaaagagacctctcttaccaacacgatgggtggctataaggagtccttttccagcattatgtgcttcggatgtcatgatgtgtatagccaggcttcccttggtatggatatacatgccagtgacctcaacctgcttacacgcaggaagctttcaaggttgctagatcctccagacccactcggaaaagattggtgcctgctggcgatgaatttagggctcccggatcttgtcgcaaagtacaacacctcaaatggagctcccaaggactttctgccttcacctttacacgcactactgcgggaatggaccacctatccagagtctactgtgggcacacttatgagcaagttacgggagttaggtaggagagatgctgccgacttcctgcttaaggcatcgagtgtatttaagatcaacctggatggcaatgggcaggaggcttatgcttcatcctgtaattcaggaacttcctacaattccataagctcagtcgtgtctagatag

SEQ ID NO: 151021 - DNA, 4293 bp, Artificial Sequence
  derived and/or modified sequence
atgaccgtgttcagacaggaaaacgtggacgattattatgacactggcgaggaacttgggtccggacagtttgctgttgtgaaaaagtgtcgggaaaaatcgactgggctccagtacgcagcaaagtttataaaaaaaagacgtaccaaatcaagcaggcggggcgtgagtcgggaggatatcgagagggaagtaagtattctgaaggaaattcagcacccaaacgtcatcacattgcacgaggtttatgagaataagaccgatgtgatactgattctcgaactggtggccggaggtgaactgtttgatttcctcgccgagaaagagagcctaaccgaagaggaagctacggagttcttgaaacagattctgaacggtgtttattacctccactccctgcagattgcccatttcgatctgaaacctgagaacatcatgctgctggatcgaaatgtcccaaagcctagaatcaagataattgacttcgggctggctcacaagatcgatttcggcaatgagtttaaaaatattttcggcacccccgaattcgtggctcctgaaatcgttaattacgaaccattaggcctagaagcagatatgtggtcgattggagtaatcacgtacatccttctgagcggggcctccccattcctcggcgacacgaaacaagagaccctggcaaatgtatcagcagttaactacgagtttgaggatgaatacttctcaaatactagcgcccttgctaaggactttatacgaaggctgctggtgaaagatccaaaaaagcgaatgactattcaggactctctgcagcatccctggataaaaccgaaggacacccagcaggctttgtccaggaaggccagcgccgtcaatatggagaagtttaagaagtttgccgcccgtaaaaagtggaagcaatccgtccgcctgatttctctatgtcagcggctttcccgcagcttcctcagcagaagcaatatgagtgttgctagaagcgatgacactcttgacgaagaggattccttcgtcatgaaggctatcatccatgctatcaatgatgataatgtacccggacttcagcacctgcttgggagtctctctaattatgacgtgaatcaaccaaataaacacggcactccacctcttctgattgctgcgggatgcggcaacattcagatcctccaactgctgattaagagggggagccgcatcgacgttcaggacaaagggggaagcaacgccgtatattgggccgctcggcacggacacgtggacactcttaaatttttgtccgagaacaaatgccccctggacgttaaagacaagtccggagaaatggctctacacgtagccgcacgctacgggcatgcagacgttgctcaattgctctgcagtttcggatccaacccaaatattcaagataaagaggaagaaacgcccttacactgtgccgcctggcatggatattattccgtagcaaaggccctttgcgaggccggctgcaatgtcaatatcaaaaatcgtgaaggtgagacacctcttctgactgccagtgcccgtggatatcatgatatcgtcgagtgcttagccgagcacggtgcagatctgaacgcatgcgataaggatggccacattgccctccaccttgctgtacgtagatgtcagatggaggtgatcaaaaccctgttaagccagggctgcttcgttgattatcaagatcgccacggcaatacacctttacacgtggcttgtaaggacggtaacatgcccatcgtcgtagcgctctgtgaggccaattgcaacctcgatatctctaacaaatacggaagaacccccctacacctggctgcgaataacgggatactggacgtcgtccgctatctgtgtttaatgggggcatccgtggaagctttgaccaccgacggtaagacagccgaggaccttgcccgcagcgagcagcatgaacatgttgccggtttgctggcaagactgaggaaagacacacacagaggcctcttcatccaacagctcagaccaacacagaacttgcagccgcgtatcaaactcaagctcttcggacattccggtagtggcaagactacgttggttgagagcctgaaatgtggactgctgagatccttctttcgcaggaggaggccccgtcttagctctaccaattcttctagatttcctccatcgcctctagcatcaaagcccactgtgtctgtctccataaataacctgtacccgggctgcgagaacgtctcagtgaggtctaggagtatgatgtttgaaccaggactcaccaagggcatgcttgaagtgttcgtggcacccacccaccatccacactgtagcgccgatgatcagtccacaaaagctattgacatccaaaatgcatatttgaatggggtaggggatttctcagtgtgggagttcagcggtaaccctgtatacttctgttgttatgactactttgctgccaacgacccaacttctatccacgtagtcgtttttagtttggaggagccatatgagatccaactcaaccaggtgatcttctggctgtctttcctcaaatctctcgtgcccgtagaagagcctatcgccttcggcggcaaactgaagaatccgctgcaggtggtacttgtcgcgactcacgccgacatcatgaacgtgccacgacccgcgggaggcgaattcggttatgacaaagatacaagtttattgaaggaaattcgaaaccggttcggcaacgatttacacatctctaacaagctgtttgtgctggatgccggtgcctctggctcaaaggacatgaaagtcctgagaaatcacctgcaggagataagaagccagattgtgtctgtgtgcccacccatgacacacttatgcgaaaagatcattagtactctcccctcatggcgtaagctgaatgggccaaaccagttaatgtccctgcagcagttcgtttatgacgtgcaggatcagctgaacccactggcttctgaggaagacctaagacgaatcgcacaacagctgcactctaccggagaaataaacattatgcaaagtgagaccgtccaggacgtactgctcctagatcctagatggctgtgcaccaatgtcctgggcaaactgttgtcagtggaaaccccacgcgccctccaccactatcgtggccgctatacagtggaggacatccagagattagtgcccgacagcgacgtagaggaactgctccagatcttggacgctatggatatttgtgcacgggaccttagctccggtaccatggtggacgtgcctgcactgatcaaaaccgacaatctgcatcggagctgggcagacgaggaagatgaagtgatggtgtatggtggcgtccgtatcgtgccagtagaacatctgacgccttttccttgcggaattttccataaagtgcaagtcaatctctgccggtggattcaccagcaaagtaccgaaggagacgccgacatccggctgtgggttaatggatgtaagttggcaaaccggggagcagagctgcttgtgctcctcgtgaaccacggccagggcattgaagtacaagtgagagggcttgagactgaaaagattaagtgctgcctccttttggattccgtgtgtagcacaatcgagaatgtgatggctacgactctccccgggctgctgactgtgaaacattatctctcaccgcagcaactgagggagcatcatgaaccagtgatgatctatcagcccagagatttctttagagcacagactctgaaagaaacgagtctcaccaacacaatgggaggatataaagaatcgttctcttccattatgtgcttcggctgccacgacgtgtattcccaggcatcactgggtatggacattcatgctagtgatttgaatctcctgacaaggcgcaagctgtctaggctcttggatccacctgatcccctgggcaaagattggtgtttgctggcgatgaaccttgggctccccgaccttgtggcaaaatataacacctccaacggggctcccaaggattttctgccgagccctttgcacgctctgctacgggagtggaccacctatccggagagtacagtgggcacactgatgtctaagctccgcgagctgggccgcagggacgctgccgacttcttgctgaaggcttcgagcgttttcaagattaacctcgatggaaacgggcaggaggcatacgcaagtagttgtaactccggcacctcttataacagcatctcttcagtcgtgagccgctag

SEQ ID NO: 151022 - DNA, 4095 bp, Artificial Sequence
  derived and/or modified sequence
atgactgtgtttcggcaggagaatgtagacgattactatgataccggagaagagctgggatccggacagtttgccgtggtgaagaaatgccgggagaagtccactggactgcagtacgctgctaagtttattaagaaaagaaggaccaagagctctcggaggggcgtttcaagagaagatattgagcgcgaagtgtccattctgaaagaaatacagcatcccaatgtgatcactttgcacgaggtgtatgaaaacaaaaccgatgtcatcctgatacttgaactggtggccggcggagagctgtttgacttccttgctgagaaggagtcactgacagaagaggaggcaacggagttcctgaagcagatcctgaatggcgtatactacttacacagtctgcagatcgcccacttcgacctcaaacctgagaacatcatgctgctggaccgcaatgtgcccaaaccccggattaagataattgactttggcctcgcacacaagatagactttgggaacgagttcaagaacattttcgggacgccagagttcgtcgcaccagaaatcgtgaattacgaacccctgggactggaagctgacatgtggtccattggcgtgattacctacatacttctgtctggagccagcccctttctaggcgacacaaagcaggagaccctggccaatgtctccgctgtaaattacgagtttgaggatgaatatttcagtaatacctcggcactggccaaagatttcattcgccgccttcttgttaaggaccccaagaaacggatgacgatccaggactccctacaacatccatggatcaagcctaaagatacacaacaagctctgtcaaggaaagcaagcgctgtgaatatggaaaaattcaagaagtttgcggcccgtaagaagtggaagcaaagcgtgaggctgatctctctttgccagcgactgtctcgctcttttctgtcgcggtctaacatgtctgttgcgagaagcgatgacaccttagatgaggaagattcatttgtgatgaaagccataatccacgctataaacgacgataacgtgcctggacttcagcatttgttaggcagtttatccaattacgacgtgaaccagccaaataaacatggcacacctccactgctcatcgccgccggatgcggaaatattcagattctacagctattaattaaacgaggatctcggattgacgtgcaggacaaaggaggtagcaatgccgtctactgggcggcccgacacgggcacgttgacacacttaagttcctttcagaaaataaatgtcctttagatgttaaggacaagtcgggcgaaatggctctgcacgtggccgccaggtatggccatgcggacgttgcacagctgttgtgcagcttcggctctaatccgaacatccaggataaggaggaggaaactcctctgcactgtgcagcatggcatggctactacagcgtcgccaaagccctgtgtgaggccgggtgtaacgtcaacataaagaacagagagggagagacccctctccttaccgccagcgccagaggctaccatgatatcgtggaatgtctcgcagaacatggcgcggatctgaacgcttgcgacaaggatggtcacatcgccctgcacttagctgtcaggcgctgccagatggaagtaataaaaactctgctgtcccaggggtgtttcgtcgactaccaagatcgccatgggaatacacccctgcacgtggcatgtaaggatgggaacatgcctatcgtggtggccttatgtgaagcaaattgcaatctggatatttccaacaagtatggtcgtacaccattacatctggctgctaacaacggcattttagatgtcgtaaggtatttgtgtttgatgggtgcttctgttgaggcactgaccacagacggcaagactgcagaggatttggctaggtccgagcagcacgagcacgtggcaggcctgcttgccagactgcggaaggatacacatagggggctttttatccagcaattacggcctacccaaaacttgcagccccgtatcaagctgaagttgtttgggcattcagggtctggcaagactaccctcgtggagtcactgaagtgtgggctgctccggtctttctttaggcggaggagaccccgtttgtcctccacaaactctagtagatttccacccagcccactcgccagcaagccaacagtatctgtctcgatcaacaacctctaccctggctgcgaaaatgtgtcggtgcgaagtagaagcatgatgttcgaacctggtctgacgaagggaatgctcgaggtgttcgtcgcccctacccaccacccccactgttctgctgacgaccagtcaaccaaagcgatagatatccagaatgcctacctgaacgctttcggaggcaaactcaagaacccactccaggtcgtcctagtggcaacacatgcagacattatgaatgtaccgaggccggcgggtggtgagttcggttacgacaaggacacgtctttgctgaaggagattcgtaataggtttggtaacgatctgcatatatccaataaactgttcgtcttggacgccggtgccagcgggtcaaaggatatgaaggttctgaggaaccacctgcaagaaattcggtctcaaatcgtctcggtctgccctccgatgacccacttatgcgaaaagattatttcaaccctcccaagctggaggaaactgaacggacctaaccaactgatgtcactgcaacagtttgtctacgatgtgcaagatcagctcaacccgctcgcgagcgaggaagacctgcgacgcattgctcagcaactgcactcaactggcgaaatcaatatcatgcagagcgagacagtccaagacgttctgctgctagacccccggtggctctgtactaatgtgcttgggaaactgctgtccgttgagacacctcgggctttgcaccactataggggccgatatacagttgaggacatccagcggctcgtgccagattccgatgttgaggagctgttgcagatcctggatgctatggacatctgtgctcgggacctgagctcaggaaccatggtggatgtgcccgccttaatcaaaaccgacaatttgcatagaagctgggctgacgaggaagatgaggtcatggtatatggaggcgtgcggatcgtgccagtcgagcacctgacccctttcccctgtgggatttttcacaaagtgcaggtgaatctgtgtaggtggattcatcaacaatccacagagggcgacgccgatatcaggctttgggtgaacggatgcaagctcgcgaaccggggcgctgaactactcgtactgctggtgaatcacgggcaaggtatagaagtccaggtgagggggttagagacagagaagataaaatgctgtctcctcctcgactccgtatgtagcacaattgagaatgtcatggctaccaccctccctggcttgctgacggtgaaacactacctctccccacaacagctacgcgaacaccacgagcctgtgatgatttaccagcctagagacttctttagggctcagacattgaaagaaacatcacttactaacaccatgggaggctataaggaaagcttcagctctatcatgtgcttcggctgccacgacgtgtattcccaggcctccttgggcatggacattcatgcctctgacctgaacctgctgacaaggcgcaaattgtccaggctgctagacccacccgaccccctcggaaaggattggtgcctactagccatgaacttgggcctgcccgacctggtggctaagtataatacaagtaatggagcacctaaggatttccttcctagtccactccacgcactgctgcgtgagtggactacctacccggaaagcacagtcggaactcttatgagcaaactgcgcgagctcggacgaagggatgcggccgattttctgcttaaagccagctctgtctttaaaattaatctggatgggaacggccaagaggcctatgcctcttcatgcaattctggcacatcatacaattccatcagctcggttgtcagcagatag

SEQ ID NO: 151023 - DNA, 4293 bp, Artificial Sequence
  derived and/or modified sequence
atgaccgtcttccggcaggagaatgtggatgactactatgacacaggagaggagctgggcagcggccagtttgctgtggtgaagaagtgccgggagaagagcacaggcctgcagtatgctgccaagttcatcaagaagaggaggaccaagagcagcagaagaggagtgtccagagaagatattgagcgggaggtgtccatcctgaaggagatccagcaccccaacgtcatcaccctgcacgaggtgtatgagaacaagacagatgtgatcctgatcctggagctggtggccggcggggagctgtttgacttcctggccgagaaggagagcctgacagaggaggaggccacagagttcctgaagcagatcctgaatggagtgtactacctgcacagcctgcagatcgcccactttgacctgaagccagagaacatcatgctgctggacagaaatgtgcccaagccccgcatcaagatcatcgactttggcctggcccacaagattgactttggaaatgagttcaagaacatcttcggcaccccagagtttgtggcccctgagatcgtgaactatgagcccctgggcctggaggccgacatgtggagcattggagtcatcacctacatcctgctgagcggggccagccccttcctgggggacaccaagcaggagaccctggccaacgtgtctgctgtgaactatgaatttgaagatgagtacttcagcaacaccagcgccctggccaaggacttcatccggcggctgctggtgaaggaccccaagaagaggatgaccatccaggacagcctgcagcacccctggatcaagcccaaggacacccagcaggccctgagcaggaaggccagcgctgtgaacatggagaagttcaagaagtttgctgccaggaagaagtggaagcagagcgtgcggctcatcagcctgtgccagaggctgagccgctccttcctgagccgcagcaacatgtctgtggcccggagtgatgacaccctggatgaggaggacagctttgtgatgaaggccatcatccacgccatcaatgatgacaacgtgcccggcctgcagcacctgctgggcagcctgagcaactatgatgtgaaccagcccaacaagcacggcaccccacccctgctgattgctgctggctgcggcaacatccagatcctgcagctgctgatcaagaggggcagcagaattgatgtgcaggacaagggcggcagcaatgctgtgtactgggccgcccggcacggccacgtggacaccctgaagttcctgtctgaaaataaatgtcccctggatgtgaaggacaagagcggggagatggccctgcacgtggccgcccgctatggccacgcagatgtggcccagctgctgtgcagctttggcagcaaccccaacatccaggacaaggaggaggagacccccctgcactgtgccgcctggcacggctactacagcgtggccaaggccctgtgtgaggccggctgcaatgtgaacatcaagaaccgggagggggagacccccctgctgacagccagcgcccggggctaccatgacatcgtggagtgcctggccgagcacggggctgacctgaatgcctgtgacaaggatggccacatcgccctgcacctggccgtgcggcgctgccagatggaggtgatcaagaccctgctgagccagggctgctttgtggactaccaggacagacatggcaacacccccctgcacgtggcctgcaaggatggcaacatgcccatcgtggtggccctgtgtgaggccaactgcaacctggacatcagcaacaagtatggccgcacccccctgcacctggccgccaacaacggcatcctggatgtggtgcgctacctgtgcctgatgggcgcctctgtggaggccctgaccacagatggcaagacagctgaggacctggcccggtctgagcagcatgaacatgtggccggcctgctggcccggctgaggaaggacacccaccggggcctcttcatccagcagctgcggcccacccagaacctgcagccccgcatcaagctgaagctgtttggccacagcggcagcggcaagaccaccctggtggagagcctgaagtgtggcctgctgcggagcttcttcagaagaagaagaccccggctgagcagcaccaacagcagccgcttcccccccagccccctggccagcaagcccaccgtgtctgtgtccatcaacaacctgtacccaggctgtgaaaatgtgtctgtgcgcagccgctccatgatgtttgagcccggcctgaccaagggcatgctggaggtgtttgtggcccccacccaccacccccactgcagcgcagatgaccagagcaccaaggccatcgacatccagaatgcctacctgaatggagtgggggacttctctgtgtgggagttcagcggcaaccctgtgtacttctgctgctatgactactttgctgccaatgaccccaccagcatccacgtggtggtgttcagcctggaggagccctatgagatccagctgaaccaggtgatcttctggctgtccttcctgaagagcctggtgcctgtggaggagcccatcgccttcggcggcaagctgaagaaccccctgcaggtggtgctggtggccacccatgctgacatcatgaatgtgcccaggcctgctggaggagaatttggctatgacaaggacaccagcctgctgaaggagatccggaacagatttggaaatgacctgcacatcagcaacaagctgtttgtgctggatgctggggccagcggcagcaaggacatgaaggtgctgaggaaccacctgcaggagatccgcagccagatcgtgtctgtgtgcccccccatgacccacctgtgtgagaagatcatcagcaccctgcccagctggaggaagctgaatggccccaaccagctgatgagcctgcagcagtttgtgtatgatgtgcaggaccagctgaaccccctggccagcgaggaggacctgcggagaattgcccagcagctgcacagcactggagagatcaacatcatgcagagcgagaccgtgcaggatgtgctgctgctggacccccgctggctgtgcaccaacgtgctgggcaagctgctgtctgtggagaccccccgggccctgcaccactaccggggccgctacacagtggaggacatccagaggctggtgcctgacagtgatgtggaggagctgctgcagatcctggatgccatggacatctgtgcccgggacctgagcagcggcaccatggtggatgtgcctgccctgatcaagacagacaacctgcaccgctcctgggcagatgaggaggatgaggtgatggtgtatggaggagtgagaattgtgcctgtggagcacctgacccccttcccctgtggcatcttccacaaggtgcaggtgaacctgtgccgctggatccaccagcagagcacagaaggagatgctgacatccggctgtgggtgaatggctgcaagctggccaacagaggagctgagctgctggtgctgctggtgaaccacggccagggcatcgaggtgcaggtgcggggcctggagacagagaagatcaagtgctgcctgctgctggacagcgtgtgcagcaccattgaaaatgtgatggccaccaccctgcccggcctgctgactgtgaagcactacctgagcccccagcagctgcgggagcaccacgagcctgtgatgatctaccagccccgggacttcttccgggcccagaccctgaaggagaccagcctgaccaacaccatgggcggctacaaggagagcttcagcagcatcatgtgcttcggctgccatgatgtgtacagccaggccagcctgggcatggacatccacgccagtgacctgaacctgctgaccaggaggaagctgagccggctgctggaccccccagaccccctgggcaaggactggtgcctgctggccatgaacctgggcctgcctgacctggtggccaagtacaacaccagcaatggagcccccaaggacttcctgcccagccccctgcacgccctgctgcgggagtggaccacctacccagagagcacagtgggcaccctgatgagcaagctgcgggagctgggcagaagagatgctgctgacttcctgctgaaggccagctctgtgttcaagatcaacctggatggaaatggccaggaggcctatgccagcagctgcaacagcggcaccagctacaacagcatcagctctgtggtgtccaggtag

SEQ ID NO: 151024 - DNA, 4368 bp, Artificial Sequence
  derived and/or modified sequence
atgaccgtcttccggcaggagaatgtggatgactactatgacacaggagaggagctgggcagcggccagtttgctgtggtgaagaagtgccgggagaagagcacaggcctgcagtatgctgccaagttcatcaagaagaggaggaccaagagcagcagaagaggagtgtccagagaagatattgagcgggaggtgtccatcctgaaggagatccagcaccccaacgtcatcaccctgcacgaggtgtatgagaacaagacagatgtgatcctgatcctggagctggtggccggcggggagctgtttgacttcctggccgagaaggagagcctgacagaggaggaggccacagagttcctgaagcagatcctgaatggagtgtactacctgcacagcctgcagatcgcccactttgacctgaagccagagaacatcatgctgctggacagaaatgtgcccaagccccgcatcaagatcatcgactttggcctggcccacaagattgactttggaaatgagttcaagaacatcttcggcaccccagagtttgtggcccctgagatcgtgaactatgagcccctgggcctggaggccgacatgtggagcattggagtcatcacctacatcctgctgagcggggccagccccttcctgggggacaccaagcaggagaccctggccaacgtgtctgctgtgaactatgaatttgaagatgagtacttcagcaacaccagcgccctggccaaggacttcatccggcggctgctggtgaaggaccccaagaagaggatgaccatccaggacagcctgcagcacccctggatcaagcccaaggacacccagcaggccctgagcaggaaggccagcgctgtgaacatggagaagttcaagaagtttgctgccaggaagaagtggaagcagagcgtgcggctcatcagcctgtgccagaggctgagccgctccttcctgagccgcagcaacatgtctgtggcccggagtgatgacaccctggatgaggaggacagctttgtgatgaaggccatcatccacgccatcaatgatgacaacgtgcccggcctgcagcacctgctgggcagcctgagcaactatgatgtgaaccagcccaacaagcacggcaccccacccctgctgattgctgctggctgcggcaacatccagatcctgcagctgctgatcaagaggggcagcagaattgatgtgcaggacaagggcggcagcaatgctgtgtactgggccgcccggcacggccacgtggacaccctgaagttcctgtctgaaaataaatgtcccctggatgtgaaggacaagagcggggagatggccctgcacgtggccgcccgctatggccacgcagatgtggcccagctgctgtgcagctttggcagcaaccccaacatccaggacaaggaggaggagacccccctgcactgtgccgcctggcacggctactacagcgtggccaaggccctgtgtgaggccggctgcaatgtgaacatcaagaaccgggagggggagacccccctgctgacagccagcgcccggggctaccatgacatcgtggagtgcctggccgagcacggggctgacctgaatgcctgtgacaaggatggccacatcgccctgcacctggccgtgcggcgctgccagatggaggtgatcaagaccctgctgagccagggctgctttgtggactaccaggacagacatggcaacacccccctgcacgtggcctgcaaggatggcaacatgcccatcgtggtggccctgtgtgaggccaactgcaacctggacatcagcaacaagtatggccgcacccccctgcacctggccgccaacaacggcatcctggatgtggtgcgctacctgtgcctgatgggcgcctctgtggaggccctgaccacagatggcaagacagctgaggacctggcccggtctgagcagcatgaacatgtggccggcctgctggcccggctgaggaaggacacccaccggggcctcttcatccagcagctgcggcccacccagaacctgcagccccgcatcaagctgaagctgtttggccacagcggcagcggcaagaccaccctggtggagagcctgaagtgtggcctgctgcggagcttcttcagaagaagaagaccccggctgagcagcaccaacagcagccgcttcccccccagccccctggccagcaagcccaccgtgtctgtgtccatcaacaacctgtacccaggctgtgaaaatgtgtctgtgcgcagccgctccatgatgtttgagcccggcctgaccaagggcatgctggaggtgtttgtggcccccacccaccacccccactgcagcgcagatgaccagagcaccaaggccatcgacatccagaatgcctacctgaatggagtgggggacttctctgtgtgggagttcagcggcaaccctgtgtacttctgctgctatgactactttgctgccaatgaccccaccagcatccacgtggtggtgttcagcctggaggagccctatgagatccagctgaaccaggtgatcttctggctgtccttcctgaagagcctggtgcctgtggaggagcccatcgccttcggcggcaagctgaagaaccccctgcaggtggtgctggtggccacccatgctgacatcatgaatgtgcccaggcctgctggaggagaatttggctatgacaaggacaccagcctgctgaaggagatccggaacagatttggaaatgacctgcacatcagcaacaagctgtttgtgctggatgctggggccagcggcagcaaggacatgaaggtgctgaggaaccacctgcaggagatccgcagccagatcgtgtccaagaccctgcccttcaccccagacatcctggtgggcgtgcccctgtggcaccaccagaagattggaggcagccctgtgtgcccccccatgacccacctgtgtgagaagatcatcagcaccctgcccagctggaggaagctgaatggccccaaccagctgatgagcctgcagcagtttgtgtatgatgtgcaggaccagctgaaccccctggccagcgaggaggacctgcggcgcatcgcccagcagctgcacagcactggagagatcaacatcatgcagagcgagaccgtgcaggatgtgctgctgctggacccccgctggctgtgcaccaacgtgctgggcaagctgctgtctgtggagaccccccgggccctgcaccactaccggggccgctacacagtggaggacatccagaggctggtgcctgacagtgatgtggaggagctgctgcagatcctggatgccatggacatctgtgcccgggacctgagcagcggcaccatggtggatgtgcctgccctgatcaagacagacaacctgcaccgctcctgggcagatgaagaagatgaggtgatggtgtatggaggagtgcgcatcgtgcctgtggagcacctgacccccttcccctgtggcatcttccacaaggtgcaggtgaacctgtgccgctggatccaccagcagagcacagaaggagatgctgacatccggctgtgggtgaatggctgcaagctggccaacagaggagctgagctgctggtgctgctggtgaaccacggccagggcatcgaggtgcaggtgcggggcctggagacagagaagatcaagtgctgcctgctgctggacagcgtgtgcagcaccattgaaaatgtgatggccaccaccctgcccggcctgctgactgtgaagcactacctgagcccccagcagctgcgggagcaccacgagcctgtgatgatctaccagccccgggacttcttccgggcccagaccctgaaggagaccagcctgaccaacaccatgggcggctacaaggagagcttcagcagcatcatgtgcttcggctgccatgatgtgtacagccaggccagcctgggcatggacatccacgccagtgacctgaacctgctgaccaggaggaagctgagccggctgctggaccccccagaccccctgggcaaggactggtgcctgctggccatgaacctgggcctgcctgacctggtggccaagtacaacaccagcaatggagcccccaaggacttcctgcccagccccctgcacgccctgctgcgggagtggaccacctacccagagagcacagtgggcaccctgatgagcaagctgcgggagctgggcagaagagatgctgctgacttcctgctgaaggccagcagcgtcttcaagatcaacctggatggaaatggccaggaggcctatgccagcagctgcaacagcggcaccagctacaacagcatcagctctgtggtgtccaggtag

SEQ ID NO: 151025 - DNA, 4095 bp, Artificial Sequence
  derived and/or modified sequence
atgaccgtcttccggcaggagaatgtggatgactactatgacacaggagaggagctgggcagcggccagtttgctgtggtgaagaagtgccgggagaagagcacaggcctgcagtatgctgccaagttcatcaagaagaggaggaccaagagcagcagaagaggagtgtccagagaagatattgagcgggaggtgtccatcctgaaggagatccagcaccccaacgtcatcaccctgcacgaggtgtatgagaacaagacagatgtgatcctgatcctggagctggtggccggcggggagctgtttgacttcctggccgagaaggagagcctgacagaggaggaggccacagagttcctgaagcagatcctgaatggagtgtactacctgcacagcctgcagatcgcccactttgacctgaagccagagaacatcatgctgctggacagaaatgtgcccaagccccgcatcaagatcatcgactttggcctggcccacaagattgactttggaaatgagttcaagaacatcttcggcaccccagagtttgtggcccctgagatcgtgaactatgagcccctgggcctggaggccgacatgtggagcattggagtcatcacctacatcctgctgagcggggccagccccttcctgggggacaccaagcaggagaccctggccaacgtgtctgctgtgaactatgaatttgaagatgagtacttcagcaacaccagcgccctggccaaggacttcatccggcggctgctggtgaaggaccccaagaagaggatgaccatccaggacagcctgcagcacccctggatcaagcccaaggacacccagcaggccctgagcaggaaggccagcgctgtgaacatggagaagttcaagaagtttgctgccaggaagaagtggaagcagagcgtgcggctcatcagcctgtgccagaggctgagccgctccttcctgagccgcagcaacatgtctgtggcccggagtgatgacaccctggatgaggaggacagctttgtgatgaaggccatcatccacgccatcaatgatgacaacgtgcccggcctgcagcacctgctgggcagcctgagcaactatgatgtgaaccagcccaacaagcacggcaccccacccctgctgattgctgctggctgcggcaacatccagatcctgcagctgctgatcaagaggggcagcagaattgatgtgcaggacaagggcggcagcaatgctgtgtactgggccgcccggcacggccacgtggacaccctgaagttcctgtctgaaaataaatgtcccctggatgtgaaggacaagagcggggagatggccctgcacgtggccgcccgctatggccacgcagatgtggcccagctgctgtgcagctttggcagcaaccccaacatccaggacaaggaggaggagacccccctgcactgtgccgcctggcacggctactacagcgtggccaaggccctgtgtgaggccggctgcaatgtgaacatcaagaaccgggagggggagacccccctgctgacagccagcgcccggggctaccatgacatcgtggagtgcctggccgagcacggggctgacctgaatgcctgtgacaaggatggccacatcgccctgcacctggccgtgcggcgctgccagatggaggtgatcaagaccctgctgagccagggctgctttgtggactaccaggacagacatggcaacacccccctgcacgtggcctgcaaggatggcaacatgcccatcgtggtggccctgtgtgaggccaactgcaacctggacatcagcaacaagtatggccgcacccccctgcacctggccgccaacaacggcatcctggatgtggtgcgctacctgtgcctgatgggcgcctctgtggaggccctgaccacagatggcaagacagctgaggacctggcccggtctgagcagcatgaacatgtggccggcctgctggcccggctgaggaaggacacccaccggggcctcttcatccagcagctgcggcccacccagaacctgcagccccgcatcaagctgaagctgtttggccacagcggcagcggcaagaccaccctggtggagagcctgaagtgtggcctgctgcggagcttcttcagaagaagaagaccccggctgagcagcaccaacagcagccgcttcccccccagccccctggccagcaagcccaccgtgtctgtgtccatcaacaacctgtacccaggctgtgaaaatgtgtctgtgcgcagccgctccatgatgtttgagcccggcctgaccaagggcatgctggaggtgtttgtggcccccacccaccacccccactgcagcgcagatgaccagagcaccaaggccatcgacatccagaatgcctacctgaatgccttcggcggcaagctgaagaaccccctgcaggtggtgctggtggccacccatgctgacatcatgaatgtgcccaggcctgctggaggagaatttggctatgacaaggacaccagcctgctgaaggagatccggaacagatttggaaatgacctgcacatcagcaacaagctgtttgtgctggatgctggggccagcggcagcaaggacatgaaggtgctgaggaaccacctgcaggagatccgcagccagatcgtgtctgtgtgcccccccatgacccacctgtgtgagaagatcatcagcaccctgcccagctggaggaagctgaatggccccaaccagctgatgagcctgcagcagtttgtgtatgatgtgcaggaccagctgaaccccctggccagcgaggaggacctgcggagaattgcccagcagctgcacagcactggagagatcaacatcatgcagagcgagaccgtgcaggatgtgctgctgctggacccccgctggctgtgcaccaacgtgctgggcaagctgctgtctgtggagaccccccgggccctgcaccactaccggggccgctacacagtggaggacatccagaggctggtgcctgacagtgatgtggaggagctgctgcagatcctggatgccatggacatctgtgcccgggacctgagcagcggcaccatggtggatgtgcctgccctgatcaagacagacaacctgcaccgctcctgggcagatgaggaggatgaggtgatggtgtatggaggagtgagaattgtgcctgtggagcacctgacccccttcccctgtggcatcttccacaaggtgcaggtgaacctgtgccgctggatccaccagcagagcacagaaggagatgctgacatccggctgtgggtgaatggctgcaagctggccaacagaggagctgagctgctggtgctgctggtgaaccacggccagggcatcgaggtgcaggtgcggggcctggagacagagaagatcaagtgctgcctgctgctggacagcgtgtgcagcaccattgaaaatgtgatggccaccaccctgcccggcctgctgactgtgaagcactacctgagcccccagcagctgcgggagcaccacgagcctgtgatgatctaccagccccgggacttcttccgggcccagaccctgaaggagaccagcctgaccaacaccatgggcggctacaaggagagcttcagcagcatcatgtgcttcggctgccatgatgtgtacagccaggccagcctgggcatggacatccacgccagtgacctgaacctgctgaccaggaggaagctgagccggctgctggaccccccagaccccctgggcaaggactggtgcctgctggccatgaacctgggcctgcctgacctggtggccaagtacaacaccagcaatggagcccccaaggacttcctgcccagccccctgcacgccctgctgcgggagtggaccacctacccagagagcacagtgggcaccctgatgagcaagctgcgggagctgggcagaagagatgctgctgacttcctgctgaaggccagctctgtgttcaagatcaacctggatggaaatggccaggaggcctatgccagcagctgcaacagcggcaccagctacaacagcatcagctctgtggtgtccaggtag

SEQ ID NO: 151026 - DNA, 4293 bp, Artificial Sequence
  derived and/or modified sequence
atgaccgtgttccggcaggagaacgtggacgactactacgacaccggcgaggagctcggaagtgggcaattcgcggtggttaagaagtgtcgcgaaaaatcaactggccttcagtatgctgccaagtttattaaaaaacggaggaccaaatcctcccgcagaggcgtatcgcgggaagatatcgagagggaggtgagcatcctcaaggaaatacagcaccccaatgttataactttacatgaggtgtatgagaacaaaaccgacgtgatccttattcttgagttggtcgctggaggagaactgttcgatttcctggccgagaaagaatccctgaccgaagaagaggcgactgaattcttgaagcaaattctgaatggagtctattatctacatagcctgcagattgcgcatttcgacctgaaaccagaaaacatcatgcttctggaccgtaacgtcccaaagccacgtataaaaatcatagatttcgggctagctcacaaaatcgatttcggaaacgagtttaagaatatcttcggcacccctgaatttgtggctccagagatagtgaattacgaaccgctgggcctagaagccgatatgtggtcaatcggggttatcacatacatcctactgtcaggtgcctcaccttttctgggcgacaccaaacaagagaccctagcaaatgtttcagcggtgaattacgaattcgaggacgagtacttctcaaatacctccgcccttgcaaaagattttattagaaggctgttagtgaaggatccaaagaaaagaatgaccattcaagactctctgcagcacccctggattaagccgaaggatacacagcaggccctgtctagaaaagcaagcgccgtgaacatggagaaattcaagaaattcgctgctagaaaaaaatggaagcagtctgtgcgccttatctctctatgtcagcgcctgagcaggagcttcttatccagatctaatatgtctgtagcccgatccgacgacaccctcgacgaggaggactccttcgttatgaaagcgattatccacgccataaatgatgataatgtgcctgggctgcaacacctcctggggtctctgtccaattacgacgttaaccagccaaataaacatggcacgccacctctgctgatcgcggccgggtgcggcaatatccagattctacagctgttgattaaacggggctcacgcattgacgtgcaggacaagggggggagcaacgctgtttattgggccgcccgacatgggcatgtggataccctgaaattcctgtcagagaataaatgtcctttagatgttaaagacaagtcaggcgaaatggccctgcatgtggcggcgcggtacggccacgcagatgtcgcccaactgctgtgttcctttggctcaaatcctaacatccaggataaggaggaggaaacaccgctgcactgtgcagcctggcacggatactattctgtggccaaagctctttgcgaggctggctgcaacgtgaatattaaaaatagggagggcgagacccctcttcttaccgcaagcgcccgcggctaccacgacatcgtggagtgtctagctgagcatggagctgatctgaatgcctgcgataaagacggtcatattgcactccatctcgctgttcggaggtgtcagatggaggtcattaagactctcttaagccagggttgtttcgtggattaccaagatagacacggcaacacccctttacacgtggcttgtaaggatgggaacatgcctattgtggtagccttgtgcgaggctaactgtaacctcgatatctccaataaatatgggcggacgcctctgcatcttgctgcaaataacggtatcctggacgtggtgcgctacctgtgcctgatgggagccagtgtggaagccctgacaactgacgggaagacagctgaggacttagcgcggagcgagcagcatgagcatgtagccggattgttagctcggctacgaaaggatacccaccgggggctttttattcaacagctgcgacccactcaaaatctgcaaccacgtataaagctcaaactatttggacacagcggcagcggtaagaccactcttgtcgagtcccttaaatgtggcctgctccgcagttttttcagaaggaggcgtcccaggctgtcttctaccaactcttcacgctttccgccctctcccctggctagcaaacccaccgtctccgtcagtatcaataatttataccctggttgtgagaatgtgtctgtgcggtcaagatctatgatgttcgagccggggctgacgaagggtatgctcgaggtgtttgttgcaccaactcaccacccccattgctccgccgacgaccaaagcactaaagccattgatattcagaatgcctaccttaatggcgttggcgacttttccgtttgggagttttccgggaacccagtgtacttctgctgttatgattattttgccgctaatgaccccacctccattcacgtcgtggtgttttccctggaggagccatatgagattcagttgaaccaggtgattttctggctgtctttcctgaagagtctggtgccagtcgaagaaccaatcgccttcggagggaagctcaagaatccactgcaggtcgtcctggttgcaactcatgccgacatcatgaacgttcctcgtcccgccgggggagaattcggatatgataaggacacgagtctgctgaaagagatcaggaacaggttcgggaatgacctccacataagtaataaactcttcgtactggacgccggagcatctggctcaaaggacatgaaggtgctgcggaatcacctgcaggagattaggtcacagattgttagtgtctgccccccaatgacccatttgtgcgaaaagatcattagcaccctgcccagctggcgaaagctgaatggcccgaaccagctgatgagtctccagcaatttgtatatgatgtgcaggatcagcttaacccccttgcctcggaggaagacctcaggagaatagctcagcagctgcactccacaggcgaaatcaatattatgcagagtgagactgtgcaggacgttctgctgctcgaccctcggtggctctgtaccaacgtactcggtaagttgctaagcgttgaaactccccgggccttacaccattatcgaggtcggtatactgtcgaagatatccagagactagtccctgactctgatgtggaagagcttttgcagatcctggacgccatggacatatgcgcacgcgacctgagctctggaaccatggtggatgtacccgccttgatcaaaactgataatttacatcggtcttgggctgacgaggaggatgaggtaatggtctacggaggagttaggatcgtacccgtagagcatctgactccattcccctgcggtatattccacaaggtgcaggtcaacctctgtaggtggatccaccagcaaagtaccgagggtgacgctgacatcagattgtgggtgaatggatgtaagttggccaacagaggcgccgagctattggtgctgctggtgaaccatgggcaaggtatagaggtgcaggtaagaggactggaaactgagaagatcaagtgttgcttacttctcgattctgtatgttcaacaatagagaacgtgatggcaaccacattgccaggtttactcacagttaagcattacctgagcccacagcagcttagagagcaccatgaacccgtcatgatctaccagccccgagattttttccgagcacagactttgaaggagacatctctaactaatactatgggcggatataaggagagcttttcatcaataatgtgctttggctgccacgatgtgtacagtcaagcctcattgggaatggacattcatgctagtgacttaaatctgctcacaagaagaaagctttccaggctactggatcccccagatccccttggaaaagattggtgtctgctcgctatgaacttaggcctccccgacctggtggccaagtacaatacaagtaacggagctcccaaagacttcctcccttctcctctgcacgccctgctgcgagagtggacgacataccctgaatcaacggtggggactctcatgtccaagctccgtgaacttggcaggagagacgccgccgactttctgctgaaggcttcgtcagtttttaaaatcaatctcgacgggaatggccaagaggcttacgcctcaagctgtaattccgggacatcttacaacagtatctcttctgttgtatcgcgctag

SEQ ID NO: 151027 - DNA, 4293 bp, Artificial Sequence
  derived and/or modified sequence
atgaccgtgttccggcaggagaacgtggacgactactacgacaccggggaggaactgggctccgggcaattcgcggtagtcaagaagtgtcgggaaaagtcaacaggtctgcagtacgcagccaagtttattaagaagcgtcgaacgaaatcgtctcggcgcggcgtctctagggaagatattgagagagaggtgtcgatcctcaaagaaatccagcaccctaacgtgattactttgcatgaggtctatgagaacaagactgatgtgatcctcatcctcgagttagtggccggcggtgaactatttgattttttagcagaaaaagagagcttgaccgaggaagaggcaacagaattcttgaagcagatactaaatggggtctattaccttcattcactgcagattgctcacttcgacctgaagccagagaacatcatgctgctggacagaaacgtccctaaaccccgcattaagatcattgattttggactggcccacaaaattgactttggcaatgaatttaaaaatatatttgggacccctgagttcgtggcccccgaaattgtgaattatgagccacttgggctggaggcagatatgtggagcataggagtgattacctatatccttctcagcggggccagtccatttctcggagatacaaaacaggaaacactggccaacgtctctgccgttaattacgagtttgaggacgaatatttctcaaacacttcagctttagcgaaggacttcatcaggaggcttctcgttaaggatccaaagaagaggatgacaatacaagacagtctccagcacccatggattaagccgaaggatacccaacaggccctgagccgtaaggcatctgctgtgaatatggagaagtttaagaagtttgcagctcgtaaaaaatggaagcagtccgtacggctcatttcattatgtcagcgtctctctcgttcgttccttagccgttctaatatgagcgtcgctaggagcgatgatacgctggacgaagaggactccttcgtgatgaaggcaattattcatgctatcaacgatgataacgtccccggattgcagcacctcttggggtcgctgagtaactacgatgtgaatcagccgaacaaacatggaactccaccactgctgatagccgcagggtgcggtaatattcagatcctccagcttttgatcaagcgtggatctcgtatcgacgtacaggacaaaggggggtctaacgccgtatactgggcagcccgacacgggcatgtcgacacactaaaattcctgtcggagaacaaatgcccgttagacgtcaaagacaaaagtggtgaaatggcgttacacgtagctgcacgatacggtcacgctgatgtagcgcagctcttgtgtagctttgggtccaaccctaatattcaagacaaagaagaggaaaccccactgcattgcgctgcgtggcacggctactatagcgttgccaaggccctgtgcgaggccggctgtaatgtgaatatcaagaatcgcgaaggcgagacacctctactcacggcatctgcccgcggctaccatgatattgtcgaatgcctagcggagcacggagccgatttgaatgcatgtgacaaagacggacacattgccttacatcttgccgtcagacgttgtcagatggaggtgataaaaactcttttgtcacagggctgtttcgtggattaccaggaccggcatggcaacactccgcttcatgtcgcctgcaaggacgggaatatgcctatcgtagtcgccctgtgcgaagccaactgcaacctggatatttctaataagtatggccggacccccttgcatttagccgcgaacaacggaatcctggatgtcgtacgctatctctgcttgatgggagcaagcgtggaggcactaactacggacggaaaaaccgccgaagaccttgcgcgctcagaacaacacgaacacgtggccggcctgttggctcggttgagaaaggatacacaccgggggctttttatccagcagctgcgcccaacacagaacttgcaacccaggatcaagctgaagctttttgggcactctggatctggcaagacaacccttgtggaatctctcaagtgcggccttttgagatcattcttcaggcgacgacggccgaggttgagcagcacaaactcgtctagattcccccctagtcctctggcctcaaaaccaacagtgagtgtgtcaattaacaatttgtaccccgggtgtgagaacgtgtctgttcgctctaggtctatgatgttcgagcctggtctcacaaagggcatgctggaagtgttcgtcgctcctacccaccacccacattgttctgccgacgatcaatcaactaaagcaatcgatatccagaacgcctatctcaacggagtgggggacttttccgtgtgggagtttagcggcaaccccgtctacttttgttgttacgattattttgccgcgaacgatccaacctctatccacgtggtcgtgttcagcctagaagagccttatgagatccagctcaatcaggtgattttctggctgagctttctgaagtcccttgtccctgttgaggagcccatcgcttttgggggcaaattgaaaaatccgctgcaggtggtgttggttgccactcatgctgatatcatgaacgtgccgagacccgcaggcggcgagttcggctacgacaaggataccagcttactgaaggagattagaaacaggtttggtaacgacctccatatttctaataaactctttgtcttagatgctggcgcttcaggttccaaagacatgaaggtgctcaggaaccacctgcaggaaatacgctcgcaaattgtctccgtgtgtcctccgatgactcatctgtgcgagaaaattatttccactctgcccagttggcgcaagctgaacggccccaatcaactgatgagtctgcagcaattcgtgtatgacgttcaggaccaactgaatcctctggctagcgaggaagacctccggcggatcgctcagcagttacactccacaggtgaaatcaacatcatgcagagtgagaccgtacaggacgttctgcttctagatcctcggtggttatgcacgaacgtactgggaaagctgctctcagtggaaacgccccgcgcattgcatcattatcgggggagatacacggtggaggacatccaaagactcgtaccggattccgacgttgaggaacttttgcagattttagatgctatggacatttgcgctcgggacctttcctcaggcacgatggtggacgttcccgctcttatcaagaccgacaatctgcaccgctcatgggccgacgaagaggatgaggtgatggtatacggtggagtaaggatagtcccagtggaacacctaacaccattcccatgcggtattttccacaaagtgcaggtcaatttgtgccggtggattcatcagcaatcaacagagggggatgcggatatccggctgtgggtgaatggctgtaagctggctaacagaggtgctgagctactcgtgctgctggtgaatcacgggcagggaatcgaggtgcaggtgcggggtctggaaacggagaaaattaagtgttgtttactcctggactctgtatgctccacaatcgagaatgttatggccactacactgcctgggctgctaaccgtgaaacactatttgagcccgcagcagctgagggaacaccatgagcccgtaatgatctatcaacccagggacttttttagagcacaaactctgaaggaaacatctctgacgaatactatgggagggtataaggagtcattctcctccattatgtgcttcggttgccacgacgtttattcacaggctagtttgggaatggacatccacgcatccgacctcaatctcctaacacggcggaagctttcgcgactactggatcctccagatcccttgggcaaggactggtgcctgctagccatgaacctgggccttcccgacctagttgctaagtacaatacttccaacggcgcgcctaaagacttcctcccttccccgttgcatgccctgctgcgtgagtggactacatatcctgaatcaacagttgggactctcatgtctaagttaagggagctaggcagaagagatgccgctgattttctgctcaaggcatcgtccgtgttcaagatcaacttagacggtaacgggcaggaggcgtatgctagtagctgcaattccgggacctcttacaatagtatttcttctgttgtctcccggtag

SEQ ID NO: 151028 - DNA, 4368 bp, Artificial Sequence
  derived and/or modified sequence
atgaccgtgttccggcaggagaacgtggacgactactacgacaccggtgaggagcttggttcaggccagtttgcggtggttaagaaatgtagggagaagtcgacgggattgcagtatgcagcaaagttcatcaaaaaaaggagaaccaaatccagcaggagaggggtgtcacgcgaggatatagagagggaggtgtctatactgaaggaaattcagcaccctaatgtcatcacactgcatgaagtgtatgagaacaagacagacgtgattttaattcttgaattagtggctggaggggaactgttcgattttcttgccgaaaaggaatctctgaccgaggaagaagcaacggagttcctgaaacagattctcaacggagtgtattatctgcattccctgcagattgcacactttgaccttaagccggagaatatcatgctcctggaccgaaacgtgcccaaaccacgaattaaaatcatagattttggcttggcccacaaaattgattttggcaatgaatttaagaatatatttggaaccccagagttcgtggcaccggagatagtgaattatgagcccctgggcctcgaggcagacatgtggtccattggtgtgatcacctacattctcctctcgggcgcttcgcccttcctgggcgatactaaacaggagacgctcgccaatgtatctgccgtgaactatgaatttgaagatgaatatttctcgaacacttctgcattagctaaagatttcatcaggagattgctggtgaaggatcccaagaaacggatgactatccaagattccttgcaacacccctggattaaacctaaagacactcagcaagcactctccaggaaagcatccgccgtcaacatggagaaatttaagaaattcgctgcaagaaagaagtggaagcagagtgtcagactcatctctttatgccagcgcttatccagatcatttctttcaaggtccaatatgtcagttgccaggtctgatgacaccctggatgaagaggatagctttgtcatgaaggctattattcatgccattaatgacgacaacgtgccgggcttgcagcatctgcttggtagcctcagtaattacgatgtgaaccagcctaacaaacatggcacacctcccctgctgattgcggcaggttgcggaaatattcagatcctgcagctgctcatcaagagagggagcagaatcgatgttcaagacaaagggggctctaacgccgtttactgggccgcacggcatggccacgtggatacacttaagttcctgtctgaaaataagtgtcccttagacgtgaaggataagtcgggggagatggctctgcacgtggctgcccgttacggccacgctgatgtggcacagctgttgtgtagttttggctccaaccctaatatacaggacaaagaagaggagacccccttgcactgcgctgcttggcatggctactattccgtggcgaaagctctatgtgaggcaggatgtaacgtaaatattaaaaatagggagggggagacccccctgctcacagcgtctgcgcggggttaccatgatattgtcgagtgtttggcagaacacggcgccgatttgaacgcctgcgataaggatgggcacatcgctctccatctcgcggtgagaagatgtcaaatggaggtgattaagacattgctgagccaggggtgcttcgtggattaccaggacagacacggaaacacaccgctacatgtcgcctgtaaggacggtaatatgccaatcgtggtggcactatgtgaagctaactgtaatctcgatattagcaacaagtacgggcggacgccactgcatcttgccgctaataacggaattctggacgtggtgagatacctctgtctgatgggtgcctcagtcgaagcccttactacagacggaaagacggctgaagatctcgcgaggtccgagcaacacgagcacgtcgccgggttgcttgccagacttcgcaaggacacacaccggggactgtttatccaacaacttcggcctacccagaacctgcaaccgaggataaaactgaaactctttggtcactctggttccggtaagacaaccctcgtcgagagtctcaaatgtggtctccttaggagcttcttccgacggcggagaccccgactgagttcgacaaatagtagcagatttcctccatctcctctggcatcaaagcccacagttagtgtctcaatcaataatctctacccagggtgtgaaaacgtcagcgtccgttcacggtccatgatgtttgagcctggcctaaccaaggggatgctcgaagtgtttgtggcaccaacccatcatccccactgttccgcggacgatcaaagcaccaaggccatcgacattcaaaatgcttatttgaacggagtgggagatttcagcgtttgggagttctccgggaaccccgtgtatttctgttgttacgactactttgccgctaatgatcctacctccatacatgtcgtggtgtttagtttggaggaaccctatgaaattcagctgaaccaagtgattttttggctttcttttctaaagtcactggtaccagtcgaagaacccatagccttcggcggcaagctgaaaaatccgctgcaggtggttctcgtcgctacccatgccgacattatgaatgtacccaggcctgccgggggcgagttcggctatgacaaagatacgtcactgttgaaggaaattagaaatcgcttcggcaacgatctccatattagcaataagctctttgttttagacgcaggagcgtctggctctaaagacatgaaagtcctcaggaatcacttgcaggagattcgatcgcaaatcgtgtctaagactctacccttcacacctgacattctggtaggagtgccactgtggcatcaccagaagatcggtggctctcccgtatgtcctcctatgacgcatttatgcgagaagatcatcagcaccctgccaagctggagaaaattgaatgggcctaatcaattgatgagcctgcaacagttcgtgtacgatgtgcaagatcagttaaaccctctggcatccgaagaggaccttcgtcgtattgcacaacagttacattcgactggagagataaacatcatgcagtcagaaaccgtacaggacgtacttctattggatccaagatggttgtgcactaacgtccttgggaagttactgtctgtggagacaccacgagccctccaccattatcggggccgatataccgtggaggatatccagcggctggtgcccgactctgacgtggaagagctcttgcagatcctcgatgccatggacatctgtgcacgcgacctttcttccggcacgatggtggacgttcctgctctgatcaaaaccgacaacctacatcggtcatgggccgacgaggaggacgaggttatggtgtacggcggcgtccgcatcgtgcccgtcgagcacttgaccccttttccctgtggaattttccataaagtacaggttaatctgtgcaggtggattcaccaacagagcaccgaaggcgatgccgatatcaggctctgggttaacgggtgtaaactggcgaatagaggcgccgaactgcttgtcttactggtgaaccacggacagggtattgaagtccaagtgcgcggtttggaaactgaaaaaattaagtgttgcttgttactagattctgtgtgtagcacaatagaaaacgtcatggccactacccttcccggcttacttaccgtaaagcattatttatccccccagcaattgcgcgaacaccacgaaccggtgatgatctatcagcctcgtgattttttcagagcacaaacactgaaagaaacgtcactgaccaataccatgggcggctataaggaaagcttctcatctattatgtgttttgggtgtcacgacgtgtactcccaggcctctcttggcatggacatccatgccagcgacctgaaccttcttacccggcggaagctgagtaggctgctggacccgcctgacccgctcggcaaagactggtgcctgctagcgatgaacctggggcttcccgatctcgtggctaagtacaacacaagtaacggtgctccaaaggactttctgcccagtccattacatgctttgttacgtgagtggacgacctaccccgaaagtaccgtaggtaccctcatgagcaaacttcgcgaactgggacggcgcgacgcggcggactttctcctcaaggccagctctgtgtttaaaattaatctggacgggaatggacaggaagcatacgctagtagttgcaactcaggcacttcctacaatagcataagctccgttgtgtcccgctag

SEQ ID NO: 151029 - DNA, 4293 bp, Artificial Sequence
  derived and/or modified sequence
atgaccgtgttccggcaggagaacgtggacgactactacgacaccggtgaggagctggggtctggccaattcgcagttgttaagaagtgcagagagaagagcaccgggttgcagtatgccgcgaagttcatcaaaaagcggcgtacaaagagctctcggaggggggtctcccgggaggatattgaacgagaagtgagcatcctgaaagagattcaacaccccaacgttatcactcttcacgaggtgtatgaaaataaaacagatgttatactgatccttgagctcgtcgcaggcggagaactgttcgacttcctggcagaaaaggagagcctgaccgaggaggaggccacagaattcctgaagcagatcttgaacggagtttactacctacattctctgcagatcgcccattttgacctgaaacctgagaacatcatgctgcttgaccgcaatgtgcctaagcctcggattaaaattatcgacttcggcctagcccacaagatagacttcgggaacgaatttaagaacatctttggcacaccagaatttgtcgcgcctgagattgttaattatgagccacttggactggaggccgatatgtggtcgattggcgtgattacttacattctgttgtccggggcatctccctttctgggagatactaagcaggagactttggcaaacgtctctgccgtcaactacgagtttgaagacgagtatttctcgaacacctccgctctggccaaggatttcattaggaggctgctcgtgaaagatcctaagaagcgcatgaccatccaagatagcctgcagcatccttggattaaaccgaaagacacccaacaggccctgagtcgaaaagcctccgccgtcaatatggagaagttcaagaaatttgcagctaggaagaagtggaagcagtcagtcagattaatttctctgtgtcagcgtctgagtaggtcatttctatcaaggagtaatatgtcagtcgctagaagcgatgatacccttgatgaggaggattcctttgtgatgaaagccattattcacgctattaatgacgataacgttccggggctgcagcacttattggggtcgttgtcaaactacgacgtgaatcagccaaacaagcatggcacccctccactgcttatcgcagccgggtgcggcaacattcaaatccttcaactgctcattaagaggggatccagaatcgatgtgcaggacaaagggggcagcaacgcggtgtactgggctgcccggcacgggcatgtcgacactctcaaattcttgagtgagaataaatgccctctcgatgtgaaggataaatccggagagatggccctgcatgtggctgcaagatatggccatgccgacgtagctcaactgctctgctcctttggatccaacccaaacatacaggataaagaggaggaaacccccctgcactgcgcagcgtggcatggttactattccgtggctaaagcgttgtgcgaggccggatgcaatgtaaatatcaaaaatcgcgaaggcgagacccccctactgacggccagcgcaagggggtaccatgatatcgtagaatgcttagccgagcatggggctgatcttaatgcatgtgataaagacggacacatagctctgcatctcgcagtgagaagatgccagatggaagttattaaaactctgttatcccagggttgtttcgtcgattaccaggatcggcatggaaacaccccattacacgttgcgtgtaaggatggaaacatgcctattgtggtggcactgtgcgaggccaattgcaacttggatatctcaaataagtatgggcgaacacctctacatctcgccgctaataacggtatccttgatgttgtgcgttacctctgtttgatgggcgcctctgtggaggcactgactaccgatggtaagactgctgaagatctcgctagaagtgagcagcatgagcatgttgccggacttttggctcgtctgcgaaaggacactcatcgcgggctgtttattcagcagctacgtccaacacagaacctgcagcctcgaatcaagctgaaactgttcggtcacagtggtagtggaaaaaccacacttgtggaatctcttaaatgcggtctgctgcgtagttttttcaggcgccgcagaccacgactgtcctccacaaactccagtaggttccctcctagcccattggcctccaagcctacagtgagcgtgtcgatcaacaacttgtaccccggctgtgagaacgtcagcgtccggtccaggtccatgatgttcgagcccgggttaactaaagggatgctggaggtatttgttgctcccacacaccatccacactgctctgccgatgaccagtctacaaaagcaatcgacattcaaaacgcgtatctgaacggcgtaggggactttagcgtttgggaattttctggcaacccggtttacttttgttgctacgattatttcgcagccaatgaccctacctcaatacacgttgtcgtcttctcactcgaagaaccttatgagatacagctgaatcaggtgattttttggctttcgttcttaaagtccctagtgcccgttgaggaacctatcgcctttggaggtaagctcaaaaatcccctgcaagtggtcttggtcgcaacgcatgcggacatcatgaacgtgcctcgcccagctggaggtgaattcggatacgataaagacacctctttattgaaagagatccgcaacagatttggcaatgatcttcacatctcaaacaaattgttcgttctggatgccggcgcgtcagggtcgaaggatatgaaggtgttgcgaaatcatctgcaagaaatcaggagccagatcgtctcagtgtgtccaccgatgacgcacctctgtgaaaaaattatctccaccctgccgagctggcgtaagttaaacggccctaatcagctcatgtctctgcagcaatttgtgtacgacgtgcaagaccaacttaatcctctggcatcagaagaggatctgagacgcatcgcgcagcagcttcactcaaccggcgaaatcaatatcatgcaatctgaaaccgtccaggacgtgttgctgctggatcctcgatggctgtgtaccaatgtgctgggtaagctgcttagcgtggagactccaagagctttgcaccactatcggggccgatacacggtggaagacatccagagacttgttccggattctgatgtggaagagcttctgcagatcctggacgctatggatatatgcgccagagatctgtcatctggaacaatggtggacgttcctgccctaataaaaacggataacctccaccggtcgtgggcagacgaggaggatgaagttatggtgtacggcggcgtgcggattgtgccagtagagcaccttacaccgttcccctgcggcatttttcacaaagttcaagttaacctgtgtcgctggattcaccagcagagcaccgaaggcgacgccgacattagactgtgggtcaatggctgcaagctggcaaaccgcggagctgagctcttagttcttctcgtgaaccatggtcaaggcattgaggtacaggtccgcggcctggagaccgaaaagatcaaatgctgtctcttgctcgacagcgtgtgcagtactattgaaaacgtaatggccaccacgctgcctggactgctgaccgtcaaacactacctgagtccacagcagctcagagaacatcatgagcccgtcatgatttaccagcctcgcgacttcttccgcgcacagacgctgaaagagacctcattaacaaacacaatgggaggatataaagaatccttcagttctatcatgtgcttcggctgtcacgacgtctactctcaggcctctctcggcatggatatccacgccagtgacctaaatctactgactagacgaaaacttagcagactgctggacccgcccgacccgctgggaaaagactggtgtctgctggctatgaatctcggcttgccggacttggtagctaaatataacacttctaatggtgcccccaaggatttcctgccctcaccccttcatgctttacttagggagtggacaacatacccagaaagcacggtgggaaccctgatgtccaagctgagagagttaggtaggcgggacgctgcagatttcttactgaaagcttcctcggtgttcaagatcaatctggatggaaatggtcaggaggcgtacgcgtcgtcatgcaactctggcacctcctataactcgatctctagtgtggtttcaagatag

SEQ ID NO: 151030 - DNA, 4095 bp, Artificial Sequence
  derived and/or modified sequence
atgaccgtgttccggcaggagaacgtggacgactactacgacaccggggaggaactcggatctgggcagtttgcagtggtgaagaagtgcagagagaagtccacagggttacagtatgcggcaaagttcatcaaaaaaaggcggacgaaaagctcacgccggggtgttagccgtgaggatatcgaaagggaggtgagcattttaaaagagatccagcaccccaacgtaatcacccttcacgaggtatatgagaataaaacagatgtgatcctgattctggagttggtcgctgggggtgagctgttcgattttctggcagagaaagaaagcttgacggaggaagaggccaccgagtttctgaagcaaattctcaatggagtatattatctgcacagcctccagattgcacacttcgacctaaagcccgaaaatatcatgcttctagacaggaacgtccctaaacctaggattaagatcatcgacttcggcctggcacacaaaatcgatttcgggaacgagttcaagaatatctttggcactcccgaattcgtggcaccagagattgtgaactacgagcctctgggtttggaggccgacatgtggtcaattggcgtgattacatatattctcctctctggcgcatctccattcctgggggatacaaagcaagagaccctggcgaacgtctcagcagtgaactatgagtttgaggacgagtacttttcaaatacgtctgcactggccaaagatttcatcaggagactgctcgtgaaggatcccaagaagcgtatgaccatccaggactctctgcagcacccatggattaagcccaaggacactcaacaggcgctttcccgcaaagcctccgctgtcaacatggagaagttcaagaagtttgctgctaggaagaagtggaagcaatcagttcgacttattagcctgtgtcagagactgagcagaagctttctctcacggtccaatatgtccgtcgctcgcagcgacgacacacttgacgaggaagattcttttgtgatgaaagctatcattcacgccataaacgatgacaatgttcctggcttgcagcatctcctgggtagcctgtccaactatgacgttaatcagccgaacaagcatggaacaccaccgctcctcattgcagctgggtgcggcaatatacagatattgcagctcctcataaaaaggggaagccgaatcgatgtgcaggataaaggaggcagtaatgcagtctactgggccgctaggcatggacatgtcgatactctcaagttcctctccgagaataaatgcccattggatgtcaaagataaaagcggcgaaatggccctgcacgtggcagctcgctatggtcacgcagacgtggctcagctactatgcagctttggctctaacccaaatatccaggacaaagaggaggagactcccctccactgcgcagcttggcacggctactatagcgtagccaaggctttgtgcgaggctggctgcaatgtcaacatcaaaaacagagagggcgagacacccttgctcactgcttctgccagaggctaccacgatatcgtcgaatgcttggccgaacacggggctgacctgaatgcctgtgacaaagatggccacatcgcactgcatctcgccgtccgacgctgtcagatggaagtgatcaagacgttactgagtcaagggtgctttgtggattatcaggacaggcacggcaacactcccctccacgttgcatgcaaagatggcaacatgcccatcgtcgtggcactctgtgaagcaaattgcaacctcgatattagtaataagtacgggcgcacacctctccacttggccgccaacaacggcatcctggacgtggtacgctatctgtgtcttatgggtgcatcggtcgaggcactcaccactgatgggaaaaccgcagaggatttggcccggtcagagcagcatgaacacgtggcagggcttctagcgaggctccggaaggatacccatcgcggacttttcattcagcagctgcgaccgacccaaaatctgcagcctcgaataaagctgaaattgtttggtcactcaggaagtgggaagacaacattggtggaatctctcaaatgcggcctcctgcggtcgtttttccgccgacgtcggccccgcctctctagcaccaactcctcaagattccctccgagccctcttgcctctaaaccgactgtgtcagtaagtattaacaacctgtacccaggctgtgagaacgtatccgtgaggtcgaggtccatgatgtttgagcccgggctgacgaagggaatgctggaggttttcgttgcacctacccaccatccacactgttcagccgacgaccagtcgacaaaagccatagatatccaaaatgcctatttgaatgccttcgggggaaaactcaaaaacccactgcaggtggtactggtggctactcacgccgacataatgaatgttccgaggcctgccggcggggagttcgggtacgacaaggacaccagtctgctgaaggagatccggaatagattcggcaacgaccttcatataagcaacaagctctttgtgctcgatgcgggcgccagcggctcaaaggatatgaaagtgctcaggaaccacctgcaggagatacggtctcagatagttagcgtttgtccccctatgactcatctgtgtgagaaaatcattagtactcttcccagttggcggaaactaaatggtcccaatcaactcatgtccctccaacagtttgtttacgacgtgcaggatcagctcaacccgctggccagcgaggaagacctgagaagaatagcccagcagctgcactctacaggggaaattaacatcatgcagtccgaaaccgtgcaggatgtcctgctgctggaccctaggtggctctgcacgaacgtcctgggtaagcttctctctgtcgagacccccagggcacttcaccactatagaggacgatacacagtggaggatattcagcgcctggtgccagacagcgacgtggaggaactgctgcaaatcttagacgcgatggatatttgtgcccgggatctgtcttctggtacaatggtggatgtcccagccctcattaagaccgataatctgcatcgatcatgggcagatgaagaggacgaggttatggtgtatggcggtgttcggattgtacctgtggagcacttgaccccctttccttgcggcattttccacaaggtccaagtgaatttgtgtcgttggattcaccagcagtctacggagggggacgccgatattcgcctgtgggtcaacggctgcaagcttgccaaccgaggcgctgaactattagtgttgctggtcaaccacggacagggtattgaagttcaggtgcgaggcttggaaaccgaaaagataaagtgttgtctactgctggattccgtgtgtagcaccattgagaacgtgatggccaccacactgccaggtcttctgactgttaagcactatctgagcccccagcaactgagagagcatcacgaacccgtgatgatttaccagccccgggattttttcagagcccagaccctgaaggaaacgagcctgaccaacaccatgggaggatacaaggagagcttttcttccattatgtgctttgggtgtcatgacgtctacagccaagcttcactgggcatggatattcacgcatccgacctcaaccttttgacccgcagaaagctgtctcggctgttagatcctcccgatccgctggggaaggactggtgtctattggccatgaatttaggtctcccggacctagtggctaaatacaatacttccaacggcgctcctaaagatttcctgccatccccgttgcacgctttgctccgtgagtggaccacctatccggagagcacggtgggaacactaatgagcaaactaagagaactgggccggcgagacgcagcggacttcctccttaaggcctcatctgtgtttaagatcaacttggacggaaatggacaagaagcctacgcctctagctgcaattccgggacatcatacaactctatttcctcggtggtatctcgctag

SEQ ID NO: 151031 - DNA, 4293 bp, Artificial Sequence
  derived and/or modified sequence
atgaccgtctttagacaggagaatgtggacgattattacgacacgggggaggagctgggaagcgggcagttcgctgtggtcaagaaatgcagggaaaagagtactgggctgcagtatgccgcaaagttcattaagaaacgccgtactaagtcaagtcggagaggcgtatcaagggaagatatcgagagagaagtctccattcttaaagagattcagcaccccaatgttatcacacttcacgaagtttacgagaacaaaactgacgtgatcttgattctcgaacttgtagctggaggggaattgtttgattttctagcagaaaaggagtccctcactgaagaggaagctaccgaattcctgaagcagatcctgaacggagtttattatcttcactctctgcaaattgcacacttcgacctcaagcccgaaaacatcatgcttctggacagaaacgttcctaagcctcggattaaaattattgactttggcctcgcacataaaattgattttggaaacgaattcaagaatatttttggcacacccgagttcgtcgcacctgagattgttaattacgaacctctgggactggaggccgatatgtggtcaatcggtgtgatcacttatattctgctgtcaggcgcatcacccttcctgggcgataccaagcaggagacactcgctaatgtaagcgctgtgaattacgaatttgaggacgagtacttctcgaacacatctgctttggcaaaggattttattcgcaggttactggtgaaggatcccaagaagcggatgacgattcaagactccctgcagcatccatggattaagccgaaagatacgcaacaagcgctctctcgcaaagcatcagccgttaatatggagaagtttaagaagttcgccgctagaaaaaaatggaagcagagcgtacggcttatcagtctatgccagcgcctttccagaagttttctgagcaggagcaacatgtcagtggcacgatctgatgatacactggacgaggaagatagctttgttatgaaagctattatacatgccatcaatgacgacaacgtgcctggccttcaacatctactgggatcccttagtaattacgatgtcaaccagcccaataagcacggaaccccgccactgctcatcgccgcaggctgtggcaatattcagatcctgcagttgctgatcaaacggggttctagaattgacgttcaggacaaagggggttcaaatgctgtgtactgggctgccaggcatggtcacgtggacacacttaaatttttgtcggaaaacaagtgcccattggacgtgaaggataagagcggtgaaatggccttgcacgtcgcagcccgttacggccacgctgatgtggctcagctcttatgctcatttgggtcgaacccaaacatccaggacaaagaggaggagaccccattgcattgtgctgcctggcatggctactacagcgtcgctaaagcgctctgtgaagctgggtgtaacgttaacatcaaaaatagagagggcgaaactccactgctcacagcaagtgcaaggggataccacgatatcgtggaatgtctcgctgagcacggggctgatctcaacgcctgcgacaaagatgggcacatcgcgttacatctagccgtccgcaggtgtcaaatggaggtgatcaaaacactgctttcacagggatgcttcgtggattaccaggacaggcacggcaatacacctctgcacgttgcttgtaaagacggcaatatgccaatcgtagttgccttgtgcgaagccaactgtaatctcgacattagtaataagtacggacgcactccactccacctggcggcaaataacgggattctagatgtggttaggtacctgtgtctgatgggcgcatccgtggaggccctgacaaccgacggcaaaactgcagaggatctggccaggtctgagcagcacgaacatgttgcagggctgctcgctcgtttgcgaaaagatacccacagagggctcttcattcaacagctacgtcccacgcaaaatctgcagccaaggattaagctgaaactgtttggccactccggatccggcaagaccacgttggttgagagcctgaaatgtggcctgttacggtcctttttcaggaggcgtagaccaagactgagctcaacaaattcatccaggttccccccttcacctctcgcaagcaaaccaaccgttagcgtttcaatcaataacctctacccgggatgtgaaaatgtcagcgtgagaagcaggagcatgatgtttgagcccggacttaccaagggaatgctggaggtgttcgtggcccctactcaccacccccactgcagcgctgacgatcagtctaccaaggccatagatattcagaatgcctatctgaatggggtgggagattttagcgtctgggaatttagtgggaatcctgtttacttctgttgctacgactacttcgccgctaacgaccccacgtccattcacgtggtggtgttttcactggaggaaccgtatgaaatacagttaaaccaggtgatcttttggctgtcatttctgaagagcctggttccagttgaggaacctattgccttcggcggtaaactgaagaacccgctccaggtggtgctggtcgctacccacgcagatattatgaacgtcccgagacccgcaggcggtgagtttgggtatgataaggatacttcattactgaaagagattcgaaataggttcggcaatgatcttcacattagcaataagctatttgttcttgacgccggtgcctctggtagtaaagacatgaaagttctcaggaatcatctgcaggaaataagatcccagatcgttagtgtgtgccctcccatgacacacttgtgtgagaagataatttctacgctcccctcctggaggaagctgaatggccctaatcagttgatgagcttgcaacagttcgtctacgatgtgcaagatcagttgaatcccttggcatccgaggaggatttacgcaggatagcccaacagctccacagcactggcgagataaatatcatgcagagcgagacggtacaggatgtgctccttttggatcctcgatggctgtgcactaatgttctggggaagctgctttccgtagaaactccacgggcactgcaccactatagaggacgctatacggtggaagacattcagcgtttagttcccgactccgacgtcgaagagctgcttcagatcctggacgcgatggatatttgcgctcgggacttaagcagcggcactatggtggacgttcctgccctcataaagacggacaatctgcatcgctcttgggccgacgaggaagatgaggtcatggtttatggcggagttaggattgtcccggtggaacatctcaccccgttcccgtgtgggatctttcataaggtgcaggtaaacctttgtcgatggatacatcagcagagcactgagggtgatgcggatattcggctctgggtgaacgggtgcaaactggccaataggggcgcagaactactcgtgctcctggtcaatcatggccagggcattgaagtccaagtccgcggattggaaacagagaaaatcaagtgctgtctcctcctcgactctgtgtgtagtaccatcgagaatgtcatggcaactaccctgcccggattattgactgtgaagcattatctcagtccccaacaattgagagaacatcacgagccagtgatgatttatcaaccccgtgactttttcagggcccagacattgaaagagacaagcttgaccaacaccatggggggatacaaggaaagtttctcttccataatgtgcttcggctgccatgatgtctattcgcaggccagtctgggtatggatattcatgcaagcgatctcaatcttcttaccagacggaaactttctcgtttattagacccccctgaccccctcgggaaagactggtgtctcctagccatgaatctgggcctgccggacctcgtagccaaatacaatactagcaatggtgcacccaaggattttctccccagccccttgcatgcactgttgagagagtggacaacttacccggagtctacagttggcacgctgatgtccaagctgcgtgagttggggagaagggacgctgccgatttcctcctgaaggcgtcaagcgtctttaaaatcaacctcgacggaaacggccaggaggcctatgccagttcctgcaattcaggaacttcttataactcaatctcctcagtggtgtctagatag

SEQ ID NO: 151032 - DNA, 4293 bp, Artificial Sequence
  derived and/or modified sequence
atgacagtgttcagacaggagaacgttgacgactactatgacaccggcgaggagctcgggtcggggcagttcgccgtggtaaagaagtgcagagagaaatctacagggctgcaatatgcggcaaagtttatcaagaaacgaaggacaaaaagttccaggcgaggggttagccgcgaagatattgaaagagaggtgtccattctgaaagaaatccaacatcccaacgtcataacgctgcacgaggtgtacgaaaacaagaccgatgtgatactgattctggaattagttgctggcggtgaattgttcgacttccttgccgagaaagagtccttaacagaggaggaggccaccgagttcctgaagcagatccttaacggagtatattatctgcactccttgcagatcgcccatttcgatctgaagccggaaaacataatgctcctggatcgcaatgtgcccaaaccaagaatcaaaatcattgacttcggattggcccacaaaatagactttgggaatgagtttaagaacatattcggtactccagaatttgtagcaccggagatcgtcaactatgagcctcttggcctcgaggccgatatgtggtcaatcggagtgataacttatatcttacttagcggagctagccccttcttgggcgacaccaaacaagaaacgcttgccaatgtctcagcagtgaactatgagtttgaagacgaatatttcagcaacacatcagctttggccaaagacttcatacgacgattgctcgtgaaggaccccaagaaacggatgactattcaggacagtctgcaacacccgtggatcaaaccaaaggacactcaacaggccctgtccagaaaagccagtgcagtgaatatggaaaagttcaagaaatttgcagccaggaaaaaatggaaacagtccgtgcgactcatttccctgtgccaaaggctatcaaggagttttctgagtaggagcaacatgtccgtcgccagatccgatgacacactggacgaagaggattccttcgtaatgaaagccataattcacgcaatcaacgatgataacgtgcctgggctgcagcacctgctcggcagcctcagtaactacgacgtgaatcagcctaacaagcatggaactcctcccctgctcatcgccgctggttgcggtaacattcagattctgcagcttctgattaagcggggaagccgcatagatgtgcaagataaaggaggctctaacgcggtttactgggccgctcgccacgggcacgtggacaccttgaaatttctgagcgaaaataagtgcccgcttgacgttaaagacaagtctggagagatggccctgcatgtggctgccagatatggtcacgcggacgtcgcccagctgctgtgcagcttcgggagtaatcctaatattcaggataaggaggaggagaccccgctccactgcgctgcgtggcatggatactactctgtggcaaaggccttgtgcgaggctggatgcaatgttaacatcaaaaacagggagggcgagacaccactgctcaccgcaagcgccagggggtaccacgatattgtggagtgcctggccgagcacggtgcagacctcaatgcttgcgataaagacggccatatcgccctgcacctcgccgtgcgccgatgtcaaatggaggtgattaagaccctgttaagccagggatgttttgtggactaccaggatcgccacggaaatacaccactgcatgtggcctgtaaggatggaaacatgcccattgttgtggcattatgcgaggcaaattgcaacctcgatattagtaacaagtacggcagaacccccttacatcttgcagcaaacaatggcatcttagacgtcgtcagatacttatgtctcatgggagcaagcgtggaggccctaacaactgatggcaaaacagcggaggatttagccaggtccgagcagcatgaacacgtcgccggtctgctagcacgactgaggaaagatacccaccgtgggctgttcattcagcagcttagacccacccagaacttgcagcctcgaatcaagctcaagcttttcggccattcagggagtggaaagacaaccctggtcgaatccttaaaatgtgggctccttcggtccttctttagacgcaggcgaccaaggctttcatcgacaaattcctcccgtttcccaccatctccactggcctcaaagccaaccgtcagcgtgtctattaataacctgtatcctgggtgtgaaaatgtgtcagtccggtcccgcagcatgatgttcgagccaggactgacaaaaggcatgttggaggtgtttgttgcaccaacccatcaccctcattgctcagcagacgatcagtcaaccaaagcgatcgatatccaaaatgcgtatcttaatggagtcggcgatttttcagtctgggagttctcaggcaaccctgtgtacttttgctgctatgactactttgctgccaatgacccaacttcaatccacgtggtggtgttttcgctcgaggagccatatgagattcagctgaaccaggtaatcttctggcttagctttctgaagtcactagttcctgtggaggagccaattgcattcgggggtaagctgaagaatcccctgcaggtagtgctcgtggcgactcacgctgacatcatgaatgtgccacgtcccgcaggtggcgagttcggttacgacaaagataccagccttctaaaggagattcgcaatcgatttgggaacgacctgcacatctctaataaacttttcgtcctggatgctggcgcatccggcagtaaggacatgaaagtcctgcggaaccaccttcaggaaattcgctctcagatcgtgtctgtgtgccctccaatgactcacttgtgcgagaagatcatctccacactccctagttggaggaagcttaatggccctaaccaactgatgtcgttacagcagttcgtatatgacgtccaggaccagctgaacccactcgccagtgaggaagacctgagacgtatcgctcagcagctgcatagtaccggggagattaacataatgcagagcgaaaccgtgcaggatgtgctcttgctggacccacggtggctctgcaccaacgttttaggaaagttgctgtcagtggagaccccaagggccctgcaccactaccggggacgctacaccgtcgaggatatccagcggctcgtgccagacagcgacgtggaggaacttctgcagatcctcgatgccatggacatttgtgcgcgagatctgtcttccgggaccatggttgacgtcccagccctgataaagacagacaacctgcataggagctgggccgacgaggaagacgaggtcatggtgtacgggggtgtaagaattgttccagtggaacacctcacaccttttccatgtgggattttccataaggtgcaggtgaatctgtgcaggtggattcaccagcaaagtaccgagggtgatgccgatatcaggttgtgggtcaacgggtgcaagctggcgaaccgaggtgccgagctcctggttctgttggtcaaccatgggcaaggcatagaggtacaggttaggggacttgaaaccgagaaaatcaagtgttgcctgctgctggatagcgtttgctcaacaatcgaaaatgtcatggcaacaactctccccggtttactaaccgtcaagcactatctgtcaccacagcagctgagggaacaccacgagccagtgatgatctaccaacctcgcgatttttttagggcccagacgctgaaggaaacctctctgaccaataccatgggcggatacaaggaatctttcagtagcatcatgtgcttcggatgccacgatgtctacagtcaagcaagcttaggcatggatatccacgcttctgacctgaacctgcttactcggagaaaactcagccgcctactggatccgcctgacccgctggggaaagactggtgcctgctggccatgaacctaggacttcccgacctggtcgccaaatacaacacctccaacggcgcacccaaggattttctgccctcaccccttcacgccctcctccgcgagtggaccacatatcctgaaagcaccgtaggcacgctcatgagcaagctgagagaattgggaagacgcgatgcggcagatttcctccttaaagcatcctccgtgtttaaaatcaacttggatggaaacggccaagaggcatatgcctctagctgcaacagtgggacctcatataactcaatttcatcagttgtaagtagatag

SEQ ID NO: 151033 - DNA, 4368 bp, Artificial Sequence
  derived and/or modified sequence
atgaccgtgttcagacaagagaatgtcgacgattactacgacacaggtgaagaattgggtagcggccagttcgccgtggtgaaaaagtgcagagaaaagtcgaccgggttgcagtacgccgctaaatttattaagaagagacggaccaaatccagtcgaagaggcgtgagccgagaagatatagaacgagaggtgtctattctgaaagaaatccaacaccctaacgtaataacactgcacgaggtttacgagaacaagacggacgtgattctgatcctggaactggttgccggaggtgagctgttcgattttctggcagaaaaagaaagcctcaccgaggaggaggctactgagtttctgaaacaaatccttaacggggtgtactacttgcattcgttacaaattgcgcactttgacctgaagcctgaaaacattatgttgctcgaccggaatgtgccaaaacctcgaattaagataattgattttggactggcacataagatagactttggcaatgagtttaagaatatattcggcacgcccgagttcgtggctccagagattgtcaactacgagccactggggcttgaagctgatatgtggtccattggcgtcatcacttatattctgctcagcggagctagcccgtttctcggcgatactaaacaagaaacattagcaaacgtgagcgcagtgaactatgaatttgaagacgagtacttcagtaatacatccgccttggccaaggatttcatccgccgactcctcgtcaaggatccgaagaagagaatgacaatacaggatagcttacaacacccctggatcaaaccaaaagatactcagcaagcgctctcaagaaaagcatcagccgtcaatatggagaaatttaagaagttcgccgcacggaaaaagtggaagcagagtgtgaggctcatctcgctgtgccagaggctgagccgctcatttctatcaagatctaacatgtctgtcgctcggagtgacgacaccttggacgaagaagactcattcgtgatgaaagccattattcacgccattaacgatgacaatgtacccggactccagcatctactcgggtccttgtctaactatgatgtgaatcaacccaacaagcacggaacccctcccctgttaattgcagctggctgcggaaatattcagatcctgcagttactgatcaaaagaggctcccgaattgatgtccaggataagggcggttcaaatgccgtatattgggccgcacgccatggccatgtggacaccctgaagtttctgagcgagaacaaatgccccctagacgtaaaagacaaaagcggtgagatggcactccatgtggccgcacgctacggtcacgcggacgtggctcagctgctatgttccttcggcagtaacccaaatatccaagacaaggaagaggaaacccccctacactgcgccgcatggcacgggtattattcagttgccaaggctctttgtgaggctggctgtaacgtgaacattaaaaacagggagggtgaaacacctttacttacagcaagtgccagaggctaccacgatatcgtcgagtgcttagctgaacatggagctgacctgaacgcatgcgacaaagatgggcatattgccttacacctcgctgtgaggcgctgtcagatggaagtgatcaaaacgcttctgtcccaaggctgtttcgtggactaccaggaccgccatgggaacactccactgcacgtggcttgtaaggatgggaacatgcctatagtggtggccctctgtgaggccaattgcaatctggacataagtaataaatatggtcggacccctcttcacctcgcagcaaacaatggtatcctggatgtcgtccgttacttgtgccttatgggggcttccgttgaagccctgaccacagacggcaagaccgccgaggacttagctcgatctgaacagcacgaacacgttgctggattactggctagattgcgcaaggatactcatagaggcttgttcattcagcagctgcgacccacccagaacttgcagcccagaattaaactgaaactgtttggccactccggatctggtaaaactactttagtggagtcgttaaaatgtgggctcctcaggtccttctttcgccgtagacggccacggctgtcaagcaccaattcctcgaggtttccaccatcccctctggcgagcaagcctaccgtgagtgtatcgatcaataatctatatccgggatgcgaaaatgttagcgtgcgcagccggtccatgatgtttgaaccaggcttgacaaagggaatgctcgaggtttttgtggcaccaacccaccatccccactgcagcgccgatgaccagagcactaaggccatagacatccagaacgcctacctcaacggcgtgggggacttctcagtatgggagtttagcgggaaccccgtttatttctgttgctatgactactttgccgctaatgacccaacaagcatccatgtcgtcgtgttttctctggaggaaccttacgaaattcagttgaatcaggttattttctggttaagctttctaaaaagcctggtgccagttgaagaaccaatcgcctttggtggaaaattaaaaaaccctctgcaggtggtcctcgtcgccacacacgcagatatcatgaacgtgcctcggcctgccggtggcgagtttggctatgataaggacacgtccctgctgaaagaaattagaaaccgtttcggaaacgatcttcatatatccaacaaacttttcgtcttggacgccggagcctccgggtctaaagacatgaaggtcctgagaaatcatttgcaagaaattcggtcacaaatcgtaagcaagacattgccgtttaccccggacatattggtgggggtcccactgtggcatcaccaaaaaatcggcggtagccccgtgtgtccgccaatgacgcacctctgcgaaaagataatcagtacgttaccctcctggcggaagctcaatggccctaaccagctgatgagcctccagcaattcgtatatgacgtgcaggatcagctcaatccgctagcctcggaagaggatctcaggcggatcgcacagcagctccactcaactggagagatcaacatcatgcagtccgagacagtacaggatgttctcctgctcgatccaagatggctgtgtacaaatgtcctgggaaaactgctgagtgttgagacccccagggccctgcatcattacagagggagatacaccgtcgaagatatccagagactcgtgccagactccgatgttgaggagctactgcagatcctcgatgccatggacatctgcgcgagggacctgtcttcaggcaccatggtcgacgtgccagctcttataaaaactgacaacctccataggtcatgggctgatgaagaggacgaagtcatggtgtacgggggagtgaggatagttccagtcgagcacttgactccatttccatgtgggatcttccacaaggtacaagtgaacctgtgtcgctggattcatcagcagtccactgagggtgacgcagacattagactctgggtgaacggctgcaaattggccaaccgcggtgccgaactgctggtgctacttgttaaccacggccagggtatagaagttcaggtccgtggcttggagactgagaagattaaatgctgcctgctgctggatagcgtatgttcgaccattgaaaacgtaatggcaactaccctgcccggattgctgaccgtaaagcattacctgagtccccaacagctgcgagagcatcacgaacctgtgatgatctaccagcctcgtgatttctttagggcccagacattgaaggagacatctctcacgaacaccatggggggatataaggagtccttcagttccataatgtgcttcggctgccacgacgtgtactctcaagcttccttaggtatggacattcatgcctctgacctgaacctgctgacacggaggaagctgtcgcggctcctggatcctccggatcctctgggcaaggactggtgcctgttggccatgaaccttggcctgccagaccttgtcgccaaatataataccagcaatggggcacccaaggattttctgccttccccattgcacgctctactgagagagtggacaacataccctgagagcacagttgggacgctaatgtctaaactcagagaactcggccgacgagacgctgccgactttcttctcaaagcttcaagtgtgtttaaaatcaatctggacgggaacgggcaggaagcatatgccagttcttgcaattctggcacctcctataacagcataagttccgttgtgtctcgctag

SEQ ID NO: 151034 - DNA, 4293 bp, Artificial Sequence
  derived and/or modified sequence
atgactgtgttccgccaggaaaatgttgacgattactacgatactggggaggaacttggctctggacagttcgcagtagtgaagaaatgtcgcgaaaaatctacgggcttgcagtacgcagccaagtttatcaaaaaacggaggacaaagagctccagaagaggagtgagtcgggaagatatcgagagagaggtgagcattttaaaagagatacagcacccgaatgtgatcaccttgcacgaagtctacgagaacaaaacagacgttattctgatcctggaactggtcgcaggtggagaactgtttgattttctggcagagaaagagtcactcacagaggaggaggcgacggagttcctgaaacagattttgaatggcgtgtattacctccactctctccagatcgcacactttgatcttaagccagagaacatcatgttgctggatcggaatgttccaaaaccaagaattaaaattattgacttcggactggcacacaaaattgactttgggaacgagtttaaaaacatattcggcacaccagagttcgtagccccagagatcgtgaattacgaacccctggggttagaagccgatatgtggtctatcggtgtgatcacatatatcttgctgagtggcgcaagtccttttctcggcgatacgaagcaggaaaccctagctaatgtctcggcagttaactacgaatttgaagatgagtacttttctaacacgagcgcccttgccaaggattttataagacgtctgctggtcaaagacccgaagaaaaggatgaccattcaggatagtctgcagcatccatggataaaaccaaaggacactcagcaggcactctcccggaaagcctcagctgttaacatggaaaagttcaaaaaattcgcagcaagaaagaagtggaaacagtccgtcaggctgattagtctatgccagcgactgtcccgctccttcctgtcccgcagcaatatgagcgtcgcacgctctgatgatactttggatgaagaagatagcttcgtcatgaaggctatcatccacgctatcaacgatgataacgtcccaggcctccagcatctgctgggctctctttcaaattacgatgtgaatcagcctaataagcatggtaccccacctctgctgatcgccgctggatgcggaaatattcagatactccaactactcatcaaacggggatcccggattgacgtacaagataaaggaggttctaatgccgtgtattgggccgctagacatggccatgtggatactctgaagtttctgagcgaaaataaatgtcccctcgacgtcaaagacaaaagcggagaaatggccctccatgtggcagccagatatggccacgctgatgttgcgcaactcttgtgctctttcggttcgaatccgaacatccaggacaaagaggaggagacgccgctccattgtgctgcctggcatggttattatagcgtggccaaagccctatgtgaggccggatgtaatgtaaacattaaaaaccgggaaggcgagaccccgctgctcactgcgtctgctagggggtaccatgatattgttgaatgtttagccgagcatggcgctgatcttaatgcctgcgataaggacggacatatcgccttgcatttagctgtccggagatgccagatggaagtgataaagacgttgctatctcagggctgtttcgtggactaccaagaccgccatggcaacacccctctccacgtagcttgtaaggatggcaacatgcccatcgtggtagcactgtgcgaggccaactgtaatcttgacatcagtaacaagtacgggaggacacccctgcacctagccgcaaataacggtatactggacgttgtaaggtacctgtgtttgatgggcgcaagcgtggaggcactgaccaccgatggcaaaacagcagaagacctcgccagaagtgaacagcacgaacatgtggccggtctcctcgccagattacggaaggatactcatagaggcctgttcattcaacagctgaggccgacccaaaacctgcaacctaggatcaaactcaagttgtttggccattccgggagtggcaaaactacactcgttgagagtttgaagtgcgggctactacgttcatttttccggcgacggcgtccccgtctctcctccaccaattcttccaggttccccccttccccactggctagtaaacccaccgtgtcagtgtccataaataatttgtaccctggatgcgagaacgtgagcgtgagatctcgaagcatgatgtttgagccaggcctcacgaaaggcatgcttgaagtctttgttgcccctacccaccaccctcactgttcggccgacgaccagagcactaaagccatcgatatccaaaacgcttacctgaatggtgtgggcgactttagcgtgtgggagttcagcggcaaccccgtatacttctgttgttatgattattttgccgcaaacgatcccacctccattcacgtagttgtcttttccctcgaagagccctatgaaatccagttaaatcaggtgattttctggttgtccttcctgaagagtcttgtgcctgtagaagagcctatcgcctttggtgggaagttgaagaatcccctgcaggtcgtgttagtcgctactcatgctgatatcatgaatgtcccacggcctgccggtggagagttcggctatgataaagatacgtctctgttaaaggagattagaaaccggttcggcaatgacctgcacatttcgaacaagctctttgtcttggacgcgggagccagtggttcaaaagatatgaaggtactgaggaatcaccttcaggagattagatcgcagatagtctctgtctgtcctccaatgacccatctgtgtgaaaaaatcattagtactttgccgtcctggcgcaaactgaacggccctaatcagttgatgtccctgcagcagttcgtctatgatgtgcaggaccaactgaatcctctggcatccgaagaagaccttcggcgtatcgctcaacaactgcattcaacgggcgagattaacatcatgcagtcggaaacggtgcaagacgtcctgctgctggaccccaggtggctttgcacgaacgtactgggcaagttgctgtccgttgagaccccacgtgcactccaccactatagaggtagatataccgtggaagacattcagcgacttgtaccagacagcgatgtggaggaattgctccagattttggacgccatggacatctgcgccagggacctaagctcaggaactatggtcgatgtgcccgctctcatcaagaccgataatctccaccgatcttgggccgatgaagaagatgaagtgatggtatacggcggtgtgcgtatagtgcccgtagaacacctcacaccatttccctgtggaatcttccataaggtgcaggtgaacctgtgccggtggattcaccagcagagcacagaaggcgacgctgacatccggttgtgggtgaatgggtgtaagttagccaatcgaggtgctgagctgctggtgcttctcgtgaatcacggccaggggatcgaagttcaggtgcggggactcgaaacagagaaaatcaaatgttgcctgctgttggattcggtgtgctcaactatcgagaacgtgatggcaaccacgctgcccggtctactgaccgtaaagcattacctgagcccccaacagttgcgagaacatcatgagcccgtgatgatatatcagccccgagacttttttcgcgctcaaaccctgaaggagacctccctgacgaatactatgggtggctacaaggagtcctttagcagtatcatgtgtttcggttgccacgatgtgtacagtcaggcgagtctcggcatggatattcatgcttccgacctcaatctgttgacccgccgaaaactttccagactgctggatcccccagatcccctgggtaaggattggtgcctcctggccatgaatctaggcttgccggacctggtggccaaatacaacaccagcaacggggcaccaaaagattttcttcctagccctcttcacgctctgctgcgtgaatggactacctaccctgaatctaccgttgggaccctgatgtcaaagctgcgggaactgggcagacgcgatgctgcagactttcttctgaaggccagctctgtcttcaagatcaatctcgacggtaacggtcaggaggcctacgccagtagttgtaattcaggcacttcatataatagcattagcagtgtggtcagccggtag

SEQ ID NO: 151035 - DNA, 4095 bp, Artificial Sequence
  derived and/or modified sequence
atgaccgtcttcaggcaggaaaatgttgacgattactacgacaccggcgaagaactgggaagcggccagttcgcagtagtcaagaaatgtcgtgagaaatcaactggtctgcagtatgctgctaaatttatcaagaaacgccgtacaaaatcatccagaagaggcgtatcgagggaggacatagagagagaggttagcattctcaaggagatccagcaccctaatgttatcacactgcacgaagtgtacgaaaataagacagacgtgattttgatcctcgagctggtagcaggcggagaattgttcgatttcctggccgagaaagagtcccttactgaggaggaagccactgagttcttgaagcagatcctgaacggtgtatactaccttcactctctccagatcgcccacttcgacttgaaaccagaaaacattatgctcctagaccggaacgtccccaagccccgaatcaagatcatagatttcggactggcacataagattgattttggcaatgagttcaagaacattttcgggacccccgaattcgtggctcctgagattgttaactatgaaccgcttggactggaggctgacatgtggtccattggagttattacatatatcctgctaagtggagcctcaccgtttctcggcgacacaaaacaagagaccttggcaaatgtttctgctgtgaattacgaatttgaggacgagtactttagtaacacctctgccctggcaaaggatttcatcagaagattactggtgaaagaccctaagaaaagaatgacaatccaggactccctgcagcacccctggataaagcctaaggacacccagcaagccctctcgcgcaaagcatctgctgtgaacatggagaagtttaaaaagttcgctgccaggaagaagtggaagcagtctgtgaggctaatttccctctgccaacggctcagccggtcttttctctcacggagcaacatgagcgtggcaagatctgatgacactctggacgaggaggactcatttgtcatgaaggcaattattcatgccatcaatgacgacaatgtgccgggactacaacatttgctgggaagcttatccaactacgacgtgaaccagccgaacaagcacggcactcctcccttgctaatcgcggcagggtgcgggaatatacagatccttcagttgcttattaagcgtggttcgcgcatagacgtgcaggataagggcggaagtaatgctgtttattgggcggcacgtcatggccacgtggataccttaaagtttctctccgaaaacaagtgccctctcgatgtcaaagacaagtctggggagatggcattacatgttgccgcacggtatgggcatgctgacgtcgcccaattgctgtgttctttcgggtccaaccctaatatacaggacaaggaggaggaaactccactgcattgtgcagcttggcatgggtactactccgtcgccaaagccttatgtgaggcagggtgtaacgtcaacattaaaaatagagagggcgaaaccccactattgacggcttccgctaggggctaccatgacatcgtcgagtgcctggctgagcacggcgctgacctcaatgcttgcgacaaggacgggcatatagccctgcatcttgcggtcaggcgatgtcagatggaggtaataaagacacttttgagccaggggtgttttgttgactaccaggaccggcatggcaacactcctctgcacgtggcatgtaaggatggcaacatgcctatcgtagtggcactctgcgaagctaattgtaatttggatattagcaacaaatacggcagaactccgcttcatttggccgctaataacggcatcctggatgtcgttagatacctctgcctcatgggggcaagcgtggaggcgttaacgacagatggcaagactgccgaggacttggccagatccgaacagcacgagcacgtggccggtttgctagcgagacttaggaaagacactcaccgcggtctgttcatacagcagctgagacccactcaaaatttacaaccaagaatcaagctaaaactgtttggccacagcggctccggtaaaaccacattggtcgaatccttgaaatgtgggctgctgagatcatttttccgcagacgccgtccgcgtctatcctctactaattcttccaggttccccccatccccactcgcttcaaaaccgaccgtgtcagtctcaatcaacaatctctatccagggtgcgagaacgtctcagtgagaagccggtctatgatgtttgagccgggtcttaccaaggggatgctcgaagtattcgtagcgccaacccaccacccacactgcagtgccgatgaccagtccactaaggcaatcgacattcagaacgcatacctaaatgcgtttggcggtaagctgaaaaatcccctccaagttgtgctggtggccacgcacgctgacataatgaatgttcctcgccctgccggtggcgagtttggttatgacaaagacacgtccctgctgaaagaaatcaggaaccgcttcggcaacgatctacacatttcaaacaagctttttgttctggatgctggagccagcggtagcaaagatatgaaagtgctgcgtaatcacctccaggaaatccgctcccagattgtgtctgtctgtccgcctatgacacatttatgcgaaaagatcatcagcactttgccctcctggcggaagctgaacgggccaaaccagctaatgtccctgcagcaatttgtttacgacgtacaggaccagctcaaccctctggcatcggaagaggatctgcggaggatcgctcagcaactgcatagcacgggggagatcaacataatgcagagcgaaacagtccaggacgtactcttactcgaccccaggtggctgtgcactaacgtgttgggcaagctcttatccgttgagactccgagagcattgcatcactatcggggtcgttacacagtggaagacatccagagactcgtacccgatagcgatgtggaagaactccttcaaattctggatgcaatggatatatgcgccagagatctgtcttctgggacaatggtcgatgtccccgcactgatcaagaccgacaacctgcaccgcagctgggcggatgaagaagacgaggtgatggtgtatggcggtgttcggattgtacccgttgagcatctgactccttttccatgcggtatctttcacaaagtccaggtgaacttgtgtcgctggatacaccagcagtccactgaaggcgacgccgatatacgcttatgggtgaatgggtgcaaactggctaacaggggtgcagaactgctcgtgctcctggttaaccacgggcaagggattgaggtgcaggttagaggactggagacggagaagatcaagtgctgtctgctcctggatagcgtttgtagcaccattgagaacgtaatggccaccactctgcctggtctgctgaccgtgaagcactatctcagtccccaacagctacgagagcaccacgagcctgttatgatttaccagccacgggatttctttcgcgcacaaacactcaaggaaacctcacttacgaatacgatgggcggatataaagaatcatttagcagcatcatgtgctttggctgccatgatgtgtactcccaggcctcattggggatggacattcacgcttctgatttgaacctgttgacccgaaggaaactgtcaagactgttagacccccctgacccactgggtaaggattggtgcttgcttgctatgaacctcggacttcctgatctcgttgccaagtataacactagcaatggagcacctaaggactttctgccgagcccactccacgccctcttgagggagtggactacctacccagagagcacagttggcacgctcatgtccaagttaagggagctgggccgacgagatgccgcagactttttactgaaagctagctcagtattcaagattaatttggatggcaacgggcaggaagcttacgccagctcatgcaactccggaacttcctacaactctatctcctccgtcgtgagccgatag

SEQ ID NO: 151036 - protein, 740 aa, Artificial Sequence
  derived and/or modified sequence
MAAFSEMGVMPEIAQAVEEMDWLLPTDIQAESIPLILGGGDVLMAAETGSGKTGAFSIPVIQIVYETLKDQQEGKKGKTTIKTGASVLNKWQMNPYDRGSAFAIGSDGLCCQSREVKEWHGCRATKGLMKGKHYYEVSCHDQGLCRVGWSTMQASLDLGTDKFGFGFGGTGKKSHNKQFDNYGEEFTMHDTIGCYLDIDKGHVKFSKNGKDLGLAFEIPPHMKNQALFPACVLKNAELKFNFGEEEFKFPPKDGFVALSKAPDGYIVKSQHSGNAQVTQTKFLPNAPKALIVEPSRELAEQTLNNIKQFKKYIDNPKLRELLIIGGVAARDQLSVLENGVDIVVGTPGRLDDLVSTGKLNLSQVRFLVLDEADGLLSQGYSDFINRMHNQIPQVTSDGKRLQVIVCSATLHSFDVKKLSEKIMHFPTWVDLKGEDSVPDTVHHVVVPVNPKTDRLWERLGKSHIRTDDVHAKDNTRPGANSPEMWSEAIKILKGEYAVRAIKEHKMDQAIIFCRTKIDCDNLEQYFIQQGGGPDKKGHQFSCVCLHGDRKPHERKQNLERFKKGDVRFLICTDVAARGIDIHGVPYVINVTLPDEKQNYVHRIGRVGRAERMGLAISLVATEKEKVWYHVCSSRGKGCYNTRLKEDGGCTIWYNEMQLLSEIEEHLNCTISQVEPDIKVPVDEFDGKVTYGQKRAAGGGSYKGHVDILAPTVQELAALEKEAQTSFLHLGYLPNQLFRTF

SEQ ID NO: 151037 - protein, 16 aa, Artificial Sequence
  derived and/or modified sequence
MAAFSEMGVMPEIAQA

SEQ ID NO: 151038 - protein, 622 aa, Artificial Sequence
  derived and/or modified sequence
MAAFSEMGVMPEIAQAVEEMDWLLPTDIQAESIPLILGGGDVLMAAETGSGKTGAFSIPVIQIVYETLKDQQEGKKGKTTIKTGASVLNKWQMNPYDREVKEWHGCRATKGLMKGKHYYEVSCHDQGLCRVGWSTMQASLDLGTDKFGFGFGGTGKKSHNKQFDNYGEEFTMHDTIGCYLDIDKGHVKFSKNGKDLGLAFEIPPHMKNQALFPACVLKNAELKFNFGEEEFKFPPKDGFVALSKAPDGYIVKSQHSGNAQVTQTKFLPNAPKALIVEPSRELAEQTLNNIKQFKKYIDNPKLRELLIIGGVAARDQLSVLENGVDIVVGTPGRLDDLVSTGKLNLSQVRFLVLDEADGLLSQGYSDFINRMHNQIPQVTSDGKRLQVIVCSATLHSFDVKKLSEKIMHFPTWVDLKGEDSVPDTVHHVVVPVNPKTDRLWERLGKSHIRTDDVHAKDNTRPGANSPEMWSEAIKILKGEYAVRAIKEHKMDQAIIFCRTKIDCDNLEQYFIQQGGGPDKKGHQFSCVCLHGDRKPHERKQNLERFKKGDVRFLICTDVAARGIDIHGVPYVINVTLPDEKQNYVHRIGRVGRAERMGLAISLVATEKEKVWYHMVQRDAVTI

SEQ ID NO: 151039 - DNA, 2223 bp, Artificial Sequence
  derived and/or modified sequence
atggccgccttcagcgagatgggcgtgatgcccgagatcgcccaggccgtggaggagatggactggctgctgcccaccgacatccaggccgagagcatccccctgatcctgggcggcggcgacgtgctgatggccgccgagaccggcagcggcaagaccggcgccttcagcatccccgtgatccagatcgtgtacgagaccctgaaggaccagcaggagggcaagaagggcaagaccaccatcaagaccggcgccagcgtgctgaacaagtggcagatgaacccctacgacagaggcagcgccttcgccatcggcagcgacggcctgtgctgccagagcagagaggtgaaggagtggcacggctgcagagccaccaagggcctgatgaagggcaagcactactacgaggtgagctgccacgaccagggcctgtgcagagtgggctggagcaccatgcaggccagcctggacctgggcaccgacaagttcggcttcggcttcggcggcaccggcaagaagagccacaacaagcagttcgacaactacggcgaggagttcaccatgcacgacaccatcggctgctacctggacatcgacaagggccacgtgaagttcagcaagaacggcaaggacctgggcctggccttcgagatccccccccacatgaagaaccaggccctgttccccgcctgcgtgctgaagaacgccgagctgaagttcaacttcggcgaggaggagttcaagttcccccccaaggacggcttcgtggccctgagcaaggcccccgacggctacatcgtgaagagccagcacagcggcaacgcccaggtgacccagaccaagttcctgcccaacgcccccaaggccctgatcgtggagcccagcagagagctggccgagcagaccctgaacaacatcaagcagttcaagaagtacatcgacaaccccaagctgagagagctgctgatcatcggcggcgtggccgccagagaccagctgagcgtgctggagaacggcgtggacatcgtggtgggcacccccggcagactggacgacctggtgagcaccggcaagctgaacctgagccaggtgagattcctggtgctggacgaggccgacggcctgctgagccagggctacagcgacttcatcaacagaatgcacaaccagatcccccaggtgaccagcgacggcaagagactgcaggtgatcgtgtgcagcgccaccctgcacagcttcgacgtgaagaagctgagcgagaagatcatgcacttccccacctgggtggacctgaagggcgaggacagcgtgcccgacaccgtgcaccacgtggtggtgcccgtgaaccccaagaccgacagactgtgggagagactgggcaagagccacatcagaaccgacgacgtgcacgccaaggacaacaccagacccggcgccaacagccccgagatgtggagcgaggccatcaagatcctgaagggcgagtacgccgtgagagccatcaaggagcacaagatggaccaggccatcatcttctgcagaaccaagatcgactgcgacaacctggagcagtacttcatccagcagggcggcggccccgacaagaagggccaccagttcagctgcgtgtgcctgcacggcgacagaaagccccacgagagaaagcagaacctggagagattcaagaagggcgacgtgagattcctgatctgcaccgacgtggccgccagaggcatcgacatccacggcgtgccctacgtgatcaacgtgaccctgcccgacgagaagcagaactacgtgcacagaatcggcagagtgggcagagccgagagaatgggcctggccatcagcctggtggccaccgagaaggagaaggtgtggtaccacgtgtgcagcagcagaggcaagggctgctacaacaccagactgaaggaggacggcggctgcaccatctggtacaacgagatgcagctgctgagcgagatcgaggagcacctgaactgcaccatcagccaggtggagcccgacatcaaggtgcccgtggacgagttcgacggcaaggtgacctacggccagaagagagccgccggcggcggcagctacaagggccacgtggacatcctggcccccaccgtgcaggagctggccgccctggagaaggaggcccagaccagcttcctgcacctgggctacctgcccaaccagctgttcagaaccttctag

SEQ ID NO: 151040 - DNA, 2223 bp, Artificial Sequence
  derived and/or modified sequence
atggcggctttcagtgagatgggagtgatgcccgagatcgctcaagctgttgaagagatggactggttactgccaaccgatatccaagctgagtctattccccttatcctaggaggcggcgacgttctaatggcagctgagaccggctcaggaaaaacaggggctttcagtatacccgtaatccaaatcgtgtacgaaaccctgaaagatcagcaggaaggaaaaaagggcaaaactacaattaagacgggtgcctccgttctgaacaagtggcagatgaacccatacgacaggggaagcgctttcgctattggctctgatgggctctgctgtcagtccagagaagttaaggaatggcacgggtgtcgcgcaactaagggattgatgaaaggtaagcactactacgaggtgagttgccacgatcaaggcctctgtagagtgggatggtcaactatgcaagcctccctggatctgggaacggataagttcggtttcggatttggaggaaccggcaagaagtcacacaataagcagtttgacaactatggagaggagttcactatgcatgacaccatcgggtgctatttggatatcgacaagggccatgtgaagttctccaagaatgggaaggacctagggcttgcattcgaaatcccaccacatatgaagaaccaggctctgtttcctgcttgcgttctcaagaacgccgagcttaaattcaatttcggagaggaggagtttaaatttccccctaaggatggattcgtcgcactctccaaggcccccgacggctacatcgtcaaatcgcaacattccgggaacgcccaagtaacacagaccaaattccttccaaacgccccaaaagcactgatcgtcgagccgtcaagggagctagccgagcaaacactcaacaatattaagcaattcaaaaagtacattgacaacccaaagctaagggagctgctgatcattgggggtgtggccgccagagaccagctgagtgttctggaaaacggcgttgatattgtggtcggaacccctggcaggttagacgacctagtgtcaacgggcaagttaaatctgagccaggtgcgattcctagtcctggatgaggccgacggcctcctgagccagggatatagcgacttcatcaaccggatgcacaatcagatcccgcaagttacgtcagacgggaaaagactgcaggtgatcgtttgttctgcaactcttcattctttcgatgtcaagaagctttcagaaaaaatcatgcacttcccaacgtgggtagacctgaaaggagaggattcagtgcctgacactgtccatcacgtggtcgttcccgtgaaccccaaaacagaccgcctgtgggaacgactgggtaagagccatatccgaacagatgacgttcacgcaaaggataataccaggcctggggccaattccccagaaatgtggtccgaggccatcaaaatcttaaagggggagtacgctgtgagagcgatcaaggagcacaaaatggaccaggctataatcttttgtcgaaccaaaattgattgtgataatctggagcagtatttcatccagcaaggcggagggcctgataagaaaggacaccagttctcttgtgtctgcctgcacggcgacagaaaaccccacgagaggaagcagaatttggaacgcttcaagaagggtgacgttcgcttcctcatctgtaccgacgtagcagcacggggcatcgatatccacggcgtaccctacgtgattaacgtcaccctgccagatgagaagcagaattatgtacatcgaatagggagggtaggaagagctgagcggatgggtctggccatttcactggttgctacagaaaaggagaaggtctggtaccacgtttgctccagtagaggtaaaggttgttacaacactagattaaaagaggacggtggttgcactatctggtataatgagatgcaactcctgtcagagatagaggaacacctcaattgtactatatcacaagtcgagcccgacattaaagtcccagtagacgagtttgatggcaaggtcacttatggtcagaagcgagccgccggcggcggcagctataaggggcacgttgacatcctcgcaccaacagtacaggaactcgccgccctggaaaaggaggcccagacgtcatttcttcatctgggctatcttcccaaccagcttttcaggactttctag

SEQ ID NO: 151041 - DNA, 2223 bp, Artificial Sequence
  derived and/or modified sequence
atggccgccttcagcgagatgggcgtgatgcctgagatcgcccaggccgtggaggagatggactggctgctgcccacagacatccaggccgagagcatccccctcatcctgggcggcggagatgtgctgatggctgctgagaccggcagcggcaagacaggagccttcagcatccctgtgatccagatcgtgtatgagaccctgaaggaccagcaggagggcaagaagggcaagaccaccatcaagacaggagcctctgtgctgaacaagtggcagatgaacccctatgaccggggcagcgcctttgccatcggcagtgatggcctgtgctgccagagccgggaggtgaaggagtggcacggctgccgggccaccaagggcctgatgaagggcaagcactactatgaggtgtcctgccacgaccagggcctgtgccgggtgggctggagcaccatgcaggccagcctggacctgggcacagacaagtttggatttggatttggaggcaccgggaagaagagccacaacaagcagtttgacaactacggggaggagttcaccatgcatgacaccatcggctgctacctggacatcgacaagggccacgtgaagttcagcaagaatggcaaggacctgggcctggcctttgagatccccccccacatgaagaaccaggccctcttccctgcctgtgtgctgaagaatgctgagctgaagttcaactttggagaggaggagttcaagttcccccccaaggatggctttgtggccctgagcaaggccccagatggctacatcgtgaagagccagcacagcggaaatgcccaggtgacccagaccaagttcctgcccaatgcccccaaggccctgattgtggagcccagccgggagctggccgagcagaccctgaacaacatcaagcagttcaagaagtacatcgacaaccccaagctgcgggagctgctgatcatcggcggcgtggccgcccgggaccagctgtctgtgctggagaatggagtggacatcgtggtgggcaccccaggccgcctggatgacctggtgtccacaggcaagctgaacctgagccaggtgcgcttcctggtgctggatgaagcagatggcctgctgagccagggctacagcgacttcatcaacaggatgcacaaccagatcccccaggtgaccagtgatggcaagaggctgcaggtgattgtgtgcagcgccaccctgcacagctttgatgtgaagaagctgtctgagaagatcatgcacttccccacctgggtggacctgaagggggaggacagcgtgcctgacacagtgcaccacgtggtggtgcctgtgaaccccaagacagaccggctgtgggagcggctgggcaagagccacatcagaacagatgatgtgcacgccaaggacaacaccaggcctggggccaacagccctgagatgtggagcgaggccatcaagatcctgaagggggagtatgctgtgcgggccatcaaggagcacaagatggaccaggccatcatcttctgcaggaccaagattgactgtgacaacctggagcagtacttcatccagcagggcggcggccctgacaagaagggccaccagttcagctgtgtgtgcctgcacggggacaggaagccccatgagaggaagcagaacctggagcgcttcaagaagggagatgtgcgcttcctgatctgcacagatgtggccgcccggggcatcgacatccacggcgtgccctacgtgatcaacgtgaccctgcctgatgagaagcagaactacgtgcacagaattggccgggtgggccgggcagagaggatgggcctggccatcagcctggtggccacagagaaggagaaggtgtggtaccacgtgtgcagcagccggggcaagggctgctacaacacccggctgaaggaggatggcggctgcaccatctggtacaatgagatgcagctgctgtctgaaattgaggagcacctgaactgcaccatcagccaggtggagccagacatcaaggtgcctgtggatgaatttgatggcaaggtgacctacggccagaagagagctgctgggggcggcagctacaagggccacgtggacatcctggcccccaccgtgcaggagctggccgccctggagaaggaggcccagaccagcttcctgcacctgggctacctgcccaaccagctgttccgcaccttctag

SEQ ID NO: 151042 - DNA, 2223 bp, Artificial Sequence
  derived and/or modified sequence
atggccgccttcagcgagatgggcgtgatgcccgagatcgcccaggcagtggaagaaatggattggctgctgccaacagacatacaggcagagtctatccctctaatactgggtggaggtgatgtcctgatggcggctgagaccggttccggaaaaaccggcgcattctccattccagttattcagattgtgtacgaaaccctcaaggatcagcaggaggggaagaagggcaagaccactataaaaacaggcgcatctgtacttaataaatggcagatgaacccatatgataggggaagtgcgtttgctattgggagcgacggcctgtgttgccagtcgagagaggttaaggagtggcacgggtgtagggcgacaaagggcctcatgaaagggaaacactactacgaggtcagctgccatgaccagggtttgtgtcgggtgggatggtctaccatgcaggccagccttgacctggggaccgacaagtttgggttcggctttgggggaaccggcaagaaatcacacaataaacaattcgataactacggtgaagagttcactatgcacgacaccataggttgttatctggatatagataagggccacgtgaagttcagcaagaacggcaaagatctgggactcgcgtttgagatcccaccccatatgaagaaccaggccctgttcccagcctgtgtcctaaagaacgcagagctgaagtttaatttcggcgaggaagaatttaaattcccaccgaaggatggctttgtcgccctgtccaaggcgccagatgggtacattgtaaaaagccagcactccgggaacgcacaggtcacgcaaaccaagttcctccctaacgctcccaaagccctcatagtggagccctctcgggaactggctgagcagaccctgaataacatcaaacagttcaaaaagtatatagacaaccccaagctgagagagttactgattatcggtggggtcgccgctagagaccagctgagtgtgcttgaaaacggcgttgacattgtggttggcaccccgggtaggcttgatgacctggtatcaactggcaagctcaatttgtcacaggttaggttcctcgtcctagacgaggccgacggactactcagccaggggtattcagacttcattaaccgtatgcacaaccagatccctcaggtaacatccgatggcaaacgtttacaggtgatcgtgtgctccgcaacgctccatagtttcgatgtcaagaagctgtcagaaaagattatgcatttcccaacctgggtcgatctcaagggtgaggatagtgttccagataccgtgcaccacgtagtagtaccagtaaacccgaagacagatcgcctgtgggagcgtctggggaaatcacacatccggactgacgatgtgcatgccaaagacaacacacggccaggcgcaaattctccagagatgtggtcagaagctataaaaatcctgaagggggagtatgcagttagggccattaaagagcataagatggatcaagcaatcatcttctgccgcacgaagattgattgtgataacctggaacaatacttcattcagcagggtggtgggcctgataaaaaaggccaccagtttagctgtgtttgtctccacggtgatagaaaacctcatgaacgaaagcaaaacttggagagatttaagaagggagacgtgaggttccttatatgcactgatgtggccgctcgcgggatcgacatccacggcgtgccctacgtgatcaacgtgaccctgcctgatgagaagcagaactatgtccatcgcattgggagggtgggaagggctgaacgaatgggactggccatctcgctggtggcaactgaaaaagagaaggtgtggtaccacgtttgcagtagcaggggtaagggctgttataatactcggctgaaagaggatggaggctgcacaatttggtacaacgagatgcagctgttgtcagaaatcgaggagcatctcaattgtaccatttcccaggtcgagccagatatcaaagtcccagtcgacgagtttgacggaaaggtcacgtacgggcagaaacgcgcggctggggggggttcttataagggccatgtggatatcctcgcaccaactgtccaagagctggcggccttggaaaaggaagcccagactagctttcttcatctgggctatttgcccaaccagctgtttcgcacgttctag

SEQ ID NO: 151043 - DNA, 2223 bp, Artificial Sequence
  derived and/or modified sequence
atggccgctttttccgaaatgggcgttatgcctgaaatcgctcaggctgtcgaggaaatggattggctcctgcccacggacatccaggccgaatccattcccctgattctgggaggaggcgacgttctgatggccgctgaaacaggttccggaaagaccggagcctttagtataccggtgatccagatcgtttacgagactctgaaggaccagcaggaagggaagaagggcaagacaacaattaagaccggcgcaagcgtgttgaataaatggcagatgaatccctacgataggggatccgccttcgccatagggagtgatggcctttgctgtcagtctcgtgaagtgaaggagtggcacggttgtcgcgctaccaaggggctaatgaaaggaaaacattattacgaggtctcctgtcacgaccaaggcctctgccgagtcgggtggtccaccatgcaggcttccctcgatctggggaccgacaaatttggattcggctttggtggtaccggaaaaaagagtcacaacaagcaatttgataattacggtgaagaatttacaatgcatgacaccatcggttgctatttagatattgataaaggacatgtgaaattttcaaagaacgggaaagatctgggactcgcatttgagatccccccacacatgaagaaccaggccctgttccctgcatgtgttctaaagaacgcggaattaaaatttaacttcggggaagaggagtttaagtttcctcctaaggatggcttcgttgccctgtcaaaggccccagacggttacattgtgaagtctcagcacagcgggaacgcccaggtcactcaaactaaattcctcccaaatgctccaaaggccctgatagtggagccgtccagggaactggctgagcaaaccctgaataatatcaagcagttcaaaaagtatatcgataatcctaagcttagagagttactgatcattggcggagtcgctgcaagagatcagcttagtgtgctggaaaacggtgtggacattgtggtcggaacccccggtaggctcgatgatctggtgagtactggcaagttgaacctttctcaagtgagattcctggtgttagatgaagctgacgggctcttgagccagggatacagcgattttattaaccgtatgcacaaccagatcccacaggttacctccgatggaaagagactgcaagtcatagtttgttctgccactctgcattcatttgatgtgaagaagctgagcgagaagattatgcatttccctacatgggttgatctcaaaggtgaagacagcgtgccagataccgtccatcacgtcgtggtgccagtgaatccaaagacagacaggctctgggaaagacttggcaaatcccatattcgaaccgacgatgttcatgctaaggacaacactcggcctggagcaaatagccctgagatgtggtcagaggccatcaaaatactcaagggagagtatgccgtaagagccataaaagagcacaagatggatcaggccattattttctgcaggaccaagatcgattgtgacaacctcgaacagtacttcatccagcagggtgggggacccgacaagaaaggacatcaattcagttgcgtctgtttacacggcgaccggaagccccacgaacgcaaacaaaatttggaaagatttaagaagggcgatgtgcgcttcctgatctgtaccgatgttgccgctagggggatcgatattcatggagtgccctacgtgattaatgtaacgctccccgacgagaagcagaattacgtgcaccgaattgggagggtgggcagggcggaacgcatgggactggcaatctccctcgtcgccactgagaaagagaaggtatggtaccacgtttgctcgtcccgaggaaagggctgctataatacacgcctgaaagaggacggcggttgcaccatttggtataatgagatgcagctgctgtctgagatagaagagcacttgaattgcacgattagtcaggttgaaccagatatcaaagttccagtggatgagtttgacggcaaagtcacttacgggcaaaagagggccgcagggggaggctcctataaaggtcatgtggatattttagcccctaccgtgcaggaactggccgcactagagaaagaagcccaaacaagcttccttcatctcggctatctgcccaatcagcttttccgcactttctag

SEQ ID NO: 151044 - DNA, 2223 bp, Artificial Sequence
  derived and/or modified sequence
atggctgccttctctgagatgggagtgatgccagagatagctcaagccgtggaagaaatggactggctccttccaaccgacatacaggccgaaagcattcccctgatcctcggcggtggggatgttctgatggctgccgagacgggttcagggaaaacaggtgctttctcaatccccgttattcaaatcgtctatgagactttaaaggaccaacaggagggaaagaaggggaaaacgacgatcaaaactggcgcttctgtcttaaataagtggcagatgaatccttacgacaggggcagtgcattcgcaatcggctccgatggactttgttgccagagtcgagaggtgaaggagtggcatggatgccgagcaacgaaagggctgatgaagggcaagcattattacgaggtctcctgtcatgatcaaggattgtgtagggtcggttggagcacaatgcaggctagtctggacctgggaaccgataagttcggcttcggctttggcggcaccgggaagaagagtcacaacaaacagtttgataactatggagaggaatttactatgcacgacacgattggctgttacctcgatatcgacaaggggcatgttaagttttctaagaacgggaaagatctcggcttagcttttgagatccccccccatatgaagaatcaggcattgtttcctgcgtgtgtcctcaagaacgccgaactaaagtttaactttggggaggaggaattcaaatttccgccgaaagatggatttgtggccttgagtaaggcacctgatggctacatagttaagtcccagcatagcggcaacgcacaggtgacccagactaagttcttacccaacgcacccaaagccctgatagtcgaaccatctagggagctcgctgagcagaccctcaacaacatcaaacaattcaaaaagtacattgataacccaaaactgcgggagctgctgatcatcggtggggtggccgcccgtgatcaactgtctgtcctcgagaatggtgttgatattgtggttggcacccccgggagattggacgacttagtgagcaccggcaaactgaacttgtcccaggtaagattcctcgtgctcgacgaggccgacgggctactgtctcagggttacagcgacttcatcaatagaatgcacaaccagattccgcaggtgaccagcgacggcaaaaggctgcaagtgatagtgtgctcggcgacgttgcactccttcgatgtgaagaaactgtccgaaaagataatgcacttcccaacttgggtggaccttaagggtgaggactccgtgccagacacagtgcaccacgtggtggtcccggtgaatcccaaaacagatcgcttatgggagcgactcggcaaatcacacataaggacagacgatgtgcatgctaaggacaacactcgtcctggggcaaacagcccagaaatgtggagcgaagccattaagatcctcaagggggagtacgctgttcgggccatcaaggagcataaaatggatcaggccatcattttttgccgtactaaaattgattgcgacaacctcgagcagtattttatccaacaaggcggaggaccagacaagaagggccaccaatttagctgcgtctgccttcacggagaccgtaagcctcacgagcggaaacagaacctggaaaggtttaagaagggggatgtaaggttcctgatctgcacagatgtggccgcgcggggaatagacatacatggggtaccctatgtgattaatgtgacactgcccgatgagaagcaaaactacgtgcatcgcataggaagggttggaagggcagagcggatgggacttgctatctcactcgttgctaccgaaaaggagaaggtgtggtatcacgtgtgttcaagccgtggaaaaggctgctacaatacaagactgaaagaggacggagggtgtacaatctggtataacgaaatgcaactactgtctgagattgaggagcacctcaactgtaccatttcacaggttgagccagatattaaggtgcctgtggatgaatttgacggaaaggtgacctatgggcagaagagggcggcagggggaggttcttacaaggggcatgtagatattctagcccctaccgtacaggagctcgctgcacttgagaaagaagcacagacctctttcctgcatctcgggtaccttcctaaccagctgttccgtactttttag

SEQ ID NO: 151045 - DNA, 51 bp, Artificial Sequence
  derived and/or modified sequence
atggcagcattcagcgagatgggcgtgatgcccgagattgcccaagcctag

SEQ ID NO: 151046 - DNA, 1869 bp, Artificial Sequence
  derived and/or modified sequence
atggcagcattctcagaaatgggtgtcatgcccgaaatagcccaggccgtggaagaaatggattggttgctgcctactgacatccaggctgagagcatcccgctaattctgggcggcggggatgtgctcatggccgcagaaactggcagcgggaagaccggggccttcagcatccccgtgatccagatcgtgtacgagaccctaaaagatcaacaggagggtaaaaagggcaaaacaacaataaaaactggcgcatccgtcctgaataagtggcagatgaatccatacgaccgagaggtcaaagagtggcacggctgtcgtgccacaaaaggtctgatgaaaggcaaacactactacgaagtaagttgtcatgaccagggcctatgtagggtgggctggtcaaccatgcaagcctcactggacctagggacagacaaatttggcttcggatttggaggaacagggaagaaatcccacaacaagcaattcgacaactatggcgaggagtttacaatgcatgacacaattgggtgctatttagatatcgataagggacacgtgaaatttagcaaaaatggcaaagacctggggctggcatttgagatacctccccacatgaagaaccaagcactgtttcccgcttgcgttttgaagaatgctgaactgaaattcaacttcggcgaagaggagttcaaattccctcccaaggacggatttgtggctctgagcaaagcccccgatggttacatcgttaaatcacagcacagcgggaatgcacaggtgacccagacgaaattcttaccaaatgccccaaaagcactgattgttgagccatcccgcgaacttgctgagcagaccttgaataatatcaagcaattcaagaagtacatcgataatcccaaacttcgggagctgctcattattggaggcgtggccgcaagagatcagctgtcagtcctggagaatggagtagatatcgtcgtggggacacctggtagactggacgatctggtgtcgactggcaaactgaatctgagccaggtacggttcctcgtcctggacgaggccgacggtttgctgtcacagggctacagcgactttatcaacagaatgcacaatcagattccgcaggtcactagcgatggcaaacggctacaagtaatagtgtgtagcgccaccctgcatagcttcgatgtcaaaaagctgtctgaaaagataatgcacttccccacgtgggtcgatttaaaaggcgaagacagtgtccccgataccgtccatcacgtcgtcgttccagttaatccgaagaccgacaggctatgggagcggttgggaaaatctcacatacggactgacgatgtccacgcaaaggataacaccagacctggcgcaaatagcccagaaatgtggagcgaggctatcaagatcctcaaaggagagtatgctgtccgcgccataaaagagcacaaaatggaccaggctattattttctgtaggaccaagatagactgcgataacctggaacagtacttcattcaacaaggagggggtcccgacaaaaagggtcaccagttttcctgcgtctgcctacacggagaccgcaagccacatgaacgaaaacagaatctcgaacggtttaaaaagggcgatgtgcgatttctgatctgtactgacgtcgccgccagaggtattgacattcacggcgtgccatacgtaatcaacgtgaccctgccggacgagaagcagaactatgtacatcgaataggtcgcgtgggccgcgcggaaaggatggggttggcgatcagtctggtagctaccgaaaaggaaaaagtttggtaccacatggttcagagagacgctgtcaccatctag

SEQ ID NO: 151047 - DNA, 51 bp, Artificial Sequence
  derived and/or modified sequence
atggccgccttcagcgagatgggcgtgatgcctgagatcgcccaggcctag

SEQ ID NO: 151048 - DNA, 1869 bp, Artificial Sequence
  derived and/or modified sequence
atggccgccttcagcgagatgggcgtgatgcctgagatcgcccaggccgtggaggagatggactggctgctgcccacagacatccaggccgagagcatccccctcatcctgggcggcggagatgtgctgatggctgctgagaccggcagcggcaagacaggagccttcagcatccctgtgatccagatcgtgtatgagaccctgaaggaccagcaggagggcaagaagggcaagaccaccatcaagacaggagcctctgtgctgaacaagtggcagatgaacccctatgaccgggaggtgaaggagtggcacggctgccgggccaccaagggcctgatgaagggcaagcactactatgaggtgtcctgccacgaccagggcctgtgccgggtgggctggagcaccatgcaggccagcctggacctgggcacagacaagtttggatttggatttggaggcaccgggaagaagagccacaacaagcagtttgacaactacggggaggagttcaccatgcatgacaccatcggctgctacctggacatcgacaagggccacgtgaagttcagcaagaatggcaaggacctgggcctggcctttgagatccccccccacatgaagaaccaggccctcttccctgcctgtgtgctgaagaatgctgagctgaagttcaactttggagaggaggagttcaagttcccccccaaggatggctttgtggccctgagcaaggccccagatggctacatcgtgaagagccagcacagcggaaatgcccaggtgacccagaccaagttcctgcccaatgcccccaaggccctgattgtggagcccagccgggagctggccgagcagaccctgaacaacatcaagcagttcaagaagtacatcgacaaccccaagctgcgggagctgctgatcatcggcggcgtggccgcccgggaccagctgtctgtgctggagaatggagtggacatcgtggtgggcaccccaggccgcctggatgacctggtgtccacaggcaagctgaacctgagccaggtgcgcttcctggtgctggatgaagcagatggcctgctgagccagggctacagcgacttcatcaacaggatgcacaaccagatcccccaggtgaccagtgatggcaagaggctgcaggtgattgtgtgcagcgccaccctgcacagctttgatgtgaagaagctgtctgagaagatcatgcacttccccacctgggtggacctgaagggggaggacagcgtgcctgacacagtgcaccacgtggtggtgcctgtgaaccccaagacagaccggctgtgggagcggctgggcaagagccacatcagaacagatgatgtgcacgccaaggacaacaccaggcctggggccaacagccctgagatgtggagcgaggccatcaagatcctgaagggggagtatgctgtgcgggccatcaaggagcacaagatggaccaggccatcatcttctgcaggaccaagattgactgtgacaacctggagcagtacttcatccagcagggcggcggccctgacaagaagggccaccagttcagctgtgtgtgcctgcacggggacaggaagccccatgagaggaagcagaacctggagcgcttcaagaagggagatgtgcgcttcctgatctgcacagatgtggccgcccggggcatcgacatccacggcgtgccctacgtgatcaacgtgaccctgcctgatgagaagcagaactacgtgcacagaattggccgggtgggccgggcagagaggatgggcctggccatcagcctggtggccacagagaaggagaaggtgtggtaccacatggtgcagagagatgctgtgaccatctag

SEQ ID NO: 151049 - DNA, 2223 bp, Artificial Sequence
  derived and/or modified sequence
atggccgccttcagcgagatgggcgtgatgcccgagatcgcccaggcagtggaggagatggactggcttcttcccacagatatacaggctgagtctataccactcattctgggcgggggagatgtgctgatggccgccgagaccggcagcggtaaaaccggagctttttcgatacctgtgatccaaatcgtatacgaaactctcaaggatcagcaagaagggaaaaaggggaagaccactatcaaaacaggcgcctctgtcctcaacaagtggcagatgaatccttatgacagagggagcgcatttgctatcggtagcgacgggctgtgctgccagagccgagaagtcaaggaatggcacggctgtagagccaccaagggtctcatgaagggtaagcattattatgaagttagttgtcatgaccagggtttatgcagggtcggctggagtacaatgcaggcttcattggatctggggactgacaaatttgggtttggttttgggggaaccggcaagaagagccacaataagcaattcgataattacggcgaagaatttacaatgcacgacaccatcgggtgctacttagacatcgacaaaggccacgtgaaattctctaaaaacgggaaggatctggggctggcttttgaaattccgccccatatgaagaatcaagcactgtttcccgcttgcgtgttgaaaaatgccgagcttaagttcaactttggggaggaggagttcaaattcccacctaaggacggattcgtggccctctccaaggcccccgatggctacatagttaagtcacaacacagtgggaacgcccaggtgacacagaccaagtttttgcctaacgctcctaaggcgctcattgtggagccctctagggagctagccgagcagacactcaataatattaagcagttcaagaagtatatcgacaatcctaagctccgcgagctgctgataatcggcggcgtcgccgcccgggatcaacttagcgttctcgagaatggagtggacatagtcgtagggacgcctggacggctggacgacttggtgtcaacagggaaattgaatctctctcaagtgcgcttcttggtccttgacgaagccgacggtctgctcagccagggctattctgactttatcaacagaatgcacaatcagatccctcaggtgacctcggatggaaaaagattacaggtaatagtgtgttccgccactctccattccttcgatgtaaaaaaactcagcgaaaaaattatgcattttcctacttgggtggacttaaaaggggaggactcagttcctgatacagtacaccatgtcgtcgttcctgtgaatcctaagaccgaccgtctgtgggaaaggctcggtaaaagtcacattcgcaccgatgacgtgcatgcaaaggacaatacacgtccaggagccaatagcccagagatgtggagtgaagcgattaaaatacttaagggagagtacgccgtgagagctatcaaagagcataagatggaccaggctatcatcttctgtcgtactaagatcgactgtgataacttagaacagtattttatccagcaagggggcggcccggataagaagggccaccaattctcctgcgtgtgcttgcatggtgacagaaagccccatgaacggaagcagaacctggaacgtttcaagaaaggagatgttaggtttctcatctgcacagacgtcgctgcccggggaatcgacatacacggggttccgtacgttattaacgtgaccctgccagacgagaaacagaactatgtgcacaggatcggccgagtgggccgcgcagaacgaatgggcctggccatatctctcgttgcaacagagaaggagaaagtctggtaccacgtgtgctcttcacgtggcaaagggtgttataatacccgtctaaaagaggacggcggatgtactatctggtacaacgaaatgcagcttttgtcagagatcgaagagcatttaaactgtaccattagtcaggtagagcccgatataaaggtccctgtggacgagttcgatggcaaagtcacgtacggacagaagagagcagccggtgggggcagctataagggtcacgtcgacatcctggctccaacggttcaggagctggccgccctggagaaggaagctcagacctcctttttgcaccttgggtatctcccaaatcagctgtttagaaccttttag

SEQ ID NO: 151050 - DNA, 51 bp, Artificial Sequence
  derived and/or modified sequence
atggccgccttcagcgagatgggcgtgatgcccgagatcgcccaggcatag

SEQ ID NO: 151051 - DNA, 1869 bp, Artificial Sequence
  derived and/or modified sequence
atggccgccttcagcgagatgggcgtgatgcccgagatcgcccaggcagtagaggagatggattggctcctgccaacagatatccaagctgagtctatcccattaattttggggggtggagacgtcctcatggccgcagaaactgggtctggcaagaccggcgccttctccattcccgttatccagatcgtttatgaaacccttaaagaccagcaggagggtaagaagggtaagacaaccatcaagacaggagccagcgttctgaataaatggcaaatgaacccatatgatcgcgaggtcaaggaatggcatgggtgcagagccacaaaaggactgatgaagggtaagcattactatgaagtgagttgccatgaccagggcctgtgccgagtcggctggtccactatgcaggcttccctggatctgggtactgacaaattcggctttggctttgggggcacgggcaagaaaagtcacaataaacagttcgacaactacggcgaggaatttaccatgcacgacactatcggatgctacctggatattgataagggccacgttaaattcagtaaaaacggaaaagatctgggtctggccttcgagatccctccacacatgaagaaccaggcactgtttcccgcctgcgtccttaaaaacgcggaactaaagttcaacttcggggaggaagagttcaagttcccacccaaggacggcttcgtggccctctccaaagctccagatgggtacatcgttaaaagccagcattcagggaatgcacaggtgacccagacgaaatttctacccaacgcgcctaaggctctgatagtggagccatcccgcgaacttgcagaacagacactcaataacattaagcagtttaaaaaatacattgacaaccccaagctcagagaactgctcattattggcggcgtggctgcccgtgaccagctcagtgtgcttgagaatggcgttgatattgtagttggcacccctggacgactggacgaccttgtgtcgaccggaaagctgaaccttagccaggttaggttcctggtgcttgatgaggctgatgggctgctgagtcaggggtactccgactttataaaccgaatgcataatcaaatcccacaggtgacttccgacggtaagcggctgcaggtcattgtgtgcagcgctaccctacacagctttgacgtgaaaaaattgagcgagaaaattatgcacttcccaacttgggtggacctaaagggggaggattccgtgcccgatacggtacaccatgtggtcgtcccagtgaatcctaagaccgatcgtctatgggaacgccttggaaagtcccatatccgtactgacgacgttcatgctaaagataatactcgacctggagcaaattctccagagatgtggtccgaggccatcaaaatcttaaaaggcgagtacgcggtcagagccattaaggagcataaaatggatcaggccatcattttttgcaggacaaaaatcgattgcgacaacctggagcagtattttatccagcaaggaggaggtcctgacaagaagggacatcagttcagctgcgtctgtcttcacggcgacagaaagccccacgagcggaaacagaacctcgagcggttcaagaaaggcgatgtgcgcttccttatatgcaccgatgtggctgctcgcggaatcgacatccacggtgtgccctatgttattaatgtgacattacccgatgagaaacagaattacgtgcataggattggcagagtcgggagagccgaacgtatggggctagcaatttcacttgtggctacggaaaaggagaaagtgtggtatcatatggtacagagggacgcagtgactatttag

SEQ ID NO: 151052 - DNA, 2223 bp, Artificial Sequence
  derived and/or modified sequence
atggccgctttctctgagatgggcgtgatgcccgaaatagctcaagccgtagaggagatggactggctgttgcctaccgatattcaagccgaatcaatcccacttatactgggcggaggagacgtgctgatggccgctgagacaggctccggtaaaacgggcgctttcagtatccctgtcatccagattgtatatgaaaccctgaaagaccagcaagagggtaagaagggaaaaaccactattaagactggtgccagtgtcctgaacaagtggcagatgaatccctacgaccggggaagcgcattcgctatcgggagcgacgggctctgctgtcagagccgggaagtgaaagagtggcatgggtgcagggctacaaaaggccttatgaaaggcaagcattactacgaagtatcttgccatgaccagggcctgtgtagggtggggtggtccaccatgcaagcatccctcgacctgggtaccgataagtttggttttggctttgggggaaccggcaaaaaaagccacaacaagcagtttgataattatggggaagagtttaccatgcatgataccatcgggtgttatctggatatcgacaaaggacacgtgaagttttccaagaacggaaaagacctcggcttagctttcgaaatccctccccacatgaaaaatcaggcactttttccggcatgtgtgctgaagaatgcagaactgaaattcaatttcggtgaagaagagtttaaattcccacccaaggacggattcgtagccttgagtaaagcacctgacgggtacatcgtcaagtctcaacattccggcaacgcccaggtcacacagacgaaatttctccctaacgccccaaaagctctcatagttgagccatccagggagctggctgaacagacgctgaataacataaaacagtttaaaaagtacatcgacaacccgaagttgcgagagctgttgattatcggcggtgtcgccgcacgtgaccagctgtctgtcctggaaaacggggttgacattgtggtcggaacacctggcagacttgacgaccttgtctcaacgggcaagctgaatttatcacaagttaggttcttggtgctcgacgaggcagacggtctcctcagccagggctactcagatttcataaaccgaatgcacaatcagatcccccaggtaaccagtgatggaaagcggctgcaggtcatagtttgcagtgcaacactccactcgtttgacgtaaagaagctgtccgaaaagataatgcattttccaacgtgggtggatctgaaaggtgaggatagcgttccagataccgtccaccatgtggtcgtccccgtgaatcctaaaactgatcgcctgtgggaaaggctagggaagagccacattagaaccgatgacgtacacgccaaagataacaccaggccaggagccaacagccccgagatgtggagcgaagccataaagatcctcaaaggggagtatgcagtaagggctatcaaagaacacaagatggatcaggccatcattttttgtcgaacaaagatagactgtgacaacctggaacagtatttcatccagcagggaggcggtccagacaagaagggccaccagttcagctgcgtttgcctgcacggggacaggaaaccccatgagagaaagcagaatctcgaacgcttcaaaaagggcgatgtgagattccttatctgcacagacgtcgctgcgaggggaattgacatccacggagtaccttatgtgataaatgttactcttcctgacgaaaagcagaactatgtgcacagaattgggagggtcggtcgggcagagagaatggggctggccatttctctggtggctaccgagaaggagaaggtctggtaccacgtgtgttcttcccggggaaaagggtgctacaacaccaggcttaaagaggatggcggttgtacaatctggtacaacgagatgcagttgctgagtgaaatcgaagaacacctaaactgtactatatctcaagtggaacccgatatcaaggttccggtggatgagtttgatgggaaggtcacatatggccagaaaagagctgcgggagggggatcctacaagggccatgtggatatactggccccaacagtgcaagaactagcagcgttggaaaaagaagcccagacatcgttcctccacctcggttacctgcctaaccaactgtttcgaactttttag

SEQ ID NO: 151053 - DNA, 51 bp, Artificial Sequence
  derived and/or modified sequence
atggcagcctttagtgagatgggggttatgcccgagatagcgcaagcgtag

SEQ ID NO: 151054 - DNA, 1869 bp, Artificial Sequence
  derived and/or modified sequence
atggctgcctttagcgaaatgggagtcatgccagagattgctcaggcagttgaagagatggactggctgctgcctactgacatccaggccgaaagtattcctctcattctcggcggtggggatgtgctgatggcagccgagaccgggagcggtaaaacaggagctttcagcattcctgtgatccagatcgtgtatgaaactctaaaagaccaacaagagggcaaaaaagggaagactaccatcaagaccggagctagcgtgttgaataagtggcagatgaacccttacgaccgcgaggtgaaagaatggcacggatgccgcgctacgaaaggcctgatgaaagggaagcattactacgaggtgtcgtgtcatgaccagggtctgtgccgcgtcgggtggagcaccatgcaggctagtctggatctcggcacagataagtttggctttggtttcgggggtactgggaaaaaaagccacaacaagcaatttgataactatggagaagaattcacaatgcacgataccattggttgttacttggacattgataagggccacgtgaaatttagcaaaaatggcaaagatctcgggctagcattcgaaattcccccacacatgaaaaatcaggccctcttccctgcatgtgtgctcaagaatgccgagctgaaattcaactttggagaggaggaatttaaatttccaccgaaggatggctttgtcgcgctgtctaaggcccctgacgggtacatcgttaaatcccaacacagcgggaacgctcaagttacacaaacaaagttcctaccaaatgcccctaaagctcttatcgtcgagccttcaagagagttagctgaacagacactcaataatatcaagcagttcaagaagtacatcgacaatcctaagctgcgggaacttctgataataggcggagttgcagcacgggatcagctttcagttctcgagaatggtgtagacatagtggtgggcacgcctggtaggctcgatgacctggtgagtacaggcaagctgaacctgtcacaagttcgcttcctggtgctggacgaagccgacggcctgcttagtcaaggatattccgactttatcaacaggatgcataatcagatccctcaagtaacttccgatggcaaaaggctgcaggtgattgtctgttctgcgaccctccattccttcgacgtgaagaaactgtcagaaaaaatcatgcacttcccaacatgggtcgatctgaagggggaagacagtgtgcccgatacggtgcatcatgtcgtggtgcccgtgaacccaaaaaccgaccggctatgggagcggctcgggaagtcacatattagaaccgacgatgtgcacgctaaggacaacaccagaccaggcgcaaactcgcctgaaatgtggtcagaggccattaagattttaaagggggagtacgccgtgcgcgcaattaaagagcataaaatggatcaggcaattatcttttgtcgcaccaagattgactgcgacaatctcgagcagtattttatccaacagggcggaggcccagacaaaaaaggacaccagtttagctgtgtatgcttgcatggcgacaggaagccccacgagcggaagcagaacctcgaacgcttcaagaaaggggacgtcaggttccttatctgtacagacgtcgccgcaagaggcatcgacatccatggagtcccctacgtgattaatgtgacactccctgacgagaaacagaattacgtgcaccgcatagggcgagtgggcagagcagagcgcatgggattggcaataagcctcgtggctactgagaaagagaaagtgtggtaccacatggtccagcgagacgcagtgaccatttag

SEQ ID NO: 151055 - DNA, 2706 bp, Artificial Sequence
  derived and/or modified sequence
ctctgtagctgtgaccctgataccgcgtggtgtgctccgaacacatggtgcccagaacgaaggcggcgtccagaagccctaggtcccagaggtccgctcagcggcaggcgcataaggcggggccggcgcgggcctttccttccatcggaaccgttctcccggggctgagtccctgcccggactccgaacgccgaagaccaggggccggaagcgcgcgccgccactgccacgccgtgtcagtcgggagggagggagcgagcaggcgaagccgcggaggacggggtgaagatggcggccttctccgagatgggtgtaatgcctgagattgcacaagctgtggaagagatggattggctcctcccaactgatatccaggctgaatctatcccattgatcttaggaggaggtgatgtacttatggctgcagaaacaggaagtggcaaaactggtgcttttagtattccagttatccagatagtttatgaaactctgaaagaccaacaggaaggcaaaaaaggaaaaacaacaattaaaactggtgcttcagtgctgaacaaatggcagatgaacccatatgacagaggatctgcttttgcaattgggtcagatggtctttgttgtcaaagcagagaagtaaaggaatggcatgggtgtagagctactaaaggattaatgaaagggaaacactactatgaagtatcctgtcatgaccaagggttatgcagggtcgggtggtctaccatgcaggcctctttggacctaggtactgacaagtttggatttggctttggtggaacaggaaagaaatcccataacaaacaatttgataattatggagaggaattcactatgcatgataccattggatgttacctggatatagataagggacatgtcaagttctccaaaaatggaaaagatcttggtctggcatttgaaataccaccacatatgaaaaaccaagccctctttcctgcctgtgttttgaagaatgctgaactgaaatttaacttcggtgaagaggaatttaagtttccaccaaaagatggctttgttgctctttccaaggcaccggatggttacattgtcaaatcacagcactcaggtaatgcacaggtgacacaaacaaagtttctccccaatgctccgaaagctctcattgttgaaccttcccgggagttagctgaacaaactttgaacaacatcaagcagtttaagaaatacattgataatcctaaattaagggagcttctgataattggaggtgttgcagcccgggatcagctctctgttttggaaaatggagtagatatagttgtaggtactccgggaagactagatgacttggtgtcaactggaaagctgaacttatctcaagttagattcctggtcctggatgaagctgatgggcttctttctcaaggttattctgattttataaataggatgcacaatcagattcctcaggttacctctgatggaaaaagacttcaggtgattgtttgctctgccactttgcattctttcgatgtaaagaaactgtccgagaagataatgcattttcctacatgggttgacttaaaaggagaagactctgttccagatactgtacaccatgttgttgtcccagtaaatcccaaaactgacagactctgggaaaggcttggaaagagccacattagaactgatgatgtacatgcaaaagataacacaagacctggtgctaatagtccagagatgtggtctgaagctattaaaatcctgaaaggggagtatgctgtccgggcaatcaaggaacataagatggatcaagcaattatcttctgtagaaccaaaattgactgtgataacttggagcagtactttatacaacaaggaggaggacctgataaaaaaggacaccagttctcatgtgtttgtcttcatggtgacagaaagcctcatgagagaaagcaaaacttggaaagatttaagaaaggagatgtaagattcttgatttgcacagatgtagctgctagaggaattgatatccacggtgttccttatgttataaatgtcactctgcccgatgaaaagcaaaactacgtacatcgaattggcagagtaggaagagctgaaaggatgggtctggcaatttccctggtggcaacagaaaaagaaaaggtttggtaccatgtatgtagcagccgtggaaaagggtgttataacacaagactcaaggaagatggaggctgtaccatatggtacaacgagatgcagttactatctgagatagaagaacacctgaactgtaccatttctcaggttgagccggatataaaggtaccagtggatgaatttgatgggaaagttacctacggtcagaaaagggctgctggtggtggaagctataaaggccatgtggatattttggcacctactgttcaagagttggctgcccttgaaaaggaggcgcagacatctttcctgcatcttggctaccttcctaaccagctgttcagaaccttctgatttttacatttactgaataagatttgagtaatgaaagtctgtagtcttaaaactctaaaacagttgtactgcttccaagcagcagtatttatagtaacgtaagctattaatgctaactcttgcatgtcaagaaacattagtcttaggaattcttcaaaaaatggcatcccaatgaaaataaatttgatgactata

SEQ ID NO: 151056 - DNA, 2807 bp, Artificial Sequence
  derived and/or modified sequence
ggctcagatcccacgctgccattcggtagatatgtgtctttagataagtgacttaactttcccgaattttagagtcctcatctaaagattctaataccttcctgacagactgtgaccctgataccgcgtggtgtgctccgaacacatggtgcccagaacgaaggcggcgtccagaagccctaggtcccagaggtccgctcagcggcaggcgcataaggcggggccggcgcgggcctttccttccatcggaaccgttctcccggggctgagtccctgcccggactccgaacgccgaagaccaggggccggaagcgcgcgccgccactgccacgccgtgtcagtcgggagggagggagcgagcaggcgaagccgcggaggacggggtgaagatggcggccttctccgagatgggtgtaatgcctgagattgcacaagctgtggaagagatggattggctcctcccaactgatatccaggctgaatctatcccattgatcttaggaggaggtgatgtacttatggctgcagaaacaggaagtggcaaaactggtgcttttagtattccagttatccagatagtttatgaaactctgaaagaccaacaggaaggcaaaaaaggaaaaacaacaattaaaactggtgcttcagtgctgaacaaatggcagatgaacccatatgacagaggatctgcttttgcaattgggtcagatggtctttgttgtcaaagcagagaagtaaaggaatggcatgggtgtagagctactaaaggattaatgaaagggaaacactactatgaagtatcctgtcatgaccaagggttatgcagggtcgggtggtctaccatgcaggcctctttggacctaggtactgacaagtttggatttggctttggtggaacaggaaagaaatcccataacaaacaatttgataattatggagaggaattcactatgcatgataccattggatgttacctggatatagataagggacatgtcaagttctccaaaaatggaaaagatcttggtctggcatttgaaataccaccacatatgaaaaaccaagccctctttcctgcctgtgttttgaagaatgctgaactgaaatttaacttcggtgaagaggaatttaagtttccaccaaaagatggctttgttgctctttccaaggcaccggatggttacattgtcaaatcacagcactcaggtaatgcacaggtgacacaaacaaagtttctccccaatgctccgaaagctctcattgttgaaccttcccgggagttagctgaacaaactttgaacaacatcaagcagtttaagaaatacattgataatcctaaattaagggagcttctgataattggaggtgttgcagcccgggatcagctctctgttttggaaaatggagtagatatagttgtaggtactccgggaagactagatgacttggtgtcaactggaaagctgaacttatctcaagttagattcctggtcctggatgaagctgatgggcttctttctcaaggttattctgattttataaataggatgcacaatcagattcctcaggttacctctgatggaaaaagacttcaggtgattgtttgctctgccactttgcattctttcgatgtaaagaaactgtccgagaagataatgcattttcctacatgggttgacttaaaaggagaagactctgttccagatactgtacaccatgttgttgtcccagtaaatcccaaaactgacagactctgggaaaggcttggaaagagccacattagaactgatgatgtacatgcaaaagataacacaagacctggtgctaatagtccagagatgtggtctgaagctattaaaatcctgaaaggggagtatgctgtccgggcaatcaaggaacataagatggatcaagcaattatcttctgtagaaccaaaattgactgtgataacttggagcagtactttatacaacaaggaggaggacctgataaaaaaggacaccagttctcatgtgtttgtcttcatggtgacagaaagcctcatgagagaaagcaaaacttggaaagatttaagaaaggagatgtaagattcttgatttgcacagatgtagctgctagaggaattgatatccacggtgttccttatgttataaatgtcactctgcccgatgaaaagcaaaactacgtacatcgaattggcagagtaggaagagctgaaaggatgggtctggcaatttccctggtggcaacagaaaaagaaaaggtttggtaccatgtatgtagcagccgtggaaaagggtgttataacacaagactcaaggaagatggaggctgtaccatatggtacaacgagatgcagttactatctgagatagaagaacacctgaactgtaccatttctcaggttgagccggatataaaggtaccagtggatgaatttgatgggaaagttacctacggtcagaaaagggctgctggtggtggaagctataaaggccatgtggatattttggcacctactgttcaagagttggctgcccttgaaaaggaggcgcagacatctttcctgcatcttggctaccttcctaaccagctgttcagaaccttctgatttttacatttactgaataagatttgagtaatgaaagtctgtagtcttaaaactctaaaacagttgtactgcttccaagcagcagtatttatagtaacgtaagctattaatgctaactcttgcatgtcaagaaacattagtcttaggaattcttcaaaaaatggcatcccaatgaaaataaatttgatgactata

SEQ ID NO: 151057 - DNA, 500 bp, Artificial Sequence
  derived and/or modified sequence
ggcattggtgctcagggcaatgaatccagtccatctctccgggtcattcacacaccaaggccctgctcacctttggaaagctgggggactgagtggggagggcacggtgtggtgtcagcctgagcccactggatgaccctaatcaccaaacatctgcttccttctctgtagctgtgaccctgataccgcgtggtgtgctccgaacacatggtgcccagaacgaaggcggcgtccagaagccctaggtcccagaggtccgctcagcggcaggcgcataaggcggggccggcgcgggcctttccttccatcggaaccgttctcccggggctgagtccctgcccggactccgaacgccgaagaccaggggccggaagcgcgcgccgccactgccacgccgtgtcagtcgggagggagggagcgagcaggcgaagccgcggaggacggggtgaagatggcggccttctccgagatgggtgtaatgcctgagattgcacaagctg

SEQ ID NO: 151058 - DNA, 2155 bp, Artificial Sequence
  derived and/or modified sequence
gtcagtcgggagggagggagcgagcaggcgaagccgcggaggacggggtgaagatggcggccttctccgagatgggtgtaatgcctgagattgcacaagctgtggaagagatggattggctcctcccaactgatatccaggctgaatctatcccattgatcttaggaggaggtgatgtacttatggctgcagaaacaggaagtggcaaaactggtgcttttagtattccagttatccagatagtttatgaaactctgaaagaccaacaggaaggcaaaaaaggaaaaacaacaattaaaactggtgcttcagtgctgaacaaatggcagatgaacccatatgacagagaagtaaaggaatggcatgggtgtagagctactaaaggattaatgaaagggaaacactactatgaagtatcctgtcatgaccaagggttatgcagggtcgggtggtctaccatgcaggcctctttggacctaggtactgacaagtttggatttggctttggtggaacaggaaagaaatcccataacaaacaatttgataattatggagaggaattcactatgcatgataccattggatgttacctggatatagataagggacatgtcaagttctccaaaaatggaaaagatcttggtctggcatttgaaataccaccacatatgaaaaaccaagccctctttcctgcctgtgttttgaagaatgctgaactgaaatttaacttcggtgaagaggaatttaagtttccaccaaaagatggctttgttgctctttccaaggcaccggatggttacattgtcaaatcacagcactcaggtaatgcacaggtgacacaaacaaagtttctccccaatgctccgaaagctctcattgttgaaccttcccgggagttagctgaacaaactttgaacaacatcaagcagtttaagaaatacattgataatcctaaattaagggagcttctgataattggaggtgttgcagcccgggatcagctctctgttttggaaaatggagtagatatagttgtaggtactccgggaagactagatgacttggtgtcaactggaaagctgaacttatctcaagttagattcctggtcctggatgaagctgatgggcttctttctcaaggttattctgattttataaataggatgcacaatcagattcctcaggttacctctgatggaaaaagacttcaggtgattgtttgctctgccactttgcattctttcgatgtaaagaaactgtccgagaagataatgcattttcctacatgggttgacttaaaaggagaagactctgttccagatactgtacaccatgttgttgtcccagtaaatcccaaaactgacagactctgggaaaggcttggaaagagccacattagaactgatgatgtacatgcaaaagataacacaagacctggtgctaatagtccagagatgtggtctgaagctattaaaatcctgaaaggggagtatgctgtccgggcaatcaaggaacataagatggatcaagcaattatcttctgtagaaccaaaattgactgtgataacttggagcagtactttatacaacaaggaggaggacctgataaaaaaggacaccagttctcatgtgtttgtcttcatggtgacagaaagcctcatgagagaaagcaaaacttggaaagatttaagaaaggagatgtaagattcttgatttgcacagatgtagctgctagaggaattgatatccacggtgttccttatgttataaatgtcactctgcccgatgaaaagcaaaactacgtacatcgaattggcagagtaggaagagctgaaaggatgggtctggcaatttccctggtggcaacagaaaaagaaaaggtttggtaccatatggtacaacgagatgcagttactatctgagatagaagaacacctgaactgtaccatttctcaggttgagccggatataaaggtaccagtggatgaatttgatgggaaagttacctacggtcagaaaagggctgctggtggtggaagctataaaggccatgtggatattttggcacctactgttcaagagttggctgcccttgaaaaggaggcgcagacatctttcctgcatcttggctaccttcctaaccagctgttcagaa

SEQ ID NO: 151059 - DNA, 51 bp, Artificial Sequence
  derived and/or modified sequence
atggccgccttcagcgagatgggcgtgatgcccgagatcgcccaggcctag

SEQ ID NO: 151060 - DNA, 1869 bp, Artificial Sequence
  derived and/or modified sequence
atggccgccttcagcgagatgggcgtgatgcccgagatcgcccaggccgtggaggagatggactggctgctgcccaccgacatccaggccgagagcatccccctgatcctgggcggcggcgacgtgctgatggccgccgagaccggcagcggcaagaccggcgccttcagcatccccgtgatccagatcgtgtacgagaccctgaaggaccagcaggagggcaagaagggcaagaccaccatcaagaccggcgccagcgtgctgaacaagtggcagatgaacccctacgacagagaggtgaaggagtggcacggctgcagagccaccaagggcctgatgaagggcaagcactactacgaggtgagctgccacgaccagggcctgtgcagagtgggctggagcaccatgcaggccagcctggacctgggcaccgacaagttcggcttcggcttcggcggcaccggcaagaagagccacaacaagcagttcgacaactacggcgaggagttcaccatgcacgacaccatcggctgctacctggacatcgacaagggccacgtgaagttcagcaagaacggcaaggacctgggcctggccttcgagatccccccccacatgaagaaccaggccctgttccccgcctgcgtgctgaagaacgccgagctgaagttcaacttcggcgaggaggagttcaagttcccccccaaggacggcttcgtggccctgagcaaggcccccgacggctacatcgtgaagagccagcacagcggcaacgcccaggtgacccagaccaagttcctgcccaacgcccccaaggccctgatcgtggagcccagcagagagctggccgagcagaccctgaacaacatcaagcagttcaagaagtacatcgacaaccccaagctgagagagctgctgatcatcggcggcgtggccgccagagaccagctgagcgtgctggagaacggcgtggacatcgtggtgggcacccccggcagactggacgacctggtgagcaccggcaagctgaacctgagccaggtgagattcctggtgctggacgaggccgacggcctgctgagccagggctacagcgacttcatcaacagaatgcacaaccagatcccccaggtgaccagcgacggcaagagactgcaggtgatcgtgtgcagcgccaccctgcacagcttcgacgtgaagaagctgagcgagaagatcatgcacttccccacctgggtggacctgaagggcgaggacagcgtgcccgacaccgtgcaccacgtggtggtgcccgtgaaccccaagaccgacagactgtgggagagactgggcaagagccacatcagaaccgacgacgtgcacgccaaggacaacaccagacccggcgccaacagccccgagatgtggagcgaggccatcaagatcctgaagggcgagtacgccgtgagagccatcaaggagcacaagatggaccaggccatcatcttctgcagaaccaagatcgactgcgacaacctggagcagtacttcatccagcagggcggcggccccgacaagaagggccaccagttcagctgcgtgtgcctgcacggcgacagaaagccccacgagagaaagcagaacctggagagattcaagaagggcgacgtgagattcctgatctgcaccgacgtggccgccagaggcatcgacatccacggcgtgccctacgtgatcaacgtgaccctgcccgacgagaagcagaactacgtgcacagaatcggcagagtgggcagagccgagagaatgggcctggccatcagcctggtggccaccgagaaggagaaggtgtggtaccacatggtgcagagagacgccgtgaccatctag

SEQ ID NO: 151061 - protein, 1220 aa, Artificial Sequence [sequence omitted]

SEQ ID NO: 151062 - DNA, 3663 bp, Artificial Sequence
  derived and/or modified sequence
atggccgttgctgtggctatggcaggagctttgattggctctgagccaggccctgctgaggagctggctaagctagagtacctgagcctggttagcaaggtttgtactgagctggataaccatctgggcattaatgataaggacctcgcagagtttgtgatctcactggctgagaaaaacactacctttgacaccttcaaagccagtcttgtcaaaaatggcgcggaatttaccgattcactgatcagcaatctgctccgtctgattcaaacaatgcgcccaccagcaaaaccaagcacctccaaggacccagttgtgaaacctaagacagaaaaggaaaagctgaaggagctgtttccagtcctgtgccagcccgacaaccctagcgtgaggacaatgctggacgaggatgacgtgaaagtggccgtcgacgtgttgaaggagctcgaagctcttatgccatccgccgcgggccaggagaaacaacgcgatgctgagcacagagacagaacgaagaagaagaagcgatctcgcagccgcgaccggaatcgcgaccgagaccgggaccgggagaggaaccgagatcgagaccataaaaggcgtcatagatcaaggtcccggtcccggtcgcggactcgggaacgcaataaggtgaaaagcagatatagatcccgctctcgtagccaaagtccaccgaaagacagaaaagatcgtgataagtatggggagagaaacctggaccgctggcgggacaaacacgtcgatcgaccccctccagaggagcctacaataggggatatctataacgggaaagtaacgagcattatgcagtttgggtgttttgttcagcttgagggcctcagaaagcggtgggagggcctggttcatatctccgagctgcgccgagagggtagggtcgccaacgtggctgatgtggtgtctaaggggcagagagtgaaggtgaaggttctgagttttaccggcacaaagacaagcttgagcatgaaggatgttgatcaggaaacaggcgaggacctgaatccgaacaggcggcggaatttggtgggcgagaccaacgaagagacttccatgcggaaccccgaccgacctactcatttgtcattggtgagcgcccctgaggtggaagacgactcactggaacgtaagcgcctgaccaggattagtgatccagagaagtgggagatcaaacagatgattgctgcaaacgtgctgtcaaaagaggagttccctgatttcgacgaagagaccggaatactccccaaggtcgacgatgaggaggacgaagacttggagattgaactggtggaagaggagcctcctttcctccgaggccatacaaagcagtctatggatatgtcaccaattaagattgtgaaaaatcctgatggatcactctcacaagcagcgatgatgcagagcgcccttgcgaaagaacgacgggagttgaagcaagctcagagggaagctgaaatggatagcatcccgatgggcctgaacaagcactgggtggatcctcttcccgacgcagagggtcgacaaattgcggcaaacatgagaggcattggtatgatgcctaatgatatcccagaatggaagaagcacgcctttggtggtaacaaagcttcatatggcaagaaaacccagatgtccatactggagcagagggaaagcctccctatctataagctgaaagaacagcttgtacaagctgtacacgataaccagatactcattgttattggagaaacgggaagcggtaagacgactcagatcactcagtatcttgcagaagcggggtacacgtcgcgcgggaaaattggatgtacccagcccaggagggtagcagcaatgagtgtggcaaagagggtttctgaagagttcgggtgttgtctcgggcaggaggtcggctataccatccggtttgaggattgtacaagccccgagacagtaattaaatatatgacagatgggatgttacttagggagtgtctcattgatcctgatctgacacagtatgcgattattatgctggacgaagcacacgaacggaccatacatactgatgtcctgtttggcctgctgaaaaagacagttcagaagcggcaggacatgaagctaatcgtcacgtcagcgactcttgacgcagtgaagttctcccagtatttctacgaagctccaatattcactatccccggcaggacgtatccagtggagatcctttatacaaaggagccagagaccgactacctggacgcgtcgctgattacagtcatgcagattcatctcactgaaccaccaggagacatcctggtgttcctgactggacaggaggaaatcgataccgcatgcgagatcctgtatgagcggatgaagtctctgggccctgatgtgcccgagctaatcatcctcccagtgtattcagccctgccctccgagatgcagacccggatcttcgaccccgccccgccaggcagtcgcaaggtggtcattgctaccaatatcgccgaaacatccttgacaatcgacggaatctactatgtagttgaccctgggttcgtcaagcagaaggtctataatagcaagaccggcatcgatcagttggtggtaacacccatctcccaggcacaagcgaagcagagggcaggacgagctgggagaacaggaccgggcaagtgctatcggctatataccgagcgggcctatcgggacgaaatgctgaccacaaatgtgcccgagatccaacgcaccaacctcgccagtacagtactgtcgttgaaagcaatgggtattaacgacctgctttcattcgacttcatggacgcccccccaatggaaaccctgatcaccgcaatggaacagctatacaccctgggagccttggacgacgaaggtctgttgactaggctggggcgcagaatggccgagtttccgctggagcctatgctgtgtaaaatgctcatcatgagtgtgcacctgggttgtagcgaagaaatgctgactattgtgtccatgctgtccgtccagaacgtgttctatcggcctaaggacaagcaggcactcgccgaccaaaaaaaagcaaagtttcaccagaccgagggtgaccatctgactctgctagcggtgtataacagctggaagaataacaagttcagtaacccctggtgctatgaaaatttcatccaggcacggtcccttaggagagcccaggacattcgaaagcagatgctcggcattatggaccggcataagctggatgtggtgtcatgcggaaaaagcacggtgcgagttcagaaggctatttgctccggtttcttccggaatgctgccaaaaaggacccccaggagggctacaggactttaattgatcagcaagtcgtgtacattcatccatccagtgcacttttcaatagacagcccgaatgggtggtgtaccatgaactggtactcactacaaaggagtacatgcgggaagtcaccaccatcgacccgcgctggctggtggagtttgcccctgccttttttaaagtgtcggaccccacaaagctgagcaaacagaaaaaacagcagagactcgaaccgttgtataatcgctacgaagagcctaacgcctggcgtatatctcgcgctttccgccgcagatag

SEQ ID NO: 151063 - DNA, 3663 bp, Artificial Sequence
  derived and/or modified sequence
atggctgtggccgtggccatggccggggccctgattggcagcgagcccggccctgctgaggagctggccaagctggagtacctgagcctggtgtccaaggtgtgcacagagctggacaaccacctgggcatcaatgacaaggacctggccgagtttgtgatcagcctggccgagaagaacaccacctttgacaccttcaaggccagcctggtgaagaatggagctgagttcacagacagcctcatcagcaacctgctgcggctcatccagaccatgaggcccccagccaagcccagcaccagcaaggaccctgtggtgaagcccaagacagagaaggagaagctgaaggagctgtttcctgtgctgtgccagcctgacaaccccagcgtgaggaccatgctggatgaagatgatgtgaaggtggccgtggatgtgctgaaggagctggaggccctgatgcccagcgctgctggccaggagaagcagagagatgctgagcaccgggacaggaccaagaagaagaagaggagccgcagccgggacaggaacagagaccgggaccgggaccgggagaggaacagagaccgggaccacaagaggaggcacaggagccgcagccgcagccgcagcaggacccgggagaggaacaaggtgaagagccgctaccgcagccgcagccgcagccagagcccccccaaggacaggaaggaccgggacaagtatggagagaggaacctggaccgctggagggacaagcacgtggacaggcctcctcctgaggagcccaccatcggggacatctacaacgggaaggtgaccagcatcatgcagtttggctgctttgtgcagctggagggcctgaggaagcgctgggagggcctggtgcacatcagcgagctgcggcgggagggccgggtggccaacgtggctgatgtggtgtccaagggccagagggtgaaggtgaaggtgctgtccttcaccggcaccaagaccagcctgtccatgaaggatgtggaccaggagaccggggaggacctgaaccccaacagaagaagaaacctggtgggggagaccaatgaggagacctccatgagaaatccagaccggcccacccacctgagcctggtgtctgcccctgaggtggaggatgacagcctggagaggaagaggctgacccgcatcagtgaccctgagaagtgggagatcaagcagatgattgctgccaacgtgctgagcaaggaggagttcccagactttgatgaggagaccggcatcctgcccaaggtggatgatgaagaagatgaggacctggagattgagctggtggaggaggagccccccttcctgcggggccacaccaagcagagcatggacatgagccccatcaagatcgtgaagaacccagatggcagcctgagccaggccgccatgatgcagagcgccctggccaaggagcggcgggagctgaagcaggcccagcgggaggccgagatggacagcatccccatgggcctgaacaagcactgggtggaccccctgcctgatgctgagggccggcagattgctgccaacatgaggggcatcggcatgatgcccaatgacatccctgagtggaagaagcacgcctttggaggcaacaaggccagctatggcaagaagacccagatgagcatcctggagcagcgggagagcctgcccatctacaagctgaaggagcagctggtgcaggccgtgcatgacaaccagatcctgattgtgattggagagaccggcagcggcaagaccacccagatcacccagtacctggccgaggccggctacaccagccggggcaagattggctgcacccagcccaggagagtggccgccatgtctgtggccaagagggtgtctgaggagtttggctgctgcctgggccaggaggtgggctacaccatccgctttgaggactgcaccagccctgagaccgtcatcaagtacatgacagatggcatgctgctgagagaatgtctgattgatcctgacctgacccagtatgccatcatcatgctggatgaggcccacgagaggaccatccacacagatgtgctgtttggcctgctgaagaagacagtgcagaagaggcaggacatgaagctgattgtgaccagcgccaccctggatgctgtgaagttcagccagtacttctatgaggcccccatcttcaccatccctggccgcacctaccctgtggagatcctgtacaccaaggagcctgagacagactacctggatgccagcctcatcaccgtgatgcagatccacctgacagagcccccaggggacatcctggtgttcctgaccggccaggaggagattgacacagcctgtgagatcctgtatgaaagaatgaagagcctgggcccagatgtgcctgagctgatcatcctgcctgtgtacagcgccctgcccagcgagatgcagacccgcatctttgatcctgcccctcctggcagcaggaaggtggtgattgccaccaacattgctgagaccagcctgaccattgatggcatctactacgtggtggaccccggctttgtgaagcagaaggtgtacaacagcaagacaggaattgaccagctggtggtgacccccatcagccaggcccaggccaagcagagagctggccgggccggccgcacaggccctgggaagtgctaccgcctgtacacagagcgggcctacagagatgagatgctgaccaccaacgtgcctgagatccagaggaccaacctggccagcacagtgctgagcctgaaggccatgggcatcaatgacctgctgagctttgacttcatggatgccccacccatggagaccctcatcacagccatggagcagctgtacaccctgggcgccctggatgatgagggcctgctgacccggctgggccgcaggatggccgagttccccctggagcccatgctgtgcaagatgctgatcatgtctgtgcacctgggctgcagcgaggagatgctgaccatcgtgtccatgctgtctgtgcagaatgtgttctaccggcccaaggacaagcaggccctggccgaccagaagaaggccaagttccaccagacagaaggagaccacctgaccctgctggccgtgtacaacagctggaagaacaacaagttcagcaacccctggtgctatgagaacttcatccaggcccggagcctgcggcgggcccaggacatcaggaagcagatgctgggcatcatggacagacacaagctggatgtggtgtcctgtgggaagagcacagtgcgggtgcagaaggccatctgcagcggcttcttcagaaatgctgccaagaaggacccccaggagggctaccgcaccctgattgaccagcaggtggtgtacatccaccccagcagcgccctcttcaaccggcagcctgagtgggtggtgtaccacgagctggtgctgaccaccaaggagtacatgagggaggtgaccaccatcgacccccgctggctggtggagtttgccccagccttcttcaaggtgtctgaccccaccaagctgagcaagcagaagaagcagcagaggctggagcccctgtacaacagatatgaggagcccaatgcctggaggatcagccgggccttcagaagaagatag

SEQ ID NO: 151064 - DNA, 3663 bp, Artificial Sequence
  derived and/or modified sequence
atggccgtggccgtggccatggccggcgccctgatcggcagcgagccaggcccagctgaggagcttgctaagttggaatacctaagcctagtgtctaaggtgtgtacggagctggataaccacttaggcatcaacgacaaggaccttgccgagtttgtgatcagccttgcggaaaagaataccacctttgacacttttaaggcatccctcgtcaagaacggtgctgagttcacagactcgctcatcagcaatctgctccgccttatccaaaccatgagacctcccgcgaagcccagcacttcgaaagatccggtagtaaaacccaaaactgagaaggaaaagctgaaggagctgttccctgttctgtgtcaacccgacaacccttccgtgcggaccatgctcgatgaggatgacgttaaggttgcggtggacgtgctcaaggagcttgaagcactgatgccatcagcggcaggccaggagaaacagagagatgcggagcacagggaccggacaaagaagaagaagcgctcacgttcacgtgaccgaaaccgcgatcgggatagagacagagagcgtaacagggatagagaccacaaacgcagacacagatctagatccaggtccagatcccgaactagggaaagaaacaaggtgaaaagccgctacagaagcaggtctaggtcgcagagccctcctaaagatagaaaggaccgcgacaaatatggggagcgaaacctagacaggtggagagacaaacacgtcgaccgccccccccctgaggagcccactattggcgatatatacaatggaaaagttaccagcatcatgcagtttgggtgttttgtgcagctagaagggctgagaaagcggtgggaagggctagtgcacatctccgagctgcggcgagaggggagagtcgctaatgttgccgacgtggtctcaaagggccagagagtaaaggtcaaagtgctctcctttacaggcacaaagacctctctgtccatgaaggatgtcgatcaggaaacaggcgaggatctgaaccccaatcgtcggcgaaatcttgtcggtgaaaccaatgaggagacctccatgagaaatcccgacaggcccacacacctaagcttggtcagtgcccctgaggtggaggacgacagcctggaacgaaaaagacttacacgaatttccgaccctgagaagtgggagatcaagcaaatgattgctgccaatgtcctcagcaaggaagaatttccagacttcgatgaagagaccgggattctgcccaaggttgacgatgaagaagatgaagatcttgagattgaacttgtcgaggaggagccgcctttcctgagaggacacacaaagcagtccatggacatgtctcccatcaagatcgtgaagaaccccgatggatctctgagccaggccgcaatgatgcagtctgccctggctaaagagagacgtgagctgaaacaagctcagcgagaggcagaaatggattccattcccatggggcttaataagcactgggtggaccccctccccgatgcggagggacgtcaaatagccgcgaacatgcggggaataggaatgatgcccaatgacatccccgagtggaagaaacacgcctttgggggtaacaaggcatcctacggcaaaaaaacacaaatgagcatcctggagcaaagagaaagcctgcccatctataaactgaaagagcaattagtacaagccgtgcatgataaccagattctaatcgtgataggggaaacagggtccggaaagacgacccagataacccagtacctggcggaggctggatacacaagcagaggcaagattggttgtactcagcccaggagggtggcggccatgagcgtggcgaagcgtgtcagtgaggagtttggttgctgcctgggccaggaggtcggatatacgatcaggtttgaggattgcacatctccggagaccgtcattaaatacatgacggacggaatgctgctgagagagtgcctgatcgatccagacttgacacagtatgccatcattatgctggatgaagcccacgagaggacgatacacaccgatgtgttgtttggcctcctgaagaagacagtccaaaagcgtcaggacatgaaacttatagttaccagcgcaacactagatgccgtaaagttcagccagtacttctacgaggcgcctatcttcactattccaggccgaacgtacccagtggaaatcctctataccaaggagcccgaaaccgactacctcgacgcctcactgattaccgtgatgcaaatacatctcactgagccgcctggagacatcctcgtgtttctaactggtcaggaagaaatcgatactgcctgcgaaattttgtacgagcgcatgaagtcactcggcccagacgtgcccgagctgattatcctgccagtttattccgcattgccgagcgagatgcagacaaggatatttgacccggccccacccggctccagaaaggtggtcatcgctacaaatatcgcagaaacctcattaacaatagacggcatctattacgttgtcgacccaggcttcgtcaaacagaaggtgtataactccaagaccggcatagatcagctcgtagtcactcctatttcccaagctcaagccaaacagagagcaggtcgtgccggtcggacaggacccggcaaatgctaccgcctctacaccgaacgggcttacagagacgaaatgctgacgaccaatgtgccggagattcagaggactaacttggcctctaccgttctgagccttaaggcaatgggcattaacgacctgctctctttcgatttcatggatgccccgcccatggagaccttaatcacggcgatggagcaattgtataccttaggagctctcgatgatgagggactcctgacccggcttggccgcagaatggcagagttccccttggaaccaatgctctgtaaaatgctgattatgagtgtacacctggggtgttcagaggagatgctgacgattgtctcaatgttatcagttcagaatgtgttttaccgtccaaaagataagcaagcactggcggatcagaagaaggcaaagttccaccagaccgagggggatcatctgacactgctggcggtttacaattcttggaaaaataacaagttctccaacccatggtgttacgaaaacttcatacaggcgcgttcactcagaagagctcaggacatccgtaagcaaatgctgggaattatggataggcacaaactagatgtcgtatcctgtggaaagtccacagtcagggttcagaaggcaatctgctctgggttttttaggaacgctgcaaagaaggacccacaggagggataccgcacactaatcgaccagcaggtcgtttatattcaccctagctcagccctcttcaacaggcagccagaatgggtagtgtatcacgaacttgttctgacaaccaaggaatacatgcgcgaggtcacaacaattgaccccagatggctcgtggagttcgctccagctttttttaaggtcagtgaccctactaagttgagcaagcaaaagaaacagcaacgactggaaccattgtataaccggtatgaggagcctaatgcttggcgcattagccgggcctttagacggcgctag

SEQ ID NO: 151065 - DNA, 3663 bp, Artificial Sequence
  derived and/or modified sequence
atggccgtggctgtcgcaatggccggtgccctgattggctctgagcccggacctgcagaggagctcgccaagctcgagtatctctcactggtgtccaaggtttgtactgagctggacaaccacctaggaatcaacgataaggatctcgctgaatttgtgatttctctcgctgagaagaacacgaccttcgacaccttcaaggcttccctggtgaagaacggagcagagtttaccgattcccttattagtaacctccttcgtcttatccagacaatgcggccaccggcaaaacctagtaccagcaaggaccctgtggtgaaacctaagactgaaaaagagaagttgaaagagctgttcccagtgctctgtcaacctgacaaccctagcgttcgcaccatgcttgatgaggacgacgtcaaagtcgctgtcgacgtgttgaaagaactggaggccttgatgccctcagcagctggccaggaaaaacagagggacgctgagcatcgcgatagaacaaaaaagaagaaacgatcccgttctagggaccggaaccgtgatcgggatcgcgatcgcgaaagaaacagagaccgcgatcacaaacggagacatcgatcaagaagtaggtctcgctcgagaactagggagcggaacaaggtaaagagtcgctaccgttcgcgaagccgcagccagagccccccaaaagaccgtaaggacagggataaatacggagaaagaaatctggataggtggagagataagcacgtagatcgaccacctcctgaagaacctacaattggggatatctacaacggcaaggtgacatccattatgcagtttgggtgttttgtgcaattggaagggctacggaagcgatgggaaggactggtgcatatttccgagctccgcagagaagggcgagtggctaatgtggctgatgtggttagtaagggccagcgggtaaaggttaaagtgctatcctttaccggtacgaagacatccttgagcatgaaagacgtggatcaagagacaggcgaggacctcaatcccaaccggagacggaatctggtaggcgagacaaacgaagagacaagcatgcggaatccagataggccgacccacttgagcctcgtctcagcacccgaagtagaggacgattccttagagcgaaaacggttgactcggattagcgatccggaaaagtgggagatcaagcagatgattgctgccaatgtcctttctaaagaagaatttccagacttcgatgaggaaacaggaattctccctaaagttgacgatgaagaggacgaggatctggaaatcgagctggtggaagaggagccacccttcttgcggggacatacaaagcaatccatggacatgtccccgatcaaaatagtcaaaaacccagatggaagtctgtcacaggccgctatgatgcagtccgctcttgcaaaggagaggagagagctgaaacaggcacaacgggaggctgagatggactccattccaatgggcctgaataagcactgggtggatcccctgccagacgcagagggacgtcagatcgccgcaaatatgcgcggaattggcatgatgcctaatgatatcccagaatggaaaaagcacgcctttggaggcaacaaagcctcctatggcaagaagacacaaatgagcatccttgagcagagagaatctttacctatttataaactgaaggaacagttggtccaggctgtgcacgacaaccagattctcatcgtcatcggcgaaacaggatccgggaagacgacccagatcactcaatatctcgcagaggctgggtacacttccagagggaagatcgggtgtactcagcccagaagagtggcagctatgtcggttgctaagcgggtgagcgaggaatttggttgctgcctgggccaggaagtagggtataccattagatttgaagattgcacaagcccagagaccgtgatcaaatatatgaccgatggaatgctactgagggagtgtctgatagatcccgatctgacacagtacgcgatcatcatgctcgacgaggctcatgagagaacaattcacacagacgtcctatttggtctcttaaagaaaacagtgcagaaacgccaggatatgaaacttattgtgacatctgctacattggacgccgttaagtttagtcagtatttttatgaggcgcctatttttacaataccaggaaggacgtacccggttgagatattgtataccaaagaacctgagaccgactatctggacgcatctctcatcacagtgatgcagatccacctcaccgagcctcctggcgacatattagtgttcttgacggggcaagaggagatagacactgcatgtgaaatcctatacgagaggatgaaatccctgggaccagatgtgccggagctcatcatcctgcccgtctacagtgccctgccatccgagatgcagacgaggatcttcgatccagccccaccaggcagtaggaaggtggtaatcgcaacgaacattgctgagacttccctcacaatcgacggaatctactatgtggtggatccaggttttgtaaaacagaaagtatataactcaaagaccgggatcgatcagctggttgtgacaccaatttcacaggcgcaggcaaagcagcgtgccggaagagccggaaggaccggcccaggaaaatgttatcgcctttacactgaaagagcttacagagacgaaatgcttacaacaaacgtaccggaaatacagaggaccaacctggcatctactgtgctcagcctaaaggccatgggaatcaatgacttgctttcttttgattttatggacgccccaccaatggagactctgattactgcgatggagcaattgtatacgctgggggcattagatgatgaggggctactgaccagactggggcgaagaatggctgagttccctcttgagcctatgttatgcaaaatgttgatcatgagtgttcacctgggttgcagcgaggaaatgctgaccattgtgagcatgctaagcgttcagaacgtgttttataggcccaaagacaagcaagctcttgctgatcagaagaaagcgaaattccatcagactgagggggatcaccttaccctgctcgccgtgtataattcttggaaaaataacaaattctcaaacccatggtgttacgagaacttcatccaagctcgttccctgcggagggcacaagacattcgcaagcaaatgttgggcatcatggaccggcacaagttggatgtcgtgtcctgcgggaagagtaccgtgcgggtgcagaaggcgatttgctctggtttctttcggaacgcagctaaaaaggatcctcaggaagggtaccgcacgctgatcgaccagcaggttgtttacatccaccctagctccgccctgttcaacagacagcctgagtgggttgtctatcatgagctcgtgcttacaacaaaagagtacatgcgcgaagtgaccacaatcgaccctcggtggctggtagagttcgctcctgctttttttaaggtgagcgaccccacgaagctaagcaaacagaagaagcagcaaagattagaaccactatacaatcgatacgaagagcccaatgcatggcgaatatccagggctttcaggcggaggtag

SEQ ID NO: 151066 - DNA, 3663 bp, Artificial Sequence
  derived and/or modified sequence
atggccgtggccgtggccatggccggcgccctgatcggcagcgagcccggccccgccgaggagctggccaagctggagtacctgagcctggtgagcaaggtgtgcaccgagctggacaaccacctgggcatcaacgacaaggacctggccgagttcgtgatcagcctggccgagaagaacaccaccttcgacaccttcaaggccagcctggtgaagaacggcgccgagttcaccgacagcctgatcagcaacctgctgagactgatccagaccatgagaccccccgccaagcccagcaccagcaaggaccccgtggtgaagcccaagaccgagaaggagaagctgaaggagctgttccccgtgctgtgccagcccgacaaccccagcgtgagaaccatgctggacgaggacgacgtgaaggtggccgtggacgtgctgaaggagctggaggccctgatgcccagcgccgccggccaggagaagcagagagacgccgagcacagagacagaaccaagaagaagaagagaagcagaagcagagacagaaacagagacagagacagagacagagagagaaacagagacagagaccacaagagaagacacagaagcagaagcagaagcagaagcagaaccagagagagaaacaaggtgaagagcagatacagaagcagaagcagaagccagagcccccccaaggacagaaaggacagagacaagtacggcgagagaaacctggacagatggagagacaagcacgtggacagacccccccccgaggagcccaccatcggcgacatctacaacggcaaggtgaccagcatcatgcagttcggctgcttcgtgcagctggagggcctgagaaagagatgggagggcctggtgcacatcagcgagctgagaagagagggcagagtggccaacgtggccgacgtggtgagcaagggccagagagtgaaggtgaaggtgctgagcttcaccggcaccaagaccagcctgagcatgaaggacgtggaccaggagaccggcgaggacctgaaccccaacagaagaagaaacctggtgggcgagaccaacgaggagaccagcatgagaaaccccgacagacccacccacctgagcctggtgagcgcccccgaggtggaggacgacagcctggagagaaagagactgaccagaatcagcgaccccgagaagtgggagatcaagcagatgatcgccgccaacgtgctgagcaaggaggagttccccgacttcgacgaggagaccggcatcctgcccaaggtggacgacgaggaggacgaggacctggagatcgagctggtggaggaggagccccccttcctgagaggccacaccaagcagagcatggacatgagccccatcaagatcgtgaagaaccccgacggcagcctgagccaggccgccatgatgcagagcgccctggccaaggagagaagagagctgaagcaggcccagagagaggccgagatggacagcatccccatgggcctgaacaagcactgggtggaccccctgcccgacgccgagggcagacagatcgccgccaacatgagaggcatcggcatgatgcccaacgacatccccgagtggaagaagcacgccttcggcggcaacaaggccagctacggcaagaagacccagatgagcatcctggagcagagagagagcctgcccatctacaagctgaaggagcagctggtgcaggccgtgcacgacaaccagatcctgatcgtgatcggcgagaccggcagcggcaagaccacccagatcacccagtacctggccgaggccggctacaccagcagaggcaagatcggctgcacccagcccagaagagtggccgccatgagcgtggccaagagagtgagcgaggagttcggctgctgcctgggccaggaggtgggctacaccatcagattcgaggactgcaccagccccgagaccgtgatcaagtacatgaccgacggcatgctgctgagagagtgcctgatcgaccccgacctgacccagtacgccatcatcatgctggacgaggcccacgagagaaccatccacaccgacgtgctgttcggcctgctgaagaagaccgtgcagaagagacaggacatgaagctgatcgtgaccagcgccaccctggacgccgtgaagttcagccagtacttctacgaggcccccatcttcaccatccccggcagaacctaccccgtggagatcctgtacaccaaggagcccgagaccgactacctggacgccagcctgatcaccgtgatgcagatccacctgaccgagccccccggcgacatcctggtgttcctgaccggccaggaggagatcgacaccgcctgcgagatcctgtacgagagaatgaagagcctgggccccgacgtgcccgagctgatcatcctgcccgtgtacagcgccctgcccagcgagatgcagaccagaatcttcgaccccgccccccccggcagcagaaaggtggtgatcgccaccaacatcgccgagaccagcctgaccatcgacggcatctactacgtggtggaccccggcttcgtgaagcagaaggtgtacaacagcaagaccggcatcgaccagctggtggtgacccccatcagccaggcccaggccaagcagagagccggcagagccggcagaaccggccccggcaagtgctacagactgtacaccgagagagcctacagagacgagatgctgaccaccaacgtgcccgagatccagagaaccaacctggccagcaccgtgctgagcctgaaggccatgggcatcaacgacctgctgagcttcgacttcatggacgccccccccatggagaccctgatcaccgccatggagcagctgtacaccctgggcgccctggacgacgagggcctgctgaccagactgggcagaagaatggccgagttccccctggagcccatgctgtgcaagatgctgatcatgagcgtgcacctgggctgcagcgaggagatgctgaccatcgtgagcatgctgagcgtgcagaacgtgttctacagacccaaggacaagcaggccctggccgaccagaagaaggccaagttccaccagaccgagggcgaccacctgaccctgctggccgtgtacaacagctggaagaacaacaagttcagcaacccctggtgctacgagaacttcatccaggccagaagcctgagaagagcccaggacatcagaaagcagatgctgggcatcatggacagacacaagctggacgtggtgagctgcggcaagagcaccgtgagagtgcagaaggccatctgcagcggcttcttcagaaacgccgccaagaaggacccccaggagggctacagaaccctgatcgaccagcaggtggtgtacatccaccccagcagcgccctgttcaacagacagcccgagtgggtggtgtaccacgagctggtgctgaccaccaaggagtacatgagagaggtgaccaccatcgaccccagatggctggtggagttcgcccccgccttcttcaaggtgagcgaccccaccaagctgagcaagcagaagaagcagcagagactggagcccctgtacaacagatacgaggagcccaacgcctggagaatcagcagagccttcagaagaagatag

SEQ ID NO: 151067 - DNA, 4200 bp, Artificial Sequence
  derived and/or modified sequence
gaaagctggaacccggccggagtagctctgagcgccggctgtgaggaaggaggttctgggcaagctatagccatggctgtggctgtagccatggcgggagccttaatcgggtcggagccaggccccgcggaagaacttgccaaactcgagtacctgtctttggtgtcaaaggtttgcactgagctggacaatcacttggggatcaacgacaaggaccttgctgaatttgtgatcagtcttgctgagaaaaataccacctttgatacttttaaggcttctctcgtcaaaaatggtgcagaatttacggattctcttattagtaacttgctgcgtctcatacaaaccatgcggcctccagcgaagccttccactagcaaagatccagttgttaaacctaaaacagaaaaagaaaagctgaaggaactcttcccagtcctttgccaaccggacaacccttctgttcggaccatgttggatgaagatgatgtgaaagttgctgtggatgtcctgaaagaactggaagctttaatgcccagcgcagcaggccaggagaagcaaagagatgctgaacaccgggacaggacaaagaagaagaagcggagtcgaagccgagatcgaaaccgagatcgagacagagatagggaacgaaaccgagatagagaccacaagcggagacaccgatcccgctctcgatcacgttccaggacccgggagaggaataaagtgaagtctagatatcggtccaggagcaggagtcagagtccccccaaagaccggaaggaccgggacaaatatggagagcggaatctggatagatggcgggataagcatgtggaccgccctcctccagaagagcccaccattggtgacatttataatggcaaagttaccagcatcatgcagtttggttgctttgtgcagctggaaggactaaggaagcggtgggaaggcctggtgcacatctctgagctccggcgggagggtcgtgtggccaatgtagctgatgtcgtgagcaaaggccagagggtcaaagtcaaagtgctgtccttcactgggaccaagaccagcctgagcatgaaggatgtggatcaagagactggagaagatctaaacccaaatagacggcgaaatcttgtcggggagaccaatgaggagacctcaatgcggaatcctgatagacccactcacttgtcccttgtcagtgctcctgaagtagaggacgactcactggaacgcaagcgcctcacccgaatctctgacccagagaagtgggagatcaaacagatgattgctgccaatgtcctttccaaagaagaatttccagactttgatgaagagactggcattctccctaaggtggatgatgaagaagatgaggaccttgagattgaattggttgaggaagagcctccattcctgagagggcacactaagcaaagcatggacatgagccccattaaaattgtcaagaacccagacggctccctctcccaagcagcaatgatgcagagtgccttggccaaagaaaggcgggaactcaaacaggcccagcgggaagctgagatggattctattcccatgggactcaacaaacactgggttgaccctctgcctgatgcggaaggcagacagattgctgccaacatgaggggtattgggatgatgcccaatgatattcctgagtggaagaagcatgcctttgggggcaacaaagcctcttacggaaaaaagacccagatgtcaatccttgagcagagggagagcctgcccatctacaaactgaaggagcaattggtccaggccgtccatgacaatcagatcctgattgtcattggtgagacaggatctggaaagacaacacagatcacccagtacctggcggaggcaggctacacttccaggggcaagattgggtgtacccagcccagaagagtggcagctatgtcggtggccaaaagagtgtcagaggagtttggttgttgcttaggccaagaggtgggctacaccattcgatttgaggactgcactagccctgaaacagtcatcaagtacatgacagatgggatgttgcttagagagtgcttgattgaccctgacctcactcagtacgcgatcatcatgttggacgaggcacatgagaggacaattcacactgatgtgctctttggattgttgaaaaagacagttcagaaacggcaggacatgaagctgattgtcacctcagccaccttggatgcagtgaagttttctcaatacttctatgaagctcccattttcaccatcccaggtcgaacatatccagtggaaatactgtacacaaaggaacctgagacagattatctggatgccagcctgattactgttatgcagattcatttaacagaaccaccaggtgatatcctggtcttcctgactggtcaggaagaaattgatactgcttgtgagatcctgtatgaaagaatgaaatccctgggacctgatgttccagagttaattatcctcccagtgtactctgctcttcccagtgagatgcagacccgaatctttgacccagctccaccaggcagcagaaaggttgtgattgccaccaatatcgcagagacatcgctgactattgatggtatctactatgtggtggacccaggattcgtgaaacagaaagtttacaattccaagacagggattgaccagctcgtggtgacgcctatttctcaggctcaggcaaagcaacgagctggcagagctgggagaacaggcccagggaagtgttacaggttgtacacagaacgtgcctaccgagatgaaatgctgaccaccaacgtgccggaaatccagagaaccaacttagcaagcacagtgctgtcactcaaggccatgggtatcaatgatctgctgtcctttgatttcatggatgccccacctatggaaactttgatcacagccatggagcagctgtacacactgggggccctggatgacgagggcctgctcactcgcttgggccgccggatggcagagttccctctggagccaatgctatgcaaaatgctcatcatgtctgtgcatctgggctgcagtgaggaaatgctgaccattgtatccatgctgtctgtgcagaacgtcttctataggcccaaggataaacaagcccttgcagatcagaagaaggccaaattccaccagactgaaggggaccacctcaccctgctagctgtgtacaactcctggaagaacaacaagttctccaacccatggtgctatgagaactttatccaggctcgttccctgcgccgggcccaggacattcgcaagcagatgttaggcataatggacagacacaagctggatgttgtttcctgtggcaagtccacagtccgagtgcagaaggccatctgcagtgggttcttccgtaatgctgccaagaaagacccgcaggagggttaccggacactgatcgaccagcaggtggtctatatccatccttccagtgccctcttcaacagacagccagaatgggtggtgtaccatgagctggtgctcaccaccaaggaatacatgcgtgaagttaccaccatcgaccctcggtggcttgtggagtttgccccagccttcttcaaggtctcagacccaactaagctaagcaaacagaagaagcaacagcgtcttgaacccttgtacaaccgctatgaggaacccaatgcctggagaatatctcgagctttccgacggcgctgaaaggcaagattgttcctttgcctctccagcagcagtagccagggcttggacttatcgatgacaggctggtcctgaggatacagctgtcccgtgactgactgtcttaactgagcattttctcaactcgactctcatttcttccctgctggtaaaatagaaacagggatttaaacctggctttggcaagagcctgcagcctccatcaccccaagtccttgggcccagttgggagctcatatctaacacagagacacattgcatcaacttcaagaaagggacaatttgtgcagctccaggatgggaaggtggagtgggtgagcatcttgtgcagggacatggtgagtgccctgatgccccagctagcaggagctactgtgctcatctaaagtgtttgccccacttcccaccccgtctccagcccctgtactttggcttgacctcgtggaaatatttattttcttaagg

SEQ ID NO: 151068 - protein, 36 aa, Artificial Sequence
  derived and/or modified sequence
SPLSCRGNRGVCLPIRCPGRLRQIGTCFGPRVPCCR

SEQ ID NO: 151069 - protein, 64 aa, Artificial Sequence
  derived and/or modified sequence
MRLHHLLLALLFLVLSAGSGFTQGVRNSQSCRRNKGICVPIRCPGSMRQIGTCLGAQVKCCRRK

SEQ ID NO: 151070 - protein, 42 aa, Artificial Sequence
  derived and/or modified sequence
KNIGNSVSCLRNKGVCMPGKCAPKMKQIGTCGMPQVKCCKRK

SEQ ID NO: 151071 - protein, 38 aa, Artificial Sequence
  derived and/or modified sequence
DFASCHTNGGICLPNRCPGHMIQIGICFRPRVKCCRSW

SEQ ID NO: 151072 - protein, 40 aa, Artificial Sequence
  derived and/or modified sequence
EGVRSYLSCWGNRGICLLNRCPGRMRQIGTCLAPRVKCCR

SEQ ID NO: 151073 - protein, 39 aa, Artificial Sequence
  derived and/or modified sequence
DPVTCLKSGAICHPVFCPRRYKQIGTCGLPGTKCCKKPP

SEQ ID NO: 151074 - protein, 41 aa, Artificial Sequence
  derived and/or modified sequence
GIGDPVTCLKSGAICHPVFCPRRYKQIGTCGLPGTKCCKKP

SEQ ID NO: 151075 - protein, 38 aa, Artificial Sequence
  derived and/or modified sequence
GPLSCRRNGGVCIPIRCPGPMRQIGTCFGRPVKCCRSW

SEQ ID NO: 151076 - protein, 64 aa, Artificial Sequence
  derived and/or modified sequence
MRLHHLLLALLFLVLSAWSGFTQGVGNPVSCVRNKGICVPIRCPGSMKQIGTCVGRAVKCCRKK

SEQ ID NO: 151077 - protein, 38 aa, Artificial Sequence
  derived and/or modified sequence
GPLSCGRNGGVCIPIRCPVPMRQIGTCFGRPVKCCRSW

SEQ ID NO: 151078 - protein, 42 aa, Artificial Sequence
  derived and/or modified sequence
SGISGPLSCGRNGGVCIPIRCPVPMRQIGTCFGRPVKCCRSW

SEQ ID NO: 151079 - protein, 40 aa, Artificial Sequence
  derived and/or modified sequence
VRNHVTCRINRGFCVPIRCPGRTRQIGTCFGPRIKCCRSW

SEQ ID NO: 151080 - protein, 42 aa, Artificial Sequence
  derived and/or modified sequence
EGVRNHVTCRINRGFCVPIRCPGRTRQIGTCFGPRIKCCRSW

SEQ ID NO: 151081 - protein, 44 aa, Artificial Sequence
  derived and/or modified sequence
FTQGVRNSQSCRRNKGICVPIRCPGSMRQIGTCLGAQVKCCRRK

SEQ ID NO: 151082 - protein, 64 aa, Artificial Sequence
  derived and/or modified sequence
MRVLYLLFSFLFIFLMPLPGVFGGISDPVTCLKSGAICHPVFCPRRYKQIGTCGLPGTKCCKKP

SEQ ID NO: 151083 - protein, 64 aa, Artificial Sequence
  derived and/or modified sequence
MRVLYLLFSFLFIFLMPLPGVFGGIGDPVTCLKSGAICHPVFCPRRYKQIGTCGLPGTKCCKKP

SEQ ID NO: 151084 - protein, 40 aa, Artificial Sequence
  derived and/or modified sequence
EVVRNPQSCRWNMGVCIPISCPGNMRQIGTCFGPRVPCCR

SEQ ID NO: 151085 - protein, 36 aa, Artificial Sequence
  derived and/or modified sequence
NHRSCYRNKGVCAPARCPRNMRQIGTCHGPPVKCCR

SEQ ID NO: 151086 - protein, 40 aa, Artificial Sequence
  derived and/or modified sequence
QVVRNPQSCRWNMGVCIPISCPGNMRQIGTCFGPRVPCCR

SEQ ID NO: 151087 - protein, 36 aa, Artificial Sequence
  derived and/or modified sequence
NPQSCRWNMGVCIPISCPGNMRQIGTCFGPRVPCCR

SEQ ID NO: 151088 - protein, 40 aa, Artificial Sequence
  derived and/or modified sequence
IRNPVTCIRSGAICYPRSCPGSYKQIGVCGVSVIKCCKKP

SEQ ID NO: 151089 - protein, 36 aa, Artificial Sequence
  derived and/or modified sequence
NPVSCVRNKAICVPIRSPANMKQIGSCVGRAVKCCR

SEQ ID NO: 151090 - protein, 36 aa, Artificial Sequence
  derived and/or modified sequence
NPVSCVRNKGICVPIRCPGNMKQIGTCVGRAVKCCR

SEQ ID NO: 151091 - protein, 38 aa, Artificial Sequence
  derived and/or modified sequence
NPVSCVRNKGICVPIRCPGSMKQIGTCVGRAVKCCRKK

SEQ ID NO: 151092 - protein, 36 aa, Artificial Sequence
  derived and/or modified sequence
NPVSCVRNKGICVPIRCPGSMKQIGTCVGRAVKCCR

SEQ ID NO: 151093 - protein, 42 aa, Artificial Sequence
  derived and/or modified sequence
QGVRNHVTCRIYGGFCVPIRCPGRTRQIGTCFGRPVKCCRRW

SEQ ID NO: 151094 - protein, 42 aa, Artificial Sequence
  derived and/or modified sequence
EGVRNHVTCRIYGGFCVPIRCPGRTRQIGTCFGRPVKCCRRW

SEQ ID NO: 151095 - protein, 40 aa, Artificial Sequence
  derived and/or modified sequence
QGVRNFVTCRINRGFCVPIRCPGHRRQIGTCLGPRIKCCR

SEQ ID NO: 151096 - protein, 40 aa, Artificial Sequence
  derived and/or modified sequence
EGVRNFVTCRINRGFCVPIRCPGHRRQIGTCLGPRIKCCR

SEQ ID NO: 151097 - protein, 36 aa, Artificial Sequence
  derived and/or modified sequence
NFVTCRINRGFCVPIRCPGHRRQIGTCLGPRIKCCR

SEQ ID NO: 151098 - protein, 38 aa, Artificial Sequence
  derived and/or modified sequence
VRNFVTCRINRGFCVPIRCPGHRRQIGTCLGPQIKCCR

SEQ ID NO: 151099 - protein, 40 aa, Artificial Sequence
  derived and/or modified sequence
EGVRNFVTCRINRGFCVPIRCPGHRRQIGTCLGPQIKCCR

SEQ ID NO: 151100 - protein, 40 aa, Artificial Sequence
  derived and/or modified sequence
QGVRNFVTCRINRGFCVPIRCPGHRRQIGTCLAPQIKCCR

SEQ ID NO: 151101 - protein, 36 aa, Artificial Sequence
  derived and/or modified sequence
NPVTCLRSGAICHPGFCPRRYKHIGICGVSAIKCCK

SEQ ID NO: 151102 - protein, 36 aa, Artificial Sequence
  derived and/or modified sequence
NPVTCIRSGAICHPGFCPGRYKHIGVCGVPLIKCCK

SEQ ID NO: 151103 - protein, 36 aa, Artificial Sequence
  derived and/or modified sequence
NPVTCLRSGAICHPGFCPRRYKHIGVCGVSAIKCCK

SEQ ID NO: 151104 - protein, 36 aa, Artificial Sequence
  derived and/or modified sequence
NHRSCHRIKGVCAPDRCPRNMRQIGTCFGPPVKCCR

SEQ ID NO: 151105 - protein, 36 aa, Artificial Sequence
  derived and/or modified sequence
NPISCARNRGVCIPIGCLPGMKQIGTCGLPGTKCCR

SEQ ID NO: 151106 - protein, 36 aa, Artificial Sequence
  derived and/or modified sequence
NPVTCLRSGAICHPGFCPRRYKHIGTCGLSVIKCCK

SEQ ID NO: 151107 - protein, 36 aa, Artificial Sequence
  derived and/or modified sequence
NSVTCSKNGGFCISPKCLPGSKQIGTCSLPGSKCCK

SEQ ID NO: 151108 - protein, 51 aa, Artificial Sequence
  derived and/or modified sequence
DDSIQCFQKNNTCHTNQCPYFQDEIGTCYDKRGKCCQKRLLHIRVPRKKKV

SEQ ID NO: 151109 - protein, 38 aa, Artificial Sequence
  derived and/or modified sequence
NHRSCYRNKGVCAPARCPRNMRQIGTCHGPPVKCCRKK

SEQ ID NO: 151110 - protein, 36 aa, Artificial Sequence
  derived and/or modified sequence
NSVTCSKNGGFCISPKCPPGMKQIGTCGLPGSKCCR

SEQ ID NO: 151111 - protein, 35 aa, Artificial Sequence
  derived and/or modified sequence
PQSCHRNKGVCVPIRCPRSMRQIGTCLGAPVKCCR

SEQ ID NO: 151112 - protein, 36 aa, Artificial Sequence
  derived and/or modified sequence
DPVTCLKSGAICHPVFCPRRYKQIGTCGLPGTKCCK

SEQ ID NO: 151113 - protein, 36 aa, Artificial Sequence
  derived and/or modified sequence
NPLSCRLNRGICVPIRCPGNLRQIGTCFTPSVKCCR

SEQ ID NO: 151114 - protein, 36 aa, Artificial Sequence
  derived and/or modified sequence
NPQSCHRNKGICVPIRCPGNMRQIGTCLGPPVKCCR

SEQ ID NO: 151115 - protein, 36 aa, Artificial Sequence
  derived and/or modified sequence
NPVSCARNKGICVPSRCPGNMRQIGTCLGPPVKCCR

SEQ ID NO: 151116 - protein, 36 aa, Artificial Sequence
  derived and/or modified sequence
SRRSCHRNKGVCALTRCPRNMRQIGTCFGPPVKCCR

SEQ ID NO: 151117 - protein, 36 aa, Artificial Sequence
  derived and/or modified sequence
NSQSCRRNKGICVPIRCPGSMRQIGTCLGAQVKCCR

SEQ ID NO: 151118 - protein, 40 aa, Artificial Sequence
  derived and/or modified sequence
VRNSQSCRRNKGICVPIRCPGSMRQIGTCLGAQVKCCRRK

SEQ ID NO: 151119 - protein, 38 aa, Artificial Sequence
  derived and/or modified sequence
NPVSCVRNKGICVPIRCPGNMKQIGTCVGRAVKCCRKK

SEQ ID NO: 151120 - protein, 38 aa, Artificial Sequence
  derived and/or modified sequence
SRRSCHRNKGVCALTRCPRNMRQIGTCFGPPVKCCRKK

SEQ ID NO: 151121 - protein, 42 aa, Artificial Sequence
  derived and/or modified sequence
QGVRNRLSCHRNKGVCVPSRCPRHMRQIGTCRGPPVKCCRKK

SEQ ID NO: 151122 - protein, 42 aa, Artificial Sequence
  derived and/or modified sequence
HGVTDSLSCRWKKGICVLTRCPGTMRQIGTCFGPPVKCCRLK

SEQ ID NO: 151123 - protein, 41 aa, Artificial Sequence
  derived and/or modified sequence
GISDPVTCLKSGAICHPVFCPRRYKQIGTCGLPGTKCCKKP

SEQ ID NO: 151124 - protein, 36 aa, Artificial Sequence
  derived and/or modified sequence
DPVTCLKNGAICHPVFCPRRYKQIGTCGLPGTKCCK

SEQ ID NO: 151125 - protein, 41 aa, Artificial Sequence
  derived and/or modified sequence
KKINNPVSCLRKGGRCWNRCIGNTRQIGSCGVPFLKCCKRK

SEQ ID NO: 151126 - protein, 50 aa, Artificial Sequence
  derived and/or modified sequence
IDSVKCFQKNNTCHTIRCPYFQDEVGTCYEGRGKCCQKRLLSIRVPKKKV

SEQ ID NO: 151127 - protein, 41 aa, Artificial Sequence
  derived and/or modified sequence
QIINNPITCMTNGAICWGPCPTAFRQIGNCGHFKVRCCKIR

SEQ ID NO: 151128 - protein, 41 aa, Artificial Sequence
  derived and/or modified sequence
QSINNPITCLTKGGVCWGPCTGGFRQIGTCGLPRVRCCKKK

SEQ ID NO: 151129 - protein, 41 aa, Artificial Sequence
  derived and/or modified sequence
QSINNPVSCVTHGGICWGRCPGSFRQIGTCGLGKVRCCKKK

SEQ ID NO: 151130 - protein, 41 aa, Artificial Sequence
  derived and/or modified sequence
KKVYNAVSCMTNGGICWLKCSGTFREIGSCGTRQLKCCKKK

SEQ ID NO: 151131 - protein, 38 aa, Artificial Sequence
  derived and/or modified sequence
NPLSCRLNRGICVPIRCPGNLRQIGTCFTPSVKCCRWR

SEQ ID NO: 151132 - DNA, 192 bp, Artificial Sequence
  derived and/or modified sequence
atgagagtcctttatctattgttctcgtttctgttcatttttttgatgccgctgcctggggtcttcggtgggatcggagatcctgtcacatgtcttaaatccggagccatttgtcatcccgtgttctgccctcgcagatataagcagatcggcacctgcgggctccctgggacaaagtgttgcaaaaagccc

SEQ ID NO: 151133 - DNA, 192 bp, Artificial Sequence
  derived and/or modified sequence
atgcgggtcttgtacttactattttcttttctttttatctttttgatgcctttgccaggggtgtttggtgggatcggtgacccagtgacttgccttaagagcggagcaatctgtcacccagtgttctgtccacgtagatataaacagatcggtacttgtgggcttcccggaacaaagtgctgcaagaagcct

SEQ ID NO: 151134 - DNA, 192 bp, Artificial Sequence
  derived and/or modified sequence
atgagggtgctgtatctcctgtttagctttctatttatcttcctgatgcccctgcccggcgtgttcggcggcataggtgacccggtaacctgtctgaaatccggggctatttgtcacccggtattttgccctcggcgctacaagcagatcgggacatgtggcctgcctggtaccaaatgttgcaagaaacca

SEQ ID NO: 151135 - DNA, 192 bp, Artificial Sequence
  derived and/or modified sequence
atgcgtgtcctgtatctactcttctcttttctttttatttttttgatgccactacccggagtcttcggtggcatcggagatcccgtgacttgtttgaagtctggggccatctgccatccagttttctgcccgcgtcgttacaagcagataggcacctgcggcttgcctggtactaagtgctgcaagaagcct

SEQ ID NO: 151136 - DNA, 192 bp, Artificial Sequence
  derived and/or modified sequence
atgagagtcctgtaccttctgttttcgttccttttcattttcctcatgccccttccaggagtgtttggaggtattggcgacccggtgacttgccttaaatcgggtgccatttgtcatccggtgttttgtcctagaaggtacaagcaaatcggaacctgtggactccctggtactaaatgttgtaagaagccc

SEQ ID NO: 151137 - DNA, 192 bp, Artificial Sequence
  derived and/or modified sequence
atgagagtcctgtacctgctgttcagttttctgtttatctttctaatgcctctaccaggggtgtttggcggaatcggtgatccggtaacatgcttaaaatccggagcaatctgtcacccagttttctgccctcggcgttataaacaaatcggaacttgtgggctccctggcactaagtgctgcaaaaaacct

SEQ ID NO: 151138 - DNA, 192 bp, Artificial Sequence
  derived and/or modified sequence
atgcgcgtgctgtatctgttattctccttcctctttatatttctgatgccattaccaggtgttttcgggggaatcggggacccagtgacgtgtctcaaatccggggctatctgccatcccgtcttctgtcccagacgatacaaacaaattggcacttgtgggctcccaggcacaaaatgctgtaagaagcca

SEQ ID NO: 151139 - DNA, 192 bp, Artificial Sequence
  derived and/or modified sequence
atgagagtcctgtaccttctgttttcctttctgttcatcttcctgatgcccctcccaggagtcttcggcgggatcggggatccagtgacctgcctgaagagcggagctatctgccatcctgtgttctgcccgcgccgatacaagcagatcggcacctgcgggctgcctggaaccaaatgttgcaagaaacca

SEQ ID NO: 151140 - DNA, 192 bp, Artificial Sequence
  derived and/or modified sequence
atgagagtcctatatttattgttctcgtttctgttcattttcctaatgccactccccggggtcttcgggggaatcggagacccagttacatgtctgaaatccggagcaatctgccatcctgtgttttgtcctcgccggtataagcagatcggaacatgtggactacccgggacaaaatgctgtaaaaagccc

SEQ ID NO: 151141 - DNA, 192 bp, Artificial Sequence
  derived and/or modified sequence
atgcgcgtgttgtacctcctcttctcgttcctgttcatctttctgatgccgctgccaggcgtgtttggaggaatcggggacccagtcacctgcctgaaaagcggcgccatctgtcatccggtgttttgtccgcgacggtacaagcaaatcggaacgtgtggactccctggaactaaatgctgcaagaaacca

SEQ ID NO: 151142 - DNA, 192 bp, Artificial Sequence
  derived and/or modified sequence
atgagggtgctgtacctccttttctcattcctctttatcttcctcatgccgctacctggggtctttgggggaatcggagacccagtgacatgtctcaaatctggagcaatctgtcatccagtgttctgtccccggcgatataaacagataggaacatgtgggctccccgggactaaatgctgtaagaaaccc

SEQ ID NO: 151143 - DNA, 192 bp, Artificial Sequence
  derived and/or modified sequence
atgagggtgttgtacctactgtttagcttcctgtttatctttcttatgccattgcccggggtgttcggcggtatcggagaccccgtaacgtgcctgaaaagtggtgcaatctgccatcctgtcttctgtcccagaagatataagcagatagggacctgtggactccctggaacaaagtgctgtaaaaaaccc

SEQ ID NO: 151144 - DNA, 192 bp, Artificial Sequence
  derived and/or modified sequence
atgcgggtcctctatctgctgtttagtttccttttcatcttcttaatgcccctgccgggagtgtttggcggaatcggcgatcccgttacatgcctaaagagcggggccatttgccaccccgttttttgccccagaagatataaacagatcggtacctgcggactgccagggacaaagtgctgcaagaagccg

SEQ ID NO: 151145 - DNA, 192 bp, Artificial Sequence
  derived and/or modified sequence
atgcgcgtgctctaccttctgttcagcttcttgtttatctttctgatgcccctgccgggagttttcggcgggatcggtgacccggtcacttgtctgaagtcgggagcaatctgccatccggtcttttgcccccgccggtacaagcagattggaacctgcggattgccggggactaagtgctgcaaaaaaccc

SEQ ID NO: 151146 - DNA, 192 bp, Artificial Sequence
  derived and/or modified sequence
atgcgcgtgctctacctgcttttttcctttctcttcatcttcctcatgcctctcccgggagtgttcgggggcatcggcgacccggtgacttgtctgaagtcgggcgccatctgccacccggtcttttgcccacggcgctacaaacagattggaacctgtggtctgccgggaacgaagtgctgcaaaaaaccg

SEQ ID NO: 151147 - DNA, 192 bp, Artificial Sequence
  derived and/or modified sequence
atgagggttttgtacctgctgttcagctttctatttatcttcctcatgccgcttcctggcgtgtttggaggcataggggaccccgtgacttgcctcaaatctggggcaatctgccacccagtgttctgcccccgccggtataagcagataggtacttgtggccttcccggcacgaaatgctgtaaaaagcca

SEQ ID NO: 151148 - DNA, 192 bp, Artificial Sequence
  derived and/or modified sequence
atgcgagtgctttatctgctgttttcatttttgttcatcttcttgatgcctttgccaggcgtatttgggggcattggagatcctgtgacctgtttgaaatcaggagcaatctgccacccagtgttctgtccccgtaggtataaacagatcggcacctgtggcctgccagggactaagtgctgcaagaaaccc

SEQ ID NO: 151149 - DNA, 192 bp, Artificial Sequence
  derived and/or modified sequence
atgcgggtcctttacttactgtttagtttcctgttcatctttctaatgcctctccctggagtctttggcggcatcggcgaccctgtgacatgcctgaagtcaggagccatctgccaccccgttttctgtccaaggcggtacaagcagatcggcacatgtggcctccctgggactaaatgttgtaagaagcca

SEQ ID NO: 151150 - DNA, 192 bp, Artificial Sequence
  derived and/or modified sequence
atgagagtcctttacttgctgttcagtttcctcttcatttttctgatgccacttccgggagtgttcggcgggattggcgaccccgtgacgtgtcttaaaagcggtgccatttgccacccagtgttctgcccgcgcaggtataagcagatcggtacctgcggactgcccggcactaaatgctgcaaaaagcct

SEQ ID NO: 151151 - DNA, 192 bp, Artificial Sequence
  derived and/or modified sequence
atgagggttctctatctcctgttttcctttctcttcatctttttgatgcccctgccgggagtctttggcgggattggagatcctgtgacttgtttgaagtcgggggctatttgtcatcccgtcttttgccctcgaagatataagcagatcggcacatgcggtttgcctggtaccaaatgttgtaaaaagccc

SEQ ID NO: 151152 - DNA, 192 bp, Artificial Sequence
  derived and/or modified sequence
atgcgggtcttgtacctcctattctcctttctgtttatttttctgatgcccctgcccggggtgttcggtggcataggggaccctgtgacatgcctcaagtccggcgctatttgtcatcctgtgttctgccccaggcggtacaagcagatcggaacctgtggactaccaggtacaaagtgttgcaagaagccc

SEQ ID NO: 151153 - DNA, 192 bp, Artificial Sequence
  derived and/or modified sequence
atgagagtgctctacctgctcttttcctttcttttcatttttctcatgcctctgcccggtgtgtttggaggcatcggtgaccccgtgacctgcctgaagtcgggtgcaatttgccatccggtgttctgtcctcgacggtacaagcaaataggaacctgcgggcttcctgggactaagtgctgcaaaaagcct

SEQ ID NO: 151154 - DNA, 192 bp, Artificial Sequence
  derived and/or modified sequence
atgagagtgctttaccttctgttctccttcctgttcatttttctcatgcctctccctggcgtgttcggtggcattggagatcccgtcacttgcctcaagtcgggagcaatctgccatcctgtcttttgtccccgaagatacaaacaaatcggtacctgtggcctgccgggaactaaatgttgtaaaaagcca

SEQ ID NO: 151155 - DNA, 192 bp, Artificial Sequence
  derived and/or modified sequence
atgcgtgtgctatacctcctgttctcatttctctttatctttctgatgccactgccaggcgtttttggtggaatcggcgatcctgtaacatgcctgaagagcggggccatttgccatcctgtgttctgtccccgaaggtacaagcaaatcggtacatgtggcctccccgggacgaaatgctgtaaaaaacct

SEQ ID NO: 151156 - DNA, 192 bp, Artificial Sequence
  derived and/or modified sequence
atgcgtgttctgtacctcctgttttcttttttatttatctttctcatgcctctccccggtgtgttcggtgggataggagaccctgtgacatgtctcaaaagtggagcaatttgtcaccccgtattctgcccgagaaggtacaaacaaatcggtacctgcgggctgcccggcacaaaatgttgcaagaagccc

SEQ ID NO: 151157 - DNA, 192 bp, Artificial Sequence
  derived and/or modified sequence
atgcgggtgctctacctcctgttttcgttccttttcatcttcctgatgccattgcctggagtgttcggagggattggcgaccccgtgacctgcctgaagtccggagccatctgccacccggtcttttgcccgcgcagatacaaacagatcggaacttgtggcctgccgggtaccaaatgttgcaagaagcca

SEQ ID NO: 151158 - DNA, 192 bp, Artificial Sequence
  derived and/or modified sequence
atgcgagtgctgtatctgctttttagcttcctgttcatctttctcatgcctctgccaggagtctttggtggaatcggcgatccagtgacgtgtcttaaatcgggagcgatttgccaccctgtgttctgcccgagacgctacaaacaaatcggaacctgtggactgccaggtactaagtgttgtaagaagccg

SEQ ID NO: 151159 - DNA, 192 bp, Artificial Sequence
  derived and/or modified sequence
atgagggtcctttacttgctgtttagctttctcttcatcttcctgatgcctctccccggggtatttggcggcataggagacccagtaacttgtctgaaatctggtgcgatctgccatccagtcttctgtcctcggcgatacaagcagatcggcacttgcggcttgcctgggaccaagtgttgcaagaaacct

SEQ ID NO: 151160 - DNA, 192 bp, Artificial Sequence
  derived and/or modified sequence
atgcgagtcctctacctgctgttttcctttctgtttatcttcctgatgccattgcctggggtctttgggggtatcggagatccagttacttgccttaagtccggtgcaatttgtcacccggtgttttgtcccagacggtacaagcaaatcggtacctgtggactccctggaacgaagtgttgcaagaagcct

SEQ ID NO: 151161 - DNA, 192 bp, Artificial Sequence
  derived and/or modified sequence
atgcgcgtgctgtaccttctgttctcctttctctttatctttctcatgccattgcctggagtctttggcggcattggtgacccagtgacctgcctgaagtcgggcgcaatctgtcatcctgtgttttgccctcgtcggtataaacaaattggcacctgcgggctgccaggaaccaagtgttgcaagaaaccc

SEQ ID NO: 151162 - DNA, 192 bp, Artificial Sequence
  derived and/or modified sequence
atgagagtcctgtacctgctgttttcgtttcttttcatattcctcatgcctctccccggcgtctttggtggcattggcgatcccgtgacatgcctgaaatctggagccatctgtcacccagtgttctgtcctagaaggtataagcaaataggaacctgcgggctcccaggaacgaagtgttgtaaaaaaccc

SEQ ID NO: 151163 - DNA, 192 bp, Artificial Sequence
  derived and/or modified sequence
atgcgggtcctgtacctcctcttctcattcctgtttatcttcctcatgccgctgccaggggtttttggtggcatcggggacccggtgacttgcttgaagtccggagcgatttgtcacccagtgttctgcccgagacgatacaaacagatcggaacctgcggcctgccgggtacgaagtgctgtaaaaagcct

SEQ ID NO: 151164 - DNA, 192 bp, Artificial Sequence
  derived and/or modified sequence
atgagggtcttatacctgctcttttccttcctgtttatttttcttatgcctcttccgggcgtattcggaggaattggggatccggtcacatgcttgaagtctggtgccatttgccaccccgtcttctgcccacgcagatataagcagatcggtacctgtggccttccgggcaccaagtgttgcaagaagccc

SEQ ID NO: 151165 - DNA, 192 bp, Artificial Sequence
  derived and/or modified sequence
atgagagtcctgtacttgctcttttccttcctgttcatctttttaatgcccctgccaggtgtgtttgggggcataggagatccggtcacctgtttgaagtctggagccatctgccaccccgtgttttgcccaaggagatacaagcaaattgggacctgtgggctccctggcaccaagtgttgtaagaaacct

SEQ ID NO: 151166 - DNA, 192 bp, Artificial Sequence
  derived and/or modified sequence
atgagggtgctttatctcctgttctccttcctcttcatcttcttgatgccactacccggcgtttttggcgggataggtgatccggtgacctgcctgaagtccggagccatttgccatccagtgttctgtcctcgccgatataaacagatcggtacgtgcggcctacccggtacgaagtgttgtaagaagccc

SEQ ID NO: 151167 - DNA, 192 bp, Artificial Sequence
  derived and/or modified sequence
atgcgggtgctttacctgctgttctcgtttctgtttatcttccttatgcctctgcctggagtgtttggcggcataggagatccagtcacctgcctgaagtccggggcaatttgccatcccgtcttttgcccaagacgttacaagcaaattggcacttgtggacttcccggtactaaatgttgtaaaaagcct

SEQ ID NO: 151168 - DNA, 192 bp, Artificial Sequence
  derived and/or modified sequence
atgagagtgctgtacctcctcttcagctttctcttcatttttttgatgcccctgcctggcgtattcgggggaatcggcgatcccgtgacgtgcctgaagtctggtgccatctgccatccggtgttctgtcctcgacgatataagcagatagggacctgcggactcccgggcacaaagtgttgcaaaaaacca

SEQ ID NO: 151169 - DNA, 192 bp, Artificial Sequence
  derived and/or modified sequence
atgcgagttctgtaccttttgttctccttccttttcatttttctcatgcctctgcccggggtgtttggcggcatcggggaccctgttacatgtctaaaatcgggcgccatctgccatccggtgttctgcccaagacgatacaagcagataggcacatgtggccttcctgggacgaagtgttgcaagaagcca

SEQ ID NO: 151170 - DNA, 192 bp, Artificial Sequence
  derived and/or modified sequence
atgcgggtgttgtatttactgtttagttttcttttcatctttttaatgccactacctggggtgtttggtgggattggggaccccgtaacctgtctcaaatccggcgcgatttgtcaccccgtcttttgcccgagaaggtataagcagatcggaacgtgcggacttcccggcaccaagtgctgcaaaaagccc

SEQ ID NO: 151171 - DNA, 192 bp, Artificial Sequence
  derived and/or modified sequence
atgcgtgtcttgtatctgctcttcagtttcctgttcatctttttgatgcccttgcccggcgtcttcggcggaatcggagaccctgtgacttgtctgaagagtggtgctatctgccatccagtgttctgtccccgtcgctacaagcaaatcggtacctgcggtttgcctggtacaaagtgctgtaagaagccc

SEQ ID NO: 151172 - DNA, 192 bp, Artificial Sequence
  derived and/or modified sequence
atgcgggtcctttaccttcttttctcgtttctcttcatattccttatgcctctgccaggagtgttcggcgggattggcgacccagtcacttgccttaagtccggagcaatttgccatccggtgttttgtccacgaaggtacaagcagattggtacttgtggcctgccaggaaccaagtgttgtaagaagcct

SEQ ID NO: 151173 - DNA, 192 bp, Artificial Sequence
  derived and/or modified sequence
atgagggttctctacttgctcttttccttcctttttattttcctgatgcccctgcctggtgtcttcggcggcatcggtgatccagtgacctgcctgaaatctggtgcaatctgccacccggtgttctgccctcgccgctacaaacagataggaacctgtggtctgccgggtactaaatgttgtaaaaagcca

SEQ ID NO: 151174 - DNA, 192 bp, Artificial Sequence
  derived and/or modified sequence
atgcgcgtgctgtacctcctcttctcattcctgttcatcttcctcatgccactgccaggtgtgttcggcggaatcggagatcctgttacttgcttgaagtccggggccatctgccaccccgtgttctgtccgagacggtacaagcaaattggaacctgcggcttgccgggaaccaaatgttgcaagaaaccg

SEQ ID NO: 151175 - DNA, 192 bp, Artificial Sequence
  derived and/or modified sequence
atgcgggtgctctatctactgttcagctttctatttatcttcctgatgccattgcccggcgtttttggaggaatcggggatccagtgacttgcctgaagagcggtgcaatctgccacccagtattttgcccacgtagatacaagcagataggcacttgtggcctgcctggaaccaagtgttgcaagaagccc

SEQ ID NO: 151176 - DNA, 192 bp, Artificial Sequence
  derived and/or modified sequence
atgagagtgctctaccttctgttttcgttccttttcatcttcctgatgcccctgccgggtgtattcggtggaatcggtgaccctgtgacctgcttgaagtccggcgccatctgtcacccagtgttttgtccacggcgctacaagcagattgggacttgcggactgcctggaactaagtgctgcaaaaaaccg

SEQ ID NO: 151177 - DNA, 192 bp, Artificial Sequence
  derived and/or modified sequence
atgcgcgttctgtaccttctgttttccttcctgttcatcttcctgatgcccttgccaggggtgttcggcgggatcggagatcccgtcacctgtctcaagtcgggcgccatctgccacccagtgttctgcccgcgccggtacaaacagatcggtacttgtggcctgccaggcaccaagtgctgcaagaaacca

SEQ ID NO: 151178 - DNA, 192 bp, Artificial Sequence
  derived and/or modified sequence
atgcgagtgctgtaccttttgttttcgtttcttttcatcttcctgatgcctctccctggtgtgtttgggggtattggtgaccctgtgacgtgcctcaagtccggtgcaatctgtcatcctgtgttttgcccacggagatacaagcaaattgggacttgtgggcttccgggtaccaaatgttgtaaaaagcct

SEQ ID NO: 151179 - DNA, 192 bp, Artificial Sequence
  derived and/or modified sequence
atgcgcgttctgtacctgctgttttccttcttgttcattttcctcatgcccctccccggcgtgttcggaggcattggggacccagtcacatgcttaaagagcggggccatttgccaccctgttttctgtcccaggcgctataaacagatagggacatgcggactgcccggtacaaagtgctgtaaaaagcca

SEQ ID NO: 151180 - DNA, 192 bp, Artificial Sequence
  derived and/or modified sequence
atgagagtgttatacttgctgttcagtttcctttttatttttctgatgcccctgccaggcgtttttggcgggataggggatccagttacctgcctgaagagcggcgctatatgccaccccgtgttctgcccaaggcggtacaagcagattggcacttgcggcctacctggcacaaaatgctgtaaaaaaccc

SEQ ID NO: 151181 - DNA, 192 bp, Artificial Sequence
  derived and/or modified sequence
atgcgagtgctatatcttctgttttcgtttctttttatttttttgatgccattgccgggagttttcggcggaattggagacccagttacttgtttgaagtcaggcgccatctgtcatccagtattttgtccgagacgatataagcaaatcgggacatgtggactcccgggaacaaaatgctgtaaaaaacca

SEQ ID NO: 151182 - DNA, 192 bp, Artificial Sequence
  derived and/or modified sequence
atgcgggtgctttacttgttgttctccttcctgtttatctttttgatgcccctgcctggagtctttggcggaatcggggatccggtgacctgcctgaagtcgggcgcaatctgtcatccagtgttctgccctagacgttacaagcagattggtacttgtgggttgccaggtactaaatgttgcaagaagcct

SEQ ID NO: 151183 - DNA, 192 bp, Artificial Sequence
  derived and/or modified sequence
atgcgcgtgctttatctgctgttctccttcctctttatctttctcatgccactgccgggagttttcggaggcattggtgatccagtgacttgcctgaagagcggcgcgatctgtcaccctgtgttttgtccaagaagatacaaacagatcggaacgtgcgggctgccaggaaccaaatgctgcaagaagccg

SEQ ID NO: 151184 - DNA, 192 bp, Artificial Sequence
  derived and/or modified sequence
atgcgcgtgttgtacctgctgttcagcttcctgtttatcttcctcatgcctctgcctggggtgtttggcggaatcggcgaccctgtgacttgccttaaatcaggggccatttgccacccagtgttttgcccccgcaggtataagcagatcggaacctgcggcctccctggcactaagtgctgtaaaaagccg

SEQ ID NO: 151185 - DNA, 192 bp, Artificial Sequence
  derived and/or modified sequence
atgcgggtattgtacctgttgttcagtttcctatttatttttcttatgcctctgcccggcgtgttcggcggcatcggtgatcccgttacgtgcttaaaaagcggagccatctgccaccccgtattctgcccaaggcgatataaacagatcggtacctgtggcttgccaggcaccaaatgctgtaagaagcct

SEQ ID NO: 151186 - DNA, 192 bp, Artificial Sequence
  derived and/or modified sequence
atgagagttctctacctgctgttctctttccttttcatcttcttgatgccgttgcccggcgtcttcggtggtataggtgaccccgtaacgtgcctgaagagcggggcaatatgccatccagtcttctgtccacggcgctacaaacagataggaacctgtggccttccaggcactaagtgctgtaagaagccg

SEQ ID NO: 151187 - DNA, 192 bp, Artificial Sequence
  derived and/or modified sequence
atgagggtgctgtacctgttgttctccttcctgtttatcttcctcatgccgctgccgggagtttttggaggcatcggggacccagtcacttgcctcaaaagcggtgccatatgtcacccagtgttctgtcctcgtcggtacaaacagatcggaacctgcgggcttcccggaaccaagtgctgcaagaagccg

SEQ ID NO: 151188 - DNA, 192 bp, Artificial Sequence
  derived and/or modified sequence
atgagagtgctctacctcttgttctcgttcctctttatctttctgatgccccttccgggggtctttggaggaatcggagatccagtcacgtgtctcaaatcgggtgcaatttgccatcctgtgttttgtcctcggaggtacaagcaaataggtacttgtggactgcctggcaccaagtgctgcaagaagcca

SEQ ID NO: 151189 - DNA, 192 bp, Artificial Sequence
  derived and/or modified sequence
atgagagtgctctaccttctctttagctttttgtttatcttccttatgcctttgcctggggtgttcggaggaataggagatccagtgacctgtcttaagtccggggcaatttgtcatcccgttttctgcccccggcgctacaagcaaataggaacttgtggccttccggggactaagtgttgcaaaaaaccg

SEQ ID NO: 151190 - DNA, 192 bp, Artificial Sequence
  derived and/or modified sequence
atgcgggtcctgtaccttctgttttcgttcctgttcatcttcttgatgccgctcccgggcgtattcggaggaattggtgacccagtgacctgcctcaaatcaggggccatctgccaccctgtgttttgcccaagacgatacaagcagatagggacttgcggactgcccggaaccaaatgttgcaagaagccg

SEQ ID NO: 151191 - DNA, 192 bp, Artificial Sequence
  derived and/or modified sequence
atgcgtgttctgtacctgctgttctcctttctgttcatattccttatgcctttgcctggagtcttcggaggaataggcgaccctgtaacctgtctcaagtctggggccatttgccaccctgtgttctgtccaagaaggtataagcagatagggacatgtggcctgccaggcaccaaatgctgcaaaaagccc

SEQ ID NO: 151192 - DNA, 192 bp, Artificial Sequence
  derived and/or modified sequence
atgcgagtactatatttattattttcgtttctatttatatttttaatgccgttaccgggtgtttttggtggtataggtgatccggttacgtgtttaaaatcgggtgcgatatgtcatccggtattttgtccgcgtcgatataaacaaataggtacgtgtggtctaccgggtacgaaatgttgtaaaaaaccg

SEQ ID NO: 151193 - DNA, 192 bp, Artificial Sequence
  derived and/or modified sequence
atgcgagttctctacctcctgttctcatttttgttcatctttctgatgccactgcctggtgtgttcggaggaatcggagatccggtcacgtgtctgaagtccggcgcaatctgccaccccgtgttctgcccgagacggtacaagcagataggtacttgtgggctgcccggcaccaaatgctgcaaaaagccg

SEQ ID NO: 151194 - DNA, 192 bp, Artificial Sequence
  derived and/or modified sequence
atgcgagttttgtatctgctcttctccttcctgtttatcttcctgatgccccttccaggagttttcggcgggatcggggatcccgtgacctgtctgaaatcaggagcgatttgccatcctgtcttttgccctagacgatataagcagatcgggacatgcggcctgccgggtacaaaatgctgcaagaaacct

SEQ ID NO: 151195 - DNA, 192 bp, Artificial Sequence
  derived and/or modified sequence
atgagggtgctttacctgctgttcagcttcctctttatattcctcatgccactgcccggggtgttcgggggcatcggagatcccgtcacatgcctgaagtctggagcaatatgccaccccgtgttctgtcccagacggtacaagcagattgggacctgcgggctccccggcaccaagtgctgcaagaaaccc

SEQ ID NO: 151196 - DNA, 192 bp, Artificial Sequence
  derived and/or modified sequence
atgcgcgttttgtacttgttgttttccttcctgtttatctttcttatgcctctgcccggcgtcttcgggggaattggagatccagtgacgtgtctgaagtcaggtgccatctgtcatccggtgttctgcccacggaggtataagcagatagggacctgtgggctgcctggaactaaatgctgtaagaagcca

SEQ ID NO: 151197 - DNA, 192 bp, Artificial Sequence
  derived and/or modified sequence
atgagagtgctctatctcttgttctctttcctctttatcttcctgatgccactccccggtgtatttggcgggattggggatccagtcacatgcttgaagtctggggcaatatgtcaccctgtattctgtcctagacgttataagcagattggcacatgtggtctccctggcactaagtgctgtaagaaacct

SEQ ID NO: 151198 - DNA, 192 bp, Artificial Sequence
  derived and/or modified sequence
atgagagtcctttacctgcttttctcatttcttttcatattccttatgccgctgcctggagtgttcggggggattggcgaccccgtgacctgtctcaagtcgggggccatctgtcaccctgtcttttgcccacgaaggtacaagcagattggaacctgtggtctgccaggtaccaagtgctgtaaaaagcca

SEQ ID NO: 151199 - DNA, 192 bp, Artificial Sequence
  derived and/or modified sequence
atgagagtactttatttattattttcttttttatttatttttttaatgccattaccaggagtttttgggggaattggtgatccagtaacttgtttaaaatcgggagcaatttgtcatccagttttctgtccaagacgttataaacaaattggaacatgtggattaccaggaacaaaatgttgtaaaaaacca

SEQ ID NO: 151200 - DNA, 192 bp, Artificial Sequence
  derived and/or modified sequence
atgcgcgtactatacctactatttagttttctgtttatattcctaatgcctttacctggtgtttttggaggcataggagaccctgtgacttgcctgaaatcaggggcaatttgccaccctgttttctgcccacgccgttacaaacagataggaacctgcgggcttcccggtactaaatgctgtaagaaaccg

SEQ ID NO: 151201 - DNA, 192 bp, Artificial Sequence
  derived and/or modified sequence
atgagggttctgtatctcctgttcagttttctctttatttttctgatgcccctacctggagtgttcggaggaattggagaccctgtcacctgccttaagtctggggcaatctgtcatcctgttttttgtcccaggcgatacaagcaaataggaacctgcggtttgcctggcaccaaatgctgtaagaaacca

SEQ ID NO: 151202 - DNA, 192 bp, Artificial Sequence
  derived and/or modified sequence
atgagagtcctctacctgcttttctcatttctctttatctttcttatgcccctgccgggtgtgttcggcggtataggggatcctgttacctgccttaagtccggcgccatttgtcatcccgtgttctgtccgcgccggtacaagcaaattggaacttgtgggctgcctggcaccaagtgttgcaaaaaacca

SEQ ID NO: 151203 - DNA, 192 bp, Artificial Sequence
  derived and/or modified sequence
atgcgggtgttgtacctcctcttttcctttcttttcatctttctgatgccactgcccggagttttcggtggaatcggagatcctgtgacctgtctgaagtcaggagcaatatgccatccagtgttttgccctcgtcgctacaagcaaattggaacctgtggtctgccaggaacgaagtgttgtaagaaacca

SEQ ID NO: 151204 - DNA, 192 bp, Artificial Sequence
  derived and/or modified sequence
atgagggtcctttacctgctcttttcatttctctttatcttcctgatgccgctgccgggagttttcggaggaatcggagatccggtgacgtgtttgaaatccggcgcgatctgccacccagtgttctgcccgcgccggtacaaacagattggcacctgtgggcttccgggaactaagtgctgcaagaagccg

SEQ ID NO: 151205 - DNA, 192 bp, Artificial Sequence
  derived and/or modified sequence
atgagggtcctgtacctgttgttctccttcctgttcatctttctgatgccacttccgggagtcttcggaggaatcggcgacccggtgacctgtttgaagagcggagccatctgccacccggtcttctgcccaagacggtataaacagatcggcacttgtgggctgcctggaaccaagtgttgtaaaaagcct

SEQ ID NO: 151206 - DNA, 192 bp, Artificial Sequence
  derived and/or modified sequence
atgcgggtgctgtatctgctgtttagcttcttgttcatctttctgatgccgttaccgggcgtgttcggtgggatcggcgatccggttacctgcctgaagtctggagcaatatgccacccggtgttctgcccacgccgctacaaacaaatcggcacctgtggcctgccagggacaaagtgctgtaaaaaacct

SEQ ID NO: 151207 - DNA, 192 bp, Artificial Sequence
  derived and/or modified sequence
atgcgcgtgctgtacctgctgttcagcttcctctttatcttcctgatgccgttgccgggagtctttggcggaatcggcgacccggtgacttgcctgaaatccggagcgatctgccatccagttttttgtccaaggcggtacaaacagatcggaacctgcggactgccaggaaccaaatgttgcaagaagcca

SEQ ID NO: 151208 - DNA, 192 bp, Artificial Sequence
  derived and/or modified sequence
atgagagtgctttaccttctgtttagcttcctcttcatctttcttatgccgttgcccggcgtctttggtggtattggagatccagtcacctgtctcaagtcgggggccatttgccatcctgttttctgcccgagacggtacaagcaaataggaacttgtggactgcctggtacgaagtgctgtaagaaacca

SEQ ID NO: 151209 - DNA, 192 bp, Artificial Sequence
  derived and/or modified sequence
atgcgcgtgttgtacctcctgttctcgtttctgttcatctttctgatgccgcttccgggggtgttcggaggaattggagatccagtcacgtgcctgaaatcaggtgccatctgtcacccggttttctgccctagacgatacaagcagatcggcacttgtggcctgccggggactaaatgctgtaagaagccg

SEQ ID NO: 151210 - DNA, 192 bp, Artificial Sequence
  derived and/or modified sequence
atgcgggtcctgtacctgctgtttagctttctatttattttcctgatgccactgccaggcgtattcggaggaatcggagatccggtgacctgtctcaagtccggcgcgatttgccaccccgtcttctgccctcggcgctataaacagatagggacttgcgggctgcccgggacaaagtgttgcaaaaagcca

SEQ ID NO: 151211 - DNA, 192 bp, Artificial Sequence
  derived and/or modified sequence
atgagagtattatatctcctcttctcgttcctattcatcttcttgatgcccctgccaggagtcttcggaggcattggggacccagtgacatgcttaaagagcggcgctatctgtcaccccgttttctgcccccggcgttataaacagataggtacatgtggtcttcctgggactaagtgttgcaaaaagccc

SEQ ID NO: 151212 - DNA, 192 bp, Artificial Sequence
  derived and/or modified sequence
atgcgtgtcttgtacctgctgttttcattccttttcatattcctgatgccgttaccaggggttttcggcggaatcggtgatccagttacatgtctgaaaagtggggctatttgccatcctgtgttttgtccacgtaggtacaaacagattggtacctgtgggctgcccggcactaagtgctgtaaaaagccg

SEQ ID NO: 151213 - DNA, 192 bp, Artificial Sequence
  derived and/or modified sequence
atgagagtgctctacctgctgttctcgttccttttcatcttcctgatgccgctcccgggagtgttcggcggaattggcgatcctgtcacttgcctgaaatcaggtgcaatctgtcacccagtgttttgcccgcggaggtacaagcagattggtacgtgcggattgcccggtactaagtgctgtaagaaaccc

SEQ ID NO: 151214 - DNA, 192 bp, Artificial Sequence
  derived and/or modified sequence
atgcgtgttctgtaccttttattcagcttcttgttcatattcttgatgcctctgccaggggtcttcgggggcatcggtgacccagtgacttgcctcaagtctggcgccatctgtcatcctgtcttctgcccccgaagatacaagcagattggcacatgcggtttaccaggcacaaagtgttgtaagaagcct

SEQ ID NO: 151215 - DNA, 192 bp, Artificial Sequence
  derived and/or modified sequence
atgcgcgttttgtacctgttgttttccttcctgttcatttttctgatgcctcttcccggggtgttcggtgggataggtgatccggtcacgtgtctcaagtcgggagcaatatgtcatcccgtgttctgtccaagaaggtacaagcagatcggaacctgcggccttcctggtactaaatgctgcaagaagccg

SEQ ID NO: 151216 - DNA, 192 bp, Artificial Sequence
  derived and/or modified sequence
atgcgggtcctgtatttgctgttctctttcctcttcattttcctgatgccactgcccggtgtctttggtggcattggcgatccagtcacttgcctcaagagcggcgcaatttgccatccagttttctgtccccgaaggtacaagcagatcggtacctgcggcttgcccggaacaaaatgttgtaagaaacct

SEQ ID NO: 151217 - DNA, 192 bp, Artificial Sequence
  derived and/or modified sequence
atgcgcgtgctgtacctcttgttcagcttcctgttcattttcctgatgccgctgccgggggtctttggtggaatcggggaccctgtgacttgtctgaagagcggagcaatctgccacccggtgttctgccctcggaggtacaaacagatcggaacttgtggactgccaggaacgaagtgctgtaaaaagcct

SEQ ID NO: 151218 - DNA, 338 bp, Artificial Sequence
  derived and/or modified sequence
gggaaataagagagaaaagaagagtaagaagaaatataagagccaccatgcgggtcctctacttgctgttctcatttctcttcatctttcttatgccccttccgggagtgtttgggggaatcggtgaccccgtgacgtgcttgaaatcgggagcgatctgccacccggtattctgcccaaggcgctataagcagattgggacatgtggtctgcccggcaccaagtgttgtaaaaagccttaatgagctgccttctgcggggcttgccttctggccatgcccttcttctctcccttgcacctgtacctcttggtctttgaataaagcctgagtaggaag

SEQ ID NO: 151219 - DNA, 195 bp, Artificial Sequence
  derived and/or modified sequence
atgagagtgctgtacctgctgttcagcttcctgttcatcttcctgatgcccctgcccggcgtgttcggcggcatcggcgaccccgtgacctgcctgaagagcggcgccatctgccaccccgtgttctgccccagaagatacaagcagatcggcacctgcggcctgcccggcaccaagtgctgcaagaagccctag

SEQ ID NO: 151220 - DNA, 195 bp, Artificial Sequence
  derived and/or modified sequence
atgcgcgtgctttatctgctattctcatttctgtttatcttcttaatgccgctcccgggggtctttggcgggataggcgaccccgtaacctgcttgaagtccggcgccatctgtcaccctgttttctgtcctcgccgctataagcagatcggtacgtgtgggttacccgggacaaagtgttgcaagaagccctag

SEQ ID NO: 151221 - DNA, 195 bp, Artificial Sequence
  derived and/or modified sequence
atgcgtgtactttatctcctgttttcctttctcttcatcttcctgatgcccctaccaggagtgtttggcgggattggcgatcccgttacttgtctgaagagcggagctatctgtcacccagtgttctgccctaggaggtataagcagattggaacgtgtggtctgcccgggaccaagtgttgcaagaaaccctag

SEQ ID NO: 151222 - DNA, 195 bp, Artificial Sequence
  derived and/or modified sequence
atgagggtgctgtacctgctcttctccttcctgttcatcttcctgatgcccctgcccggggtgtttggaggcattggagaccctgtgacctgcctgaagagcggggccatctgccaccctgtgttctgcccccggcgctacaagcagatcggcacctgtggcctgcccggcaccaagtgctgcaagaagccctag

SEQ ID NO: 151223 - DNA, 380 bp, Artificial Sequence
  derived and/or modified sequence
gaccagggaccaggacctttataaggtggaaggcttgatgtcctccccagactcagctcctggtgaagctcccagccatcagccatgagggtcttgtatctcctcttctcgttcctcttcatattcctgatgcctcttccaggtgtttttggtggtataggcgatcctgttacctgccttaagagtggagccatatgtcatccagtcttttgccctagaaggtataaacaaattggcacctgtggtctccctggaacaaaatgctgcaaaaagccatgaggaggccaagaagctgctgtggctgatgcggattcagaaagggctccctcatcagagacgtgcgacatgtaaaccaaattaaactatggtgtccaaagata

SEQ ID NO: 151224 - DNA, 332 bp, Artificial Sequence
  derived and/or modified sequence
agactcagctcctggtgaagctcccagccatcagccatgagggtcttgtatctcctcttctcgttcctcttcatatttctgatgcctcttccaggtgtttttggtggtataggcgatcctgttacctgccttaagagtggagccatatgtcatccagtcttttgccctagaaggtataaacaaattggcacctgtggtctccctggaacaaaatgctgcaaaaagccatgaggaggccaagaagctgctgtggctgatgcggattcagaaagggctccctcatcagagacgtgcgacatgtaaaccaaattaaactatggtgtccaaagata

SEQ ID NO: 151225 - DNA, 195 bp, Artificial Sequence
  derived and/or modified sequence
atgcgggtgctgtacctgctgttcagcttcctgttcatcttcctgatgcccctgcccggagtttttggaggaataggagatcctgtgacttgtttgaaatccggagcaatttgccatcccgtcttctgccccaggaggtacaagcagatcggtacgtgtggactcccgggaaccaaatgctgcaagaagccatag

SEQ ID NO: 151226 - DNA, 195 bp, Artificial Sequence
  derived and/or modified sequence
atgcgggtgctgtacctgctgttcagcttcctgttcatcttcctgatgcccttaccaggggtgtttggaggcattggggacccagtcacttgccttaaatccggcgctatctgccatccagttttctgccctagacgttataagcagattggaacctgtggccttccaggcacaaaatgttgtaagaagccatag

SEQ ID NO: 151227 - DNA, 195 bp, Artificial Sequence
  derived and/or modified sequence
atgagagtactttatctcctgttcagcttcctgtttattttccttatgcctctacccggagtgttcggaggtatcggtgacccagtgacgtgcctgaaatcaggagccatctgtcatccagtcttctgtcccaggcgctacaagcagattggcacctgcggccttcctggcaccaagtgttgcaagaaaccatag

SEQ ID NO: 151228 - DNA, 195 bp, Artificial Sequence
  derived and/or modified sequence
atgcgtgtgctctaccttttattctctttcctattcatattcttaatgcctctgcccggagtgttcggagggattggcgatccagttacctgtctgaagagcggcgcaatctgtcatccagttttctgtcccaggcggtataaacagatcgggacctgtggactgcccggaactaagtgttgcaagaagccatag

SEQ ID NO: 151229 - DNA, 195 bp, Artificial Sequence
  derived and/or modified sequence
atgcgagttctttatcttctttttagtttcttgttcattttcctcatgccactcccaggcgtatttggcggcatcggcgatcctgtgacctgcctcaaatccggcgccatctgtcaccccgtgttttgcccaaggcgatacaaacagattggtacctgtggcttgcccggtacaaaatgctgcaaaaagccctag

SEQ ID NO: 151230 - DNA, 195 bp, Artificial Sequence
  derived and/or modified sequence
atgagagtattatatctcctgttctcttttctcttcatcttcctaatgccactgccaggcgtgttcggcggaatcggtgacccagtgacctgcctgaagtctggcgcaatttgtcatcccgtattttgtcctcgcagatacaaacagatcggaacctgtgggctgcctggaacgaagtgttgcaaaaaaccatag

SEQ ID NO: 151231 - RNA, 338 nt, Artificial Sequence
  derived and/or modified sequence
gggaaauaagagagaaaagaagaguaagaagaaauauaagagccaccaugcggguccucuacuugcuguucucauuucucuucaucuuucuuaugccccuuccgggaguguuugggggaaucggugaccccgugacgugcuugaaaucgggagcgaucugccacccgguauucugcccaaggcgcuauaagcagauugggacauguggucugcccggcaccaaguguuguaaaaagccuuaaugagcugccuucugcggggcuugccuucuggccaugcccuucuucucucccuugcaccuguaccucuuggucuuugaauaaagccugaguaggaag

SEQ ID NO: 151232 - RNA, 195 nt, Artificial Sequence
  derived and/or modified sequence
augcgaguucuuuaucuucuuuuuaguuucuuguucauuuuccucaugccacucccaggcguauuuggcggcaucggcgauccugugaccugccucaaauccggcgccaucugucaccccguguuuugcccaaggcgauacaaacagauugguaccuguggcuugcccgguacaaaaugcugcaaaaagcccuag

SEQ ID NO: 151233 - RNA, 195 nt, Artificial Sequence
  derived and/or modified sequence
augagaguauuauaucuccuguucucuuuucucuucaucuuccuaaugccacugccaggcguguucggcggaaucggugacccagugaccugccugaagucuggcgcaauuugucaucccguauuuuguccucgcagauacaaacagaucggaaccugugggcugccuggaacgaaguguugcaaaaaaccauag

SEQ ID NO: 151234 - protein, 674 aa, Artificial Sequence
  derived and/or modified sequence
MAAGGAEGGSGPGAAMGDCAEIKSQFRTREGFYKLLPGDGAARRSGPASAQTPVPPQPPQPPPGPASASGPGAAGPASSPPPAGPGPGPALPAVRLSLVRLGEPDSAGAGEPPATPAGLGSGGDRVCFNLGRELYFYPGCCRRGSQRSIDLNKPIDKRIYKGTQPTCHDFNQFTAATETISLLVGFSAGQVQYLDLIKKDTSKLFNEERLIDKTKVTYLKWLPESESLFLASHASGHLYLYNVSHPCASAPPQYSLLKQGEGFSVYAAKSKAPRNPLAKWAVGEGPLNEFAFSPDGRHLACVSQDGCLRVFHFDSMLLRGLMKSYFGGLLCVCWSPDGRYVVTGGEDDLVTVWSFTEGRVVARGHGHKSWVNAVAFDPYTTRAEEAATAAGADGERSGEEEEEEPEAAGTGSAGGAPLSPLPKAGSITYRFGSAGQDTQFCLWDLTEDVLYPHPPLARTRTLPGTPGTTPPAASSSRGGEPGPGPLPRSLSRSNSLPHPAGGGKAGGPGVAAEPGTPFSIGRFATLTLQERRDRGAEKEHKRYHSLGNISRGGSGGSGSGGEKPSGPVPRSRLDPAKVLGTALCPRIHEVPLLEPLVCKKIAQERLTVLLFLEDCIITACQEGLICTWARPGKAFTDEETEAQTGEGSWPRSPSKSVVEGISSQPGNSPSGTVV

SEQ ID NO: 151235 - DNA, 2025 bp, Artificial Sequence
  derived and/or modified sequence
atggctgccggcggagctgaaggaggaagcggccctggcgctgccatgggagattgcgcggaaattaagagccagttccgaacgcgggagggattctacaagctcctgcccggggacggcgccgctcgacgaagcgggcccgcatctgcccagactccagtgccaccgcagcctccccagcctccaccagggccggcttctgcatctggcccaggagccgccggtccggccagtagccctcctcccgcaggacctggtccgggacctgcccttccagccgtgaggctgtccctcgtgaggcttggagaacctgactctgctggtgccggcgaaccacccgcaactcccgctggcctggggtcgggaggggatagagtgtgctttaatctaggccgtgaactgtacttctatcctgggtgctgcagacgcggttctcagaggagcatcgatcttaataaacccatcgacaagcgcatctacaaaggtacccagccaacttgccacgactttaatcagttcaccgctgccactgagacgatatcgctcttagtgggctttagtgcaggccaggttcagtatttagacttgattaagaaggacacatcgaagttgtttaatgaggaaagattaattgataaaacaaaagtgacgtatctcaagtggcttcccgagagcgaaagtttgtttctggccagtcacgctagcgggcacttgtacctgtacaatgttagccacccgtgcgcctcagcaccaccgcagtattccctgctgaagcaaggcgaagggttttctgtctacgctgctaagagcaaagctcccaggaatccccttgccaaatgggccgtgggcgaaggcccccttaatgagtttgctttctcccccgacggtcgccaccttgcctgcgtctcccaggacggctgcctgcgggtgtttcatttcgactccatgctgttgcgaggcctcatgaaaagctattttggaggattactttgtgtttgctggagccccgatgggcgatacgtcgtgacaggcggagaggatgacctggtaacagtgtggagctttaccgaagggagggttgtggcaagggggcatggccacaagtcctgggtaaacgcagtcgcgtttgacccttacaccacccgagcagaggaggccgccaccgcagccggagctgacggcgaacggtcaggggaagaggaagaagaagaacctgaagccgccggaaccggcagcgcaggaggagcccctctgtctccactccccaaggctggcagcataacctatagattcggttctgccggtcaagacacccagttctgtctgtgggacttaactgaggatgtattgtacccacacccgcctttagcccgaaccaggactctcccaggtacgcctgggacaaccccacctgccgcatctagcagtcggggcggagagcccggcccgggacccctaccgcgctctctctctcgctctaattcacttccacatcctgcgggaggtggtaaggcgggaggccctggggtggccgcagaaccaggaacacccttctcaattgggaggttcgctactctgaccctgcaggagaggcgcgaccgcggagctgagaaagagcacaagagatatcactcgttgggaaacatctcccggggtggatcaggtgggagtggttccgggggcgagaaaccatctggacctgtgcctaggagtcggctggacccagcgaaggtgctgggcacggcactctgtccccggatccacgaggtgcctctattggaacccttggtgtgcaagaagatagctcaggagaggctgaccgttttactgttcctcgaggattgcatcattacggcttgccaagaaggtctcatttgtacctgggcccggcctggaaaggctttcacagatgaagagaccgaggcacagactggcgagggcagctggccgcgaagtcctagcaagagcgtagtggaaggtataagcagtcagccaggcaacagcccctccggaacagtggtatag

SEQ ID NO: 151236 - DNA, 2025 bp, Artificial Sequence
  derived and/or modified sequence
atggctgctggaggagctgagggcggcagcggccctggggccgccatgggagactgtgccgagatcaagagccagttccgcacccgggagggcttctacaagctgctgcctggagatggagctgccaggagaagtggccctgccagcgcccagacccctgtgcccccccagcccccccagcccccacctggccctgccagcgccagcggccctggagctgctggccctgccagcagccccccacctgctggccctggccctggccctgccctgcctgctgtgcggctgagcctggtgcggctgggggagccagacagcgctggagctggggagcccccagccaccccagctggcctgggcagcggcggggacagagtgtgcttcaacctgggccgggagctgtacttctacccaggctgctgccggcggggcagccagaggagcattgacctgaacaagcccatcgacaagaggatctacaagggcacccagcccacctgccacgacttcaaccagttcaccgctgccacagagaccatcagcctgctggtgggcttctctgctggccaggtgcagtacctggacctgatcaagaaggacaccagcaagctgttcaatgaggagcggctgattgacaagaccaaggtgacctacctgaagtggctgcctgagagcgagagcctcttcctggccagccacgccagcggccacctgtacctgtacaacgtgagccacccctgtgccagcgccccaccccagtacagcctgctgaagcagggcgagggcttctctgtgtatgctgccaagagcaaggcccccaggaaccccctggccaagtgggccgtgggggagggccccctgaatgaatttgccttctccccagatggccgccacctggcctgtgtgtcccaggacggctgcctgcgggtcttccactttgacagcatgctgctgcggggcctgatgaagagctactttggaggcctgctgtgtgtgtgctggagcccagatggccgctacgtggtgactggaggagaagatgacctggtgacagtgtggagcttcacagagggccgggtggtggcccggggccacggccacaagtcctgggtgaatgctgtggcctttgacccctacaccaccagggctgaggaggccgccacagctgctggagcagatggagagaggtctggagaggaggaggaggaggagcctgaggccgccggcaccggcagcgctggaggagcccccctgagccccctgcccaaggccggcagcatcacctacagatttggatctgctggccaggacacccagttctgcctgtgggacctgacagaagatgtgctgtacccccacccccccctggcccggaccaggaccctgcccggcaccccaggcaccaccccacctgctgccagcagcagccggggcggggagcccggccctggccccctgcccaggagcctgagccgcagcaacagcctgccccaccctgctgggggcggcaaggccggcggccctggggtggccgctgagcccggcacccccttcagcatcggccgctttgccaccctgaccctgcaggagcggcgggacagaggagctgagaaggagcacaagcgctaccacagcctgggcaacatcagccggggcggcagcggcggcagcggcagcggcggggagaagcccagcggccctgtgcccaggagccggctggaccctgccaaggtgctgggcacagccctgtgcccccgcatccacgaggtgcccctgctggagcccctggtgtgcaagaagatcgcccaggagcggctgactgtgctgctcttcctggaggactgcatcatcacagcctgccaggagggcctcatctgcacctgggcccggcctgggaaggccttcacagatgaggagacagaggcccagacaggagagggctcctggcccaggagccccagcaagtctgtggtggagggcatcagcagccagcccggcaacagccccagcggcaccgtggtgtag

SEQ ID NO: 151237 - DNA, 2025 bp, Artificial Sequence
  derived and/or modified sequence
atggccgccggcggcgccgagggcggcagcggccccggcgccgccatgggcgattgtgccgagatcaaaagccaatttcggactcgggagggcttctacaaactgctccctggggacggagccgcaagaaggtctgggcctgcctccgctcagaccccagtcccaccacagcccccgcagcctccccctggcccagcgtctgcttccgggccaggcgctgctggacccgcctcttcgcctcccccggcggggccaggcccaggacctgcacttccagctgtcagactgtccctggttcggcttggcgagcctgactctgccggagccggggagccgcccgctacccccgcaggcctcggctcagggggcgaccgggtctgctttaacctgggccgcgagctctatttttatccgggctgctgccgaagaggctcccagaggtctatcgacctgaacaaaccaatcgataaaagaatctacaaaggaacgcagccgacctgtcatgacttcaaccaatttacagcagctacagaaacaatcagcctactggtcggattttcagccggacaagtgcagtatctagatctgataaaaaaggacacatcaaagctcttcaatgaggagcgcttgatagacaaaactaaagtgacctacctgaaatggctccccgagagcgaaagcctgttcctggcgtcacatgcctctggtcacctgtacctctacaatgttagccacccttgtgcgtccgcgcccccgcaatactctctcttaaagcagggggaaggattctcagtttacgcagccaaatcgaaggcaccgcgcaaccccctggccaagtgggcagtgggggaaggaccactgaatgaatttgccttttctccggacggccggcacctggcttgcgtcagtcaggacggctgccttagggtctttcactttgattccatgcttctgagagggttaatgaagtcttacttcggtggactcctgtgcgtgtgttggagccctgatggcaggtacgttgtgaccggcggggaggacgacctggtgactgtgtggagttttaccgagggcagggtggttgcacgggggcacgggcataagtcctgggtgaatgccgtggccttcgatccttacaccactagggcggaagaggccgcaaccgccgccggagcggatggcgagcggagcggcgaggaggaagaggaagagccagaagctgctggcaccggcagtgctggtggtgcgccactgagccctctccctaaagcggggagcatcacatataggttcgggtccgccggccaggatacccagttctgtctgtgggatcttacagaggatgtgctgtaccctcatccccccctcgcgcgcacacgaaccttacccggaaccccaggcaccacccctcccgcggcatcttcctcccggggaggggagccagggcctggaccactccctaggtccctctctcgctcaaacagtctgccgcaccccgctggcgggggcaaggccggaggccctggagtggcagctgaacccggaacccctttcagcattggacgattcgcaacgctcaccctccaagaacgacgcgacagaggagcggagaaggaacacaagaggtaccactccctgggaaatatatcccgcgggggaagcggagggtccggctctggcggggagaaaccctcaggacctgtaccacgatcacgcctcgaccccgcaaaggtgctcggaaccgccttatgtccacgaatacacgaggtgccactgctggaaccactagtttgcaagaagatcgcacaggagagactgaccgtgctgttatttctggaggattgtatcatcacagcctgccaggaggggttgatctgcacctgggcaagaccgggtaaggcattcactgatgaggagaccgaggcgcagacaggcgagggatcttggccaaggtcaccatccaaaagtgttgttgagggcatatcctcacagccaggcaattcaccttcaggtaccgtggtttag

SEQ ID NO: 151238 - DNA, 2025 bp, Artificial Sequence
  derived and/or modified sequence
atggccgctgggggagccgagggaggctcaggtcccggagctgcaatgggagactgcgctgagatcaaaagccaatttcgaacacgggaagggttctacaagctgctgcccggagacggagcggctcggcgatcgggaccggcatcggctcagacgccagtccccccacagccacctcagcccccaccagggcctgcctcagcatccgggcctggcgcagccggtcccgctagctctccaccccctgctggccctggcccaggccctgcgttgccagctgtgcgcctgtctctggtgcgcctgggcgaacccgatagcgccggagcaggagagccccctgccacgccagccggactggggtcaggtggcgaccgcgtctgtttcaacctgggaagagaactgtatttctaccctggttgctgccggagaggttcccagagatccatcgacctgaataaaccaatagacaagaggatttataaaggcacacagcccacctgccatgactttaaccagttcactgccgcaacagagacaattagcttattggtgggcttctctgctggccaggtgcagtatctggatctgataaagaaggacaccagtaagctgtttaatgaagaaaggctgatcgacaaaacgaaggtgacctacctgaagtggctgccggagtctgagtcgctgtttcttgcctcacacgcatctgggcacttatacctgtacaatgtctcacacccatgcgcttccgcacctccacagtattcattgctgaaacagggggaagggttctctgtatacgctgcgaaaagcaaagcccctcgtaacccgttggccaagtgggctgtgggtgaagggcctctcaacgaattcgccttcagccccgacggcaggcaccttgcatgtgtatcacaggacggctgccttagagtgttccatttcgactctatgctgctacgagggctcatgaaatcctatttcggcggactgctctgcgtgtgctggtccccagatggccgttacgtggtgacaggtggtgaggatgacctcgtgacggtgtggagtttcacggaaggcagggtggtggccagggggcacggccataagtcgtgggtgaacgcggtggcgtttgatccttacactacgcgggctgaagaggcagcaaccgctgctggtgctgatggcgagcgtagtggcgaggaggaggaggaggagcctgaggcagccggaacagggtccgctggaggcgctcccctctccccacttcctaaagctgggtccattacttatcgctttggatctgcagggcaggacactcagttctgcctgtgggatttgactgaggatgttctataccctcatcctccactggccagaactagaacactgccaggcacaccaggcacaacacctccggctgccagcagctcccgtggaggagaacccggtcctggaccgttgccgaggagccttagtaggtcgaattccctgccacatcctgctggaggtgggaaggccggtgggccaggggtggccgcagagccaggcacaccatttagcattggacgattcgctacgcttaccctgcaggaaagaagagaccgaggagccgaaaaggaacataagagataccattcactcggcaacataagtcggggtgggtcaggcggaagcgggtcggggggtgagaaaccgtccgggcctgttccaaggagccgattggacccagcgaaggtcctgggaacagcgctgtgtccacggatccacgaggtgcccctcctcgaaccattggtgtgtaaaaaaatcgctcaggaaagactgactgtactgctcttcttggaagactgcatcattaccgcgtgtcaagagggtttgatatgtacctgggccagacctggaaaggcctttaccgacgaggaaacggaggcacagacgggcgagggatcttggcctaggtccccgtcaaagtccgttgttgagggaattagctctcagcccggaaacagtccttccgggaccgtcgtctag

SEQ ID NO: 151239 - DNA, 2025 bp, Artificial Sequence
  derived and/or modified sequence
atggccgccggcggcgccgagggcggcagcggccccggcgccgccatgggcgactgcgccgagatcaagagccagttcagaaccagagagggcttctacaagctgctgcccggcgacggcgccgccagaagaagcggccccgccagcgcccagacccccgtgcccccccagcccccccagcccccccccggccccgccagcgccagcggccccggcgccgccggccccgccagcagccccccccccgccggccccggccccggccccgccctgcccgccgtgagactgagcctggtgagactgggcgagcccgacagcgccggcgccggcgagccccccgccacccccgccggcctgggcagcggcggcgacagagtgtgcttcaacctgggcagagagctgtacttctaccccggctgctgcagaagaggcagccagagaagcatcgacctgaacaagcccatcgacaagagaatctacaagggcacccagcccacctgccacgacttcaaccagttcaccgccgccaccgagaccatcagcctgctggtgggcttcagcgccggccaggtgcagtacctggacctgatcaagaaggacaccagcaagctgttcaacgaggagagactgatcgacaagaccaaggtgacctacctgaagtggctgcccgagagcgagagcctgttcctggccagccacgccagcggccacctgtacctgtacaacgtgagccacccctgcgccagcgcccccccccagtacagcctgctgaagcagggcgagggcttcagcgtgtacgccgccaagagcaaggcccccagaaaccccctggccaagtgggccgtgggcgagggccccctgaacgagttcgccttcagccccgacggcagacacctggcctgcgtgagccaggacggctgcctgagagtgttccacttcgacagcatgctgctgagaggcctgatgaagagctacttcggcggcctgctgtgcgtgtgctggagccccgacggcagatacgtggtgaccggcggcgaggacgacctggtgaccgtgtggagcttcaccgagggcagagtggtggccagaggccacggccacaagagctgggtgaacgccgtggccttcgacccctacaccaccagagccgaggaggccgccaccgccgccggcgccgacggcgagagaagcggcgaggaggaggaggaggagcccgaggccgccggcaccggcagcgccggcggcgcccccctgagccccctgcccaaggccggcagcatcacctacagattcggcagcgccggccaggacacccagttctgcctgtgggacctgaccgaggacgtgctgtacccccacccccccctggccagaaccagaaccctgcccggcacccccggcaccaccccccccgccgccagcagcagcagaggcggcgagcccggccccggccccctgcccagaagcctgagcagaagcaacagcctgccccaccccgccggcggcggcaaggccggcggccccggcgtggccgccgagcccggcacccccttcagcatcggcagattcgccaccctgaccctgcaggagagaagagacagaggcgccgagaaggagcacaagagataccacagcctgggcaacatcagcagaggcggcagcggcggcagcggcagcggcggcgagaagcccagcggccccgtgcccagaagcagactggaccccgccaaggtgctgggcaccgccctgtgccccagaatccacgaggtgcccctgctggagcccctggtgtgcaagaagatcgcccaggagagactgaccgtgctgctgttcctggaggactgcatcatcaccgcctgccaggagggcctgatctgcacctgggccagacccggcaaggccttcaccgacgaggagaccgaggcccagaccggcgagggcagctggcccagaagccccagcaagagcgtggtggagggcatcagcagccagcccggcaacagccccagcggcaccgtggtgtag

SEQ ID NO: 151240 - DNA, 3271 bp, Artificial Sequence
  derived and/or modified sequence
ggggcgcccaagatggcggcgggcggcgcggagggcggctcgggccccggcgccgccatgggggactgcgcggagattaagtcgcaattccgcacgcgcgagggtttctacaagctactcccgggcgacggcgccgctcgcaggtcgggtccggcttccgcccagactccggtgccgcctcagccaccgcagcccccgcccggccctgcctccgcctccggtcccggcgctgcaggccccgcgtcgtccccgccgcccgcaggccccggacccgggcccgccctgcccgccgtgcgcctcagcctcgtgcgcctcggggagccggacagcgccggggccggggagccgcccgccacgcccgcggggctgggctcggggggagaccgcgtctgcttcaacttgggccgtgagctctatttctacccaggctgctgtcgtcgtgggagccaacggtccattgacctcaacaagccaattgacaagcggatctacaagggcacccagcccacctgccacgatttcaaccagttcactgctgccaccgagaccatctcgctgctggtgggcttctcagcgggtcaagtgcagtacctggatctcatcaaaaaggacaccagcaagctgttcaatgaggagcggttgatcgacaagaccaaggtgacatatctgaagtggctgcctgagtcggagagcctgttcctggcatcacacgccagtggccacctgtacctgtacaacgtcagccacccctgcgcctcggccccgccccagtacagcctgctgaagcagggcgagggcttctctgtctatgctgccaagagcaaggcaccccgcaacccgctggccaagtgggcggtgggtgaggggcccctcaacgagttcgccttctcgcccgatggccggcacctggcctgtgtgagccaggatggctgcctgcgcgtcttccacttcgactccatgctcctgcgtgggctcatgaagagctactttgggggcctgctgtgtgtgtgctggagccctgacggccgctacgtggtgacgggtggcgaagatgacctggtcaccgtgtggtccttcaccgagggccgcgtggtggctcgaggccatggccacaagtcctgggtcaacgctgtggcctttgacccctacaccacaagggcagaggaggcggcgacagcagccggtgctgatggggagcggagcggcgaagaggaggaggaggagcccgaggctgcgggcacaggctcggccgggggcgccccgctctctccactgcccaaggctggctccattacttaccgctttggctcggcgggccaggacacgcagttctgcctgtgggacctcactgaagacgtgctctacccgcacccccccctggcccgcacccgcaccctccctggcacacctggcaccacgccaccggccgccagcagctcgaggggtggcgagcctggcccaggccccctgcctcgctcgctgtcccgctccaacagtctcccgcacccagctggcgggggcaaggcgggcggcccgggtgtggcggcagagcctggcacaccattcagcattggccgcttcgccacgctcacactgcaggagcggcgggaccggggggcagagaaggagcacaagcgctaccacagcctgggcaacatcagccggggtggcagtggcggcagtggcagtggtggggagaagcccagcggccctgttccccgcagccgcctggaccccgccaaggtgctgggcactgcgctgtgcccgcgcatccacgaggtgcccctgctggagccccttgtgtgcaagaagatcgcccaggagcggctcacagtcctcctgttcctggaggactgcatcatcactgcctgccaggagggcctcatctgcacctgggcccggccgggcaaggcgttcacagacgaggagaccgaggcccagacaggggaaggaagttggcccaggtcacccagcaagtcagtggtagagggcatctcctcccaaccaggcaactccccgagtggcacagtggtgtgaagccatggatatcgggcccccccaaccccatgcccccagcctcctagccataaccctccctgctgacctcacagatcaacgtattaacaagactaaccatgatggatggactgctccagtccccccacctgcacaaaatttgggggccccccagactggcccggacacgggcgatgtaatagcccttgtggcctcagccttgtcccccacccactgccaagtacaatgacctcttcctctgaaacatcagtgttaccctcatccctgtccccagcatgtgactggtcactcctggggagagactccccgcccctgccacaagagccccaggtctgcagtgtgcccctcagttgagtgggcagggccgggggtggtccagccctcgcccggcccccaccccagctgcccttgctattgtctgtgcttttgaagagtgttaaattatggaagcccctcaggttcctccctgtcccgcaggacctcttatttatactaaagttccctgttttctcagcgggtctgtccccttcggaggagatgatgtagaggacctgtgtgtgtactctgtggttctaggcagtccgctttccccagaggaggagtgcaggcctgctcccagcccagcgcctcccaccccttttcatagcaggaaaagccggagcccagggagggaacggacctgcgagtcacacaactggtgacccacaccagcggctggagcaggaccctcttggggagaagagcatcctgcccgcagccagggcccctcatcaaagtcctcggtgttttttaaattatcagaactgcccaggaccacgtttcccaggccctgcccagctgggactcctcggtccttgcctcctagtttctcaggcctggccctctcaaggcccaggcaccccaggccggttggaggccccgacttccactctggagaaccgtccaccctggaaagaagagctcagattcctcttggctctcggagccgcagggagtgtgtcttcccgcgccaccctccaccccccgaaatgtttctgtttctaatcccagcctgggcaggaatgtggctccccggccaggggccaaggagctattttggggtctcgtttgcccagggagggcttggctccaccactttcctcccccagcctttgggcagcaggtcacccctgttcaggctctgagggtgccccctcctggtcctgtcctcaccaccccttccccacctcctggg

SEQ ID NO: 151241 - protein, 305 aa, Artificial Sequence
  derived and/or modified sequence
MSRELAPLLLLLLSIHSALAMRICSFNVRSFGESKQEDKNAMDVIVKVIKRCDIILVMEIKDSNNRICPILMEKLNRNSRRGITYNYVISSRLGRNTYKEQYAFLYKEKLVSVKRSYHYHDYQDGDADVFSREPFVVWFQSPHTAVKDFVIIPLHTTPETSVKEIDELVEVYTDVKHRWKAENFIFMGDFNAGCSYVPKKAWKNIRLRTDPRFVWLIGDQEDTTVKKSTNCAYDRIVLRGQEIVSSVVPKSNSVFDFQKAYKLTEEEALDVSDHFPVEFKLQSSRAFTNSKKSVTLRKKTKSKRS

SEQ ID NO: 151242 - protein, 288 aa, Artificial Sequence
  derived and/or modified sequence
MSRELAPLLLLLLSIHSALAMRICSFNVRSFGESKQEDKNAMDVIVKVIKRCDIILVMEIKDSNNRICPILMEKLNRNSRRGITYNYVISSRLGRNTYKEQYAFLYKEKLVSVKRSYHYHDYQDGDADVFSREPFVVWFQSPHTAVKDFVIIPLHTTPETSVKEIDELVEVYTDVKHRWKAENFIFMGDFNAGCSYVPKKAWKNIRLRTDPRFVWLIGDQEDTTVKKSTNCAYDRIVLRGQEIVSSVVPKSNSVFDFQKAYKLTEEEVRLPSCLSMPLSWKDELAWAT

SEQ ID NO: 151243 - protein, 100 aa, Artificial Sequence
  derived and/or modified sequence
MSRELAPLLLLLLSIHSALAMRICSFNVRSFGESKQEDKNAMDVIVKVIKRCDIILVMEIKDSNNRICPILMEKLNRNSRRGITYNYVISSRLGRNTYKE

SEQ ID NO: 151244 - DNA, 918 bp, Artificial Sequence
  derived and/or modified sequence
atgtctagggaactcgccccgctactgctcctgctactgagtatccactctgccctggctatgaggatttgcagctttaatgttcgtagctttggagagtcgaaacaagaagacaaaaatgctatggacgtgatagtgaaggtgataaagagatgcgatatcatccttgttatggagataaaggactcgaacaacagaatatgccccatcctgatggaaaagctgaaccgaaattcaaggcgcggcattacatataattacgtgatcagctccagattaggcagaaatacttataaagagcagtacgcctttctctacaaggagaagctagtgtccgtgaagcggagctatcattatcacgattatcaggatggtgatgctgacgtgttctcacgggagccctttgtagtctggtttcagagccctcataccgcagttaaagattttgtaattatccccctgcacaccacgcccgaaacgagtgttaaagagatcgatgaactagttgaagtctacaccgacgtgaaacacagatggaaggcggaaaacttcatattcatgggagacttcaacgcggggtgcagttatgtccctaagaaagcctggaagaacatccgcctgcgcacggatcctaggttcgtgtggcttataggtgaccaggaggacacaacggttaagaagtcgacaaattgcgcatatgatcggatcgtcctccggggtcaagagatcgtatccagtgtagttcctaagtccaactcggtctttgacttccaaaaagcttacaaacttaccgaagaggaagctctcgacgtcagcgatcactttccagtagagtttaagctgcagagctcacgagccttcaccaactccaaaaagagcgtaacattacgcaaaaagacaaaatctaaacgatcatag

SEQ ID NO: 151245 - DNA, 918 bp, Artificial Sequence
  derived and/or modified sequence
atgtcgcgcgaactggcgcccttgcttctgcttctgttgtccatccacagcgctctggcaatgagaatttgcagctttaacgttcgctctttcggtgagtctaaacaggaggacaagaacgccatggatgtcattgttaaagtaatcaaaagatgtgacattatcctggttatggaaatcaaggatagcaataacagaatctgtccaatcctaatggaaaagctgaaccgcaactctcggcggggaatcacctacaactatgtgattagctcacgtctcggacggaatacgtataaagagcagtacgcctttctatataaggagaagcttgtgtctgtgaagcgaagctatcactatcacgactaccaagacggagacgcggacgtcttcagcagagaacctttcgtagtttggttccagagtccccacaccgccgttaaagattttgtgatcattccactacatactactccagagaccagtgtgaaggaaatcgacgagctggtggaggtatacacagacgtgaagcatagatggaaggccgagaacttcatcttcatgggagactttaatgcaggctgttcttatgtgcccaagaaggcatggaagaacatcagactccgaactgacccaagatttgtctggttgattggggaccaggaagatacaaccgtgaagaagtctaccaattgtgcttacgacagaatagtcctgcgggggcaggagattgttagctctgtagtgcccaagtccaactccgtctttgacttccagaaagcgtacaagctgactgaggaagaggcgctcgacgtctccgaccattttcccgtggagttcaaattacaatcaagccgtgcgttcacaaactccaagaagagcgttaccctacggaagaaaactaagagtaagcggtcctag

SEQ ID NO: 151246 - DNA, 867 bp, Artificial Sequence
  derived and/or modified sequence
atgtcaagagagttagcccctctgctgttactactcctgagcatccatagcgcacttgctatgcggatctgttcgttcaatgtcagatcttttggcgaaagtaagcaggaggataaaaacgcgatggacgtaatagttaaagttatcaaaaggtgcgacatcattcttgttatggaaatcaaggacagcaataaccgaatctgcccaatattgatggaaaagttgaacaggaacagtcgaaggggcatcacctataactatgtgatctctagccgactgggcaggaatacatacaaggagcagtatgcctttctctataaagaaaaactggtgtcagtaaagcgttcataccactatcacgattaccaggacggagacgccgacgtgttcagtcgcgagccgttcgtagtgtggttccagtctccgcacactgccgtcaaagattttgtcattataccccttcacaccacccctgaaacaagcgtgaaggagatagatgagctcgttgaagtttatacagacgttaagcacaggtggaaggcggagaacttcatttttatgggcgattttaatgcggggtgctcttacgttccaaagaaggcgtggaagaacatcaggctgcgaactgatcctaggttcgtatggttaataggtgatcaagaggacaccacagtgaaaaaaagcacaaattgtgcttatgatcgtatagtcttaaggggccaggagatcgtcagctccgtggtgcctaaatcaaattctgtattcgattttcagaaggcgtacaaacttaccgaagaagaagtgcggctgccatcctgcctgtctatgcccttgtcttggaaagacgaactggcgtgggcaacttag

SEQ ID NO: 151247 - DNA, 303 bp, Artificial Sequence
  derived and/or modified sequence
atgagcagagagctcgcgccactgttactgctcctgctgtcaatccattccgcactcgccatgaggatttgctcattcaacgtgcgatcatttggggaatcaaagcaggaggataaaaacgccatggatgtgatcgtgaaggtgattaaacgttgtgatatcattttagttatggagatcaaggactctaataatcgaatatgtcctatccttatggagaaattaaatcgtaattcccggcgaggtattacgtacaattatgtgatttctagcagactcgggagaaacacctataaagaatag

SEQ ID NO: 151248 - DNA, 918 bp, Artificial Sequence
  derived and/or modified sequence
atgagccgggagctggcccccctgctgctgctgctgctgagcatccacagcgccctggccatgaggatctgcagcttcaacgtgcgcagctttggagagagcaagcaggaggacaagaatgccatggatgtgattgtgaaggtgatcaagagatgtgacatcatcctggtgatggagatcaaggacagcaacaaccgcatctgccccatcctgatggagaagctgaacagaaacagccggcggggcatcacctacaactacgtgatcagcagccggctgggcaggaacacctacaaggagcagtatgccttcctgtacaaggagaagctggtgtctgtgaagaggagctaccactaccatgactaccaggatggagatgctgatgtgttcagccgggagccctttgtggtgtggttccagagcccccacacagctgtgaaggactttgtgatcatccccctgcacaccaccccagagacctctgtgaaggagattgatgagctggtggaggtgtacacagatgtgaagcaccgctggaaggccgagaacttcatcttcatgggagacttcaatgccggctgcagctatgtgcccaagaaggcctggaagaacatccggctgaggacagaccccaggtttgtgtggctgattggagaccaggaggacaccaccgtgaagaagagcaccaactgtgcctatgaccgcatcgtgctgcggggccaggagatcgtgtcctctgtggtgcccaagagcaacagcgtgtttgacttccagaaggcctacaagctgacagaggaggaggccctggatgtgtctgaccacttccctgtggagttcaagctgcagagcagccgggccttcaccaacagcaagaagtctgtgaccctgaggaagaagaccaagagcaagaggagctag

SEQ ID NO: 151249 - DNA, 867 bp, Artificial Sequence
  derived and/or modified sequence
atgagccgggagctggcccccctgctgctgctgctgctgagcatccacagcgccctggccatgaggatctgcagcttcaacgtgcgcagctttggagagagcaagcaggaggacaagaatgccatggatgtgattgtgaaggtgatcaagagatgtgacatcatcctggtgatggagatcaaggacagcaacaaccgcatctgccccatcctgatggagaagctgaacagaaacagccggcggggcatcacctacaactacgtgatcagcagccggctgggcaggaacacctacaaggagcagtatgccttcctgtacaaggagaagctggtgtctgtgaagaggagctaccactaccatgactaccaggatggagatgctgatgtgttcagccgggagccctttgtggtgtggttccagagcccccacacagctgtgaaggactttgtgatcatccccctgcacaccaccccagagacctctgtgaaggagattgatgagctggtggaggtgtacacagatgtgaagcaccgctggaaggccgagaacttcatcttcatgggagacttcaatgccggctgcagctatgtgcccaagaaggcctggaagaacatccggctgaggacagaccccaggtttgtgtggctgattggagaccaggaggacaccaccgtgaagaagagcaccaactgtgcctatgaccgcatcgtgctgcggggccaggagatcgtgtcctctgtggtgcccaagagcaacagcgtgtttgacttccagaaggcctacaagctgacagaggaggaggtgcggctgcccagctgcctgtccatgcccctgtcctggaaggatgagctggcctgggccacctag

SEQ ID NO: 151250 - DNA, 303 bp, Artificial Sequence
  derived and/or modified sequence
atgagccgggagctggcccccctgctgctgctgctgctgagcatccacagcgccctggccatgaggatctgcagcttcaacgtgcgcagctttggagagagcaagcaggaggacaagaatgccatggatgtgattgtgaaggtgatcaagagatgtgacatcatcctggtgatggagatcaaggacagcaacaaccgcatctgccccatcctgatggagaagctgaacagaaacagccggcggggcatcacctacaactacgtgatcagcagccggctgggcaggaacacctacaaggagtag

SEQ ID NO: 151251 - DNA, 918 bp, Artificial Sequence
  derived and/or modified sequence
atgagccgggagctggcccccctgctgctgctgctgctgagcatccattccgcccttgctatgagaatttgcagtttcaacgtcagatccttcggggagtccaaacaggaagacaaaaatgccatggacgtgatcgtcaaggtaattaaacggtgcgatattatcctggtcatggagatcaaggactcaaacaatcgaatctgccctatcctgatggaaaagctaaatcgcaatagcagacgtggtataacttataattacgtcatctctagcaggctgggtcgcaatacttacaaggaacagtatgcatttctttataaggagaagctggtttctgttaagagaagctatcactatcacgattaccaggacggagacgccgacgtgttcagtcgagagccctttgtggtgtggttccagagtcctcacaccgccgtgaaagactttgtgattatccccctgcacacaacacccgagacatctgtgaaagaaatagacgaactggtggaggtatacactgacgtcaaacacaggtggaaggctgagaacttcattttcatgggcgacttcaacgccggctgctcctacgtgcccaagaaggcctggaagaatatcaggctgagaaccgatcctcgtttcgtctggctgatcggcgatcaggaagatactaccgttaaaaaaagtactaactgtgcttatgatcgaatcgtcctgcggggccaagaaatcgtgagtagcgttgtgcccaagtccaactcggtttttgacttccaaaaagcctacaagctcacagaggaggaagcattggacgtatccgaccactttccagtcgagtttaagctgcagagctctcgcgcgttcaccaacagcaagaagtccgtgaccctaagaaagaaaaccaagtctaagagatcctag

SEQ ID NO: 151252 - DNA, 918 bp, Artificial Sequence
  derived and/or modified sequence
atgagccgggagctggcccccctgctgctgctgctgctgagcatccactccgccctggctatgcggatatgctctttcaacgtgagatccttcggggaatccaagcaggaggacaaaaatgctatggatgtaatcgtgaaggtgatcaagcggtgcgatatcattctcgtgatggagattaaggactctaacaatcggatctgccccatccttatggagaaactcaacaggaacagcaggaggggcatcacctacaactacgtaatcagttcccgattaggaaggaacacatacaaggaacagtacgccttcctctacaaggagaagctggtttcggtcaagcgctcttatcattaccacgactaccaggatggcgatgccgacgtgttttctcgagagccctttgtggtgtggttccagtccccacataccgccgtgaaagattttgtgatcattccgctccacacgacacctgagaccagtgttaaggagatcgatgagctggtcgaagtttataccgatgtgaagcacaggtggaaagctgaaaacttcatcttcatgggtgattttaatgccggctgtagctatgtgccgaaaaaagcctggaagaacatccggctgaggacagacccgaggttcgtgtggctgattggggatcaggaagataccaccgtcaagaaatctacgaactgtgcctacgaccggattgtgctgaggggccaggaaatagtgagtagcgtcgtgccaaagtccaactctgtgttcgactttcaaaaggcctacaaattaaccgaagaagaggctctggacgtttccgaccattttccagtggagtttaagctgcagtcatctagggcctttactaatagcaaaaaatcagtaaccctaaggaaaaagaccaagtccaagcgaagctag

SEQ ID NO: 151253 - DNA, 867 bp, Artificial Sequence
  derived and/or modified sequence
atgagccgggagctggcccccctgctgctgctgctgctgagcatccacagcgctttagccatgcgcatctgctcatttaatgtaagatcattcggcgagagcaaacaggaggataaaaacgcaatggacgtgatagtgaaggtgatcaaacgctgtgacatcattctggtcatggaaataaaagatagcaacaatcgcatatgccctatactcatggagaagctgaacaggaatagccggcgcggaatcacttacaactacgtgatcagctctcgactgggccggaatacatacaaagagcagtatgcatttctctacaaagagaaattggtgtcggtgaagaggtcttaccattaccatgattaccaggatggtgacgcagacgttttcagtcgagagccctttgtggtatggtttcagtctcctcataccgccgtgaaagattttgtgatcatacccctgcacaccaccccagaaacctcggttaaggagattgatgaactggtagaagtttacaccgacgtgaagcatcggtggaaagccgagaatttcatctttatgggcgatttcaatgcggggtgcagttacgtgcctaaaaaggcctggaagaatattcgactgcggacagatccacgattcgtgtggcttatcggagatcaggaagatacaactgtgaagaagagcacaaactgtgcctacgatcggatcgtactgagaggccaggagattgtgtctagcgtggtccccaagtctaatagcgtgtttgattttcaaaaggcttacaagctcaccgaggaagaggtccggcttccgagttgcctgtccatgccgctgtcttggaaggacgagttggcttgggctacttag

SEQ ID NO: 151254 - DNA, 303 bp, Artificial Sequence
  derived and/or modified sequence
atgagccgggagctggcccccctgctgctgctgctgctgagcatccactctgcacttgctatgcgtatctgttcctttaacgtgcgttcattcggagaatcgaagcaagaagataaaaatgctatggatgtgatagtgaaagtgatcaagaggtgtgacattattttggtgatggagataaaggacagtaacaatagaatctgccctattttaatggaaaaactcaatcggaattcccgcagagggattacatataattacgtcataagtagccgcctcgggcgcaatacgtataaagagtag

SEQ ID NO: 151255 - DNA, 918 bp, Artificial Sequence
  derived and/or modified sequence
atgagccgcgaactggcccctctcctattgctgctgctttccattcacagtgctctcgctatgcgaatctgttccttcaatgtgcggagcttcggggagtccaagcaagaagataagaatgctatggatgttatagtcaaagtcattaagcgatgcgacattatcctcgttatggaaataaaggacagtaataatagaatctgcccaatactgatggagaaactaaaccgaaattctcgacggggtataacatacaactacgtgattagctccagactcggcaggaacacttacaaggaacagtacgcctttctgtacaaggaaaagcttgtgagtgtgaagcgctcgtaccactaccacgactatcaagacggagatgccgacgtgttctccagggagccctttgtcgtatggttccagtcaccccacaccgcggtcaaggactttgtgatcatccctctgcacaccactcccgagacctctgtcaaggagatcgatgaactggtggaggtatacacagacgtgaaacaccgctggaaggcagagaacttcattttcatgggcgactttaacgcgggatgtagttatgtgcccaagaaggcctggaaaaatatccgactgaggaccgacccaagatttgtctggctgataggagaccaggaagataccacagttaagaagtctactaactgtgcctacgaccgcatagtgttgagagggcaggaaattgtgtccagcgtggtccctaagtccaactctgtgtttgattttcagaaagcctacaaactcacggaggaagaggcccttgatgtgtctgaccattttccagtagagtttaaattgcagtcgagcagagcctttacaaattcaaagaagagcgtcaccctccgaaagaagaccaagtctaagcgcagctag

SEQ ID NO: 151256 - DNA, 918 bp, Artificial Sequence
  derived and/or modified sequence
atgagtagagagctcgccccactgttactgctgctcctgtccatccacagcgccctggcgatgagaatttgttcctttaatgtgcgcagcttcggtgagtccaaacaggaggacaaaaacgccatggatgttatcgttaaagtcatcaagcgctgcgacattattctggtcatggaaattaaggacagcaataatcggatatgtcctatcctaatggaaaaactgaacaggaactctcgccgagggatcacctataactacgtgatttcatcacggctgggcagaaatacgtataaggaacaatacgccttcctttacaaagaaaaactagtttctgtcaagaggtcttaccattatcacgattaccaggatggtgatgcagatgtgttcagccgcgagcctttcgtggtttggttccagtccccacacactgcggttaaagacttcgtcattattccgttgcataccacccctgagacctccgtcaaggagatcgacgagctggttgaagtgtataccgacgttaagcacagatggaaagccgagaatttcatcttcatgggcgacttcaacgcaggttgttcttatgtgccaaagaaggcatggaaaaatattcggcttcggactgatcccaggtttgtctggctgattggtgatcaagaggatactactgtgaaaaagagtaccaattgcgcctatgatcggatcgtcctgagagggcaggagatagtctcctctgtagtgccaaaatcaaatagcgttttcgacttccagaaagcctacaagctaaccgaggaggaggcactggacgtcagtgatcatttccccgtggaattcaagctgcagagttcccgtgccttcaccaattccaagaagagcgtgactctgagaaaaaagacaaagtcaaaaaggtcctag

SEQ ID NO: 151257 - DNA, 867 bp, Artificial Sequence
  derived and/or modified sequence
atgtctagggagctggctccactcctcctgctcctgctgagtatccacagtgccttagcaatgcgcatttgcagtttcaacgttagaagtttcggggagagtaaacaggaggacaagaacgcaatggacgtcatcgttaaggtcattaagagatgtgatattatcttggtcatggagataaaagattccaacaatagaatttgtcctatactgatggagaagctcaaccggaattctagaaggggaattacatacaactatgtaatttcaagcaggttgggacggaacacctacaaagagcaatatgcatttctttacaaggaaaaactggtgtctgttaaacggtcctaccactaccatgactaccaggacggcgatgctgacgtgttcagcagggagccatttgtagtgtggttccaaagtccacacacagccgtaaaagattttgtgattatccccttacacacaacaccggaaacatcagtgaaagagatcgacgagctggttgaagtgtataccgacgtgaaacatcgctggaaagcggaaaacttcatctttatgggggatttcaacgccggttgttcctacgtccctaagaaggcttggaaaaacataagattgcggaccgaccctcgctttgtttggctgatcggtgaccaagaagacaccactgtcaaaaagtccaccaactgtgcctacgatagaatagtgctcagggggcaggaaatcgtgagcagcgttgtccctaagagtaacagcgtgttcgattttcagaaggcttacaagctcacggaggaggaagtccgactgccttcttgcctgagcatgcctctgagttggaaggacgaacttgcttgggcaacctag

SEQ ID NO: 151258 - DNA, 303 bp, Artificial Sequence
  derived and/or modified sequence
atgtctcgcgaactcgctccactcctgctacttttactcagcatccattctgctctggccatgaggatttgtagctttaatgtgagatctttcggagagtctaaacaggaagacaagaatgcaatggacgtgatcgtcaaggtgatcaaaaggtgtgacattattctggtgatggagattaaggactctaacaatcgaatttgccctatcctgatggagaagctgaatcggaacagtcgcagggggattacatacaactatgtcatcagcagccgcctgggaagaaatacctacaaggaatag

SEQ ID NO: 151259 - DNA, 918 bp, Artificial Sequence
  derived and/or modified sequence
atgagcagagagctggcccccctgctgctgctgctgctgagcatccacagcgccctggccatgagaatctgcagcttcaacgtgagaagcttcggcgagagcaagcaggaggacaagaacgccatggacgtgatcgtgaaggtgatcaagagatgcgacatcatcctggtgatggagatcaaggacagcaacaacagaatctgccccatcctgatggagaagctgaacagaaacagcagaagaggcatcacctacaactacgtgatcagcagcagactgggcagaaacacctacaaggagcagtacgccttcctgtacaaggagaagctggtgagcgtgaagagaagctaccactaccacgactaccaggacggcgacgccgacgtgttcagcagagagcccttcgtggtgtggttccagagcccccacaccgccgtgaaggacttcgtgatcatccccctgcacaccacccccgagaccagcgtgaaggagatcgacgagctggtggaggtgtacaccgacgtgaagcacagatggaaggccgagaacttcatcttcatgggcgacttcaacgccggctgcagctacgtgcccaagaaggcctggaagaacatcagactgagaaccgaccccagattcgtgtggctgatcggcgaccaggaggacaccaccgtgaagaagagcaccaactgcgcctacgacagaatcgtgctgagaggccaggagatcgtgagcagcgtggtgcccaagagcaacagcgtgttcgacttccagaaggcctacaagctgaccgaggaggaggccctggacgtgagcgaccacttccccgtggagttcaagctgcagagcagcagagccttcaccaacagcaagaagagcgtgaccctgagaaagaagaccaagagcaagagaagctag

SEQ ID NO: 151260 - DNA, 867 bp, Artificial Sequence
  derived and/or modified sequence
atgagcagagagctggcccccctgctgctgctgctgctgagcatccacagcgccctggccatgagaatctgcagcttcaacgtgagaagcttcggcgagagcaagcaggaggacaagaacgccatggacgtgatcgtgaaggtgatcaagagatgcgacatcatcctggtgatggagatcaaggacagcaacaacagaatctgccccatcctgatggagaagctgaacagaaacagcagaagaggcatcacctacaactacgtgatcagcagcagactgggcagaaacacctacaaggagcagtacgccttcctgtacaaggagaagctggtgagcgtgaagagaagctaccactaccacgactaccaggacggcgacgccgacgtgttcagcagagagcccttcgtggtgtggttccagagcccccacaccgccgtgaaggacttcgtgatcatccccctgcacaccacccccgagaccagcgtgaaggagatcgacgagctggtggaggtgtacaccgacgtgaagcacagatggaaggccgagaacttcatcttcatgggcgacttcaacgccggctgcagctacgtgcccaagaaggcctggaagaacatcagactgagaaccgaccccagattcgtgtggctgatcggcgaccaggaggacaccaccgtgaagaagagcaccaactgcgcctacgacagaatcgtgctgagaggccaggagatcgtgagcagcgtggtgcccaagagcaacagcgtgttcgacttccagaaggcctacaagctgaccgaggaggaggtgagactgcccagctgcctgagcatgcccctgagctggaaggacgagctggcctgggccacctag

SEQ ID NO: 151261 - DNA, 303 bp, Artificial Sequence
  derived and/or modified sequence
atgagcagagagctggcccccctgctgctgctgctgctgagcatccacagcgccctggccatgagaatctgcagcttcaacgtgagaagcttcggcgagagcaagcaggaggacaagaacgccatggacgtgatcgtgaaggtgatcaagagatgcgacatcatcctggtgatggagatcaaggacagcaacaacagaatctgccccatcctgatggagaagctgaacagaaacagcagaagaggcatcacctacaactacgtgatcagcagcagactgggcagaaacacctacaaggagtag

SEQ ID NO: 151262 - DNA, 1463 bp, Artificial Sequence
  derived and/or modified sequence
cagcctatgacacttttgctcctcctgaaatctccatatcttgcttttctcaaattccaaggtagcctttgcgcaacatatcactctccactgactcttgtcccatcagggcccatagtggatggctgtatgggggccatgtgactgaactcctgatcctcgtttcagcccactcatgtgacatgcatggagctcttcagcagggacttactgaccaggacaagagcttgagactttgaggggatctgattgtcactgcacaatcaaggacagtattcccaagagtggatgttgctcaagatagtccaaggaattctatgaagaaaaggactccacagacaataaattttggacaccctgtttcaacacagtgcatcttagagactggtgtttgcaagtatatggagcaggaaacttcatcccgaagatggagaccccggggctgtcagcaggcgttagagtcttgaagccagagcagcgccaggatgtcacgggagctggccccactgctgcttctcctcctctccatccacagcgccctggccatgaggatctgctccttcaacgtcaggtcctttggggaaagcaagcaggaagacaagaatgccatggatgtcattgtgaaggtcatcaaacgctgtgacatcatactcgtgatggaaatcaaggacagcaacaacaggatctgccccatactgatggagaagctgaacagaaattcaaggagaggcataacgtacaactatgtgattagctctcggcttggaagaaacacatataaagaacaatatgcctttctctacaaggaaaagctggtgtctgtgaagaggagttatcactaccatgactatcaggatggagacgcagatgtgttttccagggagccctttgtggtctggttccaatctccccacactgctgtcaaagacttcgtgattatccccctgcacaccaccccagagacatccgttaaggagatcgatgagttggttgaggtctacacggacgtgaaacaccgctggaaggcggagaatttcattttcatgggtgacttcaatgccggctgcagctacgtccccaagaaggcctggaagaacatccgcttgaggactgaccccaggtttgtttggctgatcggggaccaagaggacaccacggtgaagaagagcaccaactgtgcatatgacaggattgtgcttagaggacaagaaatcgtcagttctgttgttcccaagtcaaacagtgtttttgacttccagaaagcttacaagctgactgaagaggaggccctggatgtcagcgaccactttccagttgaatttaaactacagtcttcaagggccttcaccaacagcaaaaaatctgtcactctaaggaagaaaacaaagagcaaacgctcctagacccaagggtctcatcttattaaccatttcttgcctctaaataaaatgtctctaacagat

SEQ ID NO: 151263 - DNA, 1294 bp, Artificial Sequence
  derived and/or modified sequence
agatgtcagagctggctcccggttgggatatgagtgactttgtggaggatggcgcctaaatgaggcatgccaatttctgcaccagggtgacgaacataagggctccttaaaggctagcccaatgtatctgtatttccttggggattaaaacccatgatcttcagttcctcagagaactgaaagttgcaaggagaaatccagtaattcctgttatctgcaggctttataagtcagtggagcctgcggaagtggccagaatccagcactccaagcactgctgtcttctcacagagtcttgaagccagagcagcgccaggatgtcacgggagctggccccactgctgcttctcctcctctccatccacagcgccctggccatgaggatctgctccttcaacgtcaggtcctttggggaaagcaagcaggaagacaagaatgccatggatgtcattgtgaaggtcatcaaacgctgtgacatcatactcgtgatggaaatcaaggacagcaacaacaggatctgccccatactgatggagaagctgaacagaaattcaaggagaggcataacgtacaactatgtgattagctctcggcttggaagaaacacatataaagaacaatatgcctttctctacaaggaaaagctggtgtctgtgaagaggagttatcactaccatgactatcaggatggagacgcagatgtgttttccagggagccctttgtggtctggttccaatctccccacactgctgtcaaagacttcgtgattatccccctgcacaccaccccagagacatccgttaaggagatcgatgagttggttgaggtctacacggacgtgaaacaccgctggaaggcggagaatttcattttcatgggtgacttcaatgccggctgcagctacgtccccaagaaggcctggaagaacatccgcttgaggactgaccccaggtttgtttggctgatcggggaccaagaggacaccacggtgaagaagagcaccaactgtgcatatgacaggattgtgcttagaggacaagaaatcgtcagttctgttgttcccaagtcaaacagtgtttttgacttccagaaagcttacaagctgactgaagaggaggccctggatgtcagcgaccactttccagttgaatttaaactacagtcttcaagggccttcaccaacagcaaaaaatctgtcactctaaggaagaaaacaaagagcaaacgctcctagacccaagggtctcatcttattaaccatttcttgcctctaaataaaatgtctctaacaga

SEQ ID NO: 151264 - DNA, 2109 bp, Artificial Sequence
  derived and/or modified sequence
gttatgacctgggaaatgtgagcaggtagaggctacattaagaagtttgctctttgaccaataaaagccctggaaagattttaatcagagcaggcctgcccttcagaaagtgactcttgaggtccaggcacagccctgtgtggaagatagtgtgtgaggctgaaacccagagtgtgtcatcatctggaaacaaccctgcaaagcccactcatgtgacatgcatggagctcttcagcagggacttactgaccaggacaagagcttgagactttgaggggatctgattgtcactgcacaatcaaggacagtattcccaagagtggatgttgctcaagatagtccaaggaattctatgaagaaaaggactccacagacaataaattttggacaccctgtttcaacacaggtgcatcttagagactggtgtttgcaagtatatggagcaggaaacttcatcccgaagatggagaccccggggctgtcagcaggcgttaggctttataagtcagtggagcctgcggaagtggccagaatccagcactccaagcactgctgtcttctcacagagtcttgaagccagagcagcgccaggatgtcacgggagctggccccactgctgcttctcctcctctccatccacagcgccctggccatgaggatctgctccttcaacgtcaggtcctttggggaaagcaagcaggaagacaagaatgccatggatgtcattgtgaaggtcatcaaacgctgtgacatcatactcgtgatggaaatcaaggacagcaacaacaggatctgccccatactgatggagaagctgaacagaaattcaaggagaggcataacgtacaactatgtgattagctctcggcttggaagaaacacatataaagaacaatatgcctttctctacaaggaaaagctggtgtctgtgaagaggagttatcactaccatgactatcaggatggagacgcagatgtgttttccagggagccctttgtggtctggttccaatctccccacactgctgtcaaagacttcgtgattatccccctgcacaccaccccagagacatccgttaaggagatcgatgagttggttgaggtctacacggacgtgaaacaccgctggaaggcggagaatttcattttcatgggtgacttcaatgccggctgcagctacgtccccaagaaggcctggaagaacatccgcttgaggactgaccccaggtttgtttggctgatcggggaccaagaggacaccacggtgaagaagagcaccaactgtgcatatgacaggattgtgcttagaggacaagaaatcgtcagttctgttgttcccaagtcaaacagtgtttttgacttccagaaagcttacaagctgactgaagaggaggtaaggttgccatcttgtctttctatgccattgtcctggaaagatgagttagcttgggcaacatgatgagactccatctctatgaaaaattcaaaaaaattagctgggcatggtgatgcatgcctatggtcccagctacttgggaggctgaggtgggaggatcacttgagtccaggaagcggaggttgcagtgagccaagatcgcaccactgcactccaggctgggcaacagagtgagatcctgtctcaaaaaaaaaaaaaaaaaaagatgggttgatgccaccctttgaggtcaccactgaagacacaacattgggcactagaccttgaccctcaatgcctatgattctgtgatttgaggcccctccaaaatttctgatcgagctggtcttggaatgacgcttaccagtaagtgttctgtggggtgacttcgggcatttcctctcccctccctggtcctaaatttgctcatcgctaaaatgaaagcatctcccaggcatctcctaatttccatgtctacctcccctttctccttataggccctggatgtcagcgaccactttccagttgaatttaaactacagtcttcaagggccttcaccaacagcaaaaaatctgtcactctaaggaagaaaacaaagagcaaacgctcctagacccaagggtctcatcttattaaccatttcttgcctctaaataaaatgtctctaacagat

SEQ ID NO: 151265 - DNA, 786 bp, Artificial Sequence
  derived and/or modified sequence
cagcctatgacacttttgctcctcctgaaatctccatatcttgcttttctcaaattccaaggtagcctttgcgcaacatatcactctccactgactcttgtcccatcagggcccatagtggatggctgtatgggggccatgtgactgaactcctgatcctcgtttcagcccactcatgtgacatgcatggagctcttcagcagggacttactgaccaggacaagagcttgagactttgaggggatctgattgtcactgcacaatcaaggacagtattcccaagagtggatgttgctcaagatagtccaaggaattctatgaagaaaaggactccacagacaataaattttggacaccctgtttcaacacagtgcatcttagagactggtgtttgcaagtatatggagcaggaaacttcatcccgaagatggagaccccggggctgtcagcaggcgttagagtcttgaagccagagcagcgccaggatgtcacgggagctggccccactgctgcttctcctcctctccatccacagcgccctggccatgaggatctgctccttcaacgtcaggtcctttggggaaagcaagcaggaagacaagaatgccatggatgtcattgtgaaggtcatcaaacgctgtgacatcatactcgtgatggaaatcaaggacagcaacaacaggatctgccccatactgatggagaagctgaacagaaattcaaggagaggcataacgtacaactatgtgattagctctcggcttggaagaaacacatataaagaac

SEQ ID NO: 151266 - protein, 866 aa, Artificial Sequence
  derived and/or modified sequence
MGNRGMEELIPLVNKLQDAFSSIGQSCHLDLPQIAVVGGQSAGKSSVLENFVGRDFLPRGSGIVTRRPLILQLIFSKTEHAEFLHCKSKKFTDFDEVRQEIEAETDRVTGTNKGISPVPINLRVYSPHVLNLTLIDLPGITKVPVGDQPPDIEYQIKDMILQFISRESSLILAVTPANMDLANSDALKLAKEVDPQGLRTIGVITKLDLMDEGTDARDVLENKLLPLRRGYIGVVNRSQKDIEGKKDIRAALAAERKFFLSHPAYRHMADRMGTPHLQKTLNQQLTNHIRESLPALRSKLQSQLLSLEKEVEEYKNFRPDDPTRKTKALLQMVQQFGVDFEKRIEGSGDQVDTLELSGGARINRIFHERFPFELVKMEFDEKDLRREISYAIKNIHGVRTGLFTPDLAFEAIVKKQVVKLKEPCLKCVDLVIQELINTVRQCTSKLSSYPRLREETERIVTTYIREREGRTKDQILLLIDIEQSYINTNHEDFIGFANAQQRSTQLNKKRAIPNQVIRRGWLTINNISLMKGGSKEYWFVLTAESLSWYKDEEEKEKKYMLPLDNLKIRDVEKGFMSNKHVFAIFNTEQRNVYKDLRQIELACDSQEDVDSWKASFLRAGVYPEKDQAENEDGAQENTFSMDPQLERQVETIRNLVDSYVAIINKSIRDLMPKTIMHLMINNTKAFIHHELLAYLYSSADQSSLMEESADQAQRRDDMLRMYHALKEALNIIGDISTSTVSTPVPPPVDDTWLQSASSHSPTPQRRPVSSIHPPGRPPAVRGPTPGPPLIPVPVGAAASFSAPPIPSRPGPQSVFANSDLFPAPPQIPSRPVRIPPGIPPGVPSRRPPAAPSRPTIIRPAEPSLLD

SEQ ID NO: 151267 - DNA, 2601 bp, Artificial Sequence
  derived and/or modified sequence
atgggtaaccgggggatggaggaactgatacctctggtcaacaaacttcaggatgcattttcctcaatcggccagtcttgccacctggatttaccacagattgccgtcgtcggtggtcaaagcgctggtaaatctagtgtcctcgaaaatttcgtggggagagacttcctcccacggggtagtgggatcgtcaccaggcggccgctgattctccagctcatttttagcaagacagagcatgcagagttcttgcattgcaagtcaaaaaaatttacggactttgatgaagtgagacaggagattgaagctgagacagacagagttaccggcaccaacaaagggatatcccctgtgcctataaacctgcgcgtttactcccctcacgtccttaatctgaccctgattgacctgcctggcattaccaaagtcccggtcggagaccagcccccagacatcgagtaccagattaaggacatgatcttacaattcatctcgcgggaaagcagcctcatactcgctgttacccccgccaatatggatctcgccaatagtgatgcattgaagttagcgaaggaagtcgacccacagggactgcgaactatcggggttatcactaagctggatctgatggacgaggggactgacgcccgcgacgtgctcgaaaataagctgcttcccttgagacgggggtacattggagtggtaaaccgctctcaaaaggacatagagggaaaaaaagacatacgtgcggcactggctgccgagcgtaagttctttctgagccaccccgcatataggcatatggctgaccggatgggcactccccatttacagaagacactgaaccagcagctaacaaatcatatcagagaaagcctgcctgcgctgagatcgaagctgcagtcccagcttctgagcctcgagaaagaggtggaggaatacaagaacttcaggccggacgatccaacccgtaagacaaaggctctgttgcagatggtccaacagttcggtgtcgacttcgagaagagaatagaaggatcaggcgatcaggtcgatactctggaactcagtggaggagctcggatcaatagaatctttcacgagcggttccctttcgagttagtcaagatggaattcgacgaaaaagaccttcgacgcgagatctcctacgcaattaaaaatatccatggggtgcggacaggtttgtttacacccgacctcgccttcgaggccatcgtgaaaaagcaagtggtgaaactcaaagagccctgcctgaaatgtgtggacttggttatccaggaactgatcaacactgtccggcagtgcaccagtaagctgagtagctatccccgcttgcgcgaagagactgaacggatcgtgaccacttacataagggagagggaaggacggacaaaagaccagatcctcctgctgatcgatattgaacagtcttatataaacaccaatcacgaagatttcattggatttgccaacgcccaacagcgcagtactcagctgaataaaaagcgcgccatcccaaaccaggtcattcgccgcgggtggctgaccatcaataatatttccttaatgaaagggggctctaaggaatactggttcgtgcttacggccgaatctctgtcgtggtataaggatgaggaagagaaggagaaaaaatatatgctgccactggacaacctgaagatcagggatgtcgaaaagggttttatgagcaataaacatgtgttcgctatattcaatacggaacagcggaatgtgtacaaggacctccggcagattgagcttgcctgtgactcccaggaggacgtggattcttggaaggcgagttttctgcgtgctggcgtgtacccagagaaggatcaggctgaaaatgaagacggagcccaggaaaacacatttagcatggacccacagttggaaaggcaggtcgagacgattcgaaatctggttgattcctatgtagccatcatcaataagtctattcgcgatttaatgcctaagaccatcatgcatctgatgatcaataacacgaaagcctttattcatcatgagctgcttgcttatctatattccagcgcagatcagagctcactgatggaagagagtgcagaccaggcccaacgtagggacgatatgctgaggatgtaccatgctttaaaagaagcactaaatatcataggagacatctccacatctaccgtgtcgactcctgttcccccaccagttgatgacacctggctacagtccgcctccagtcattctccgactccccagcggcgcccagtctctagtatccacccgcccggacgtccccccgctgtcagaggaccaactcctggaccaccgctgataccagtgccagtgggagccgccgcctcatttagtgctccccccatcccgtccagaccgggtccacagtctgtgtttgcaaattctgatcttttccctgccccaccacagattccctcgcgcccagtgaggattccgccagggatcccgcctggagtaccttccaggagaccacctgccgcacccagcagaccaaccatcattagacctgcagagcctagcctcctggactag

SEQ ID NO: 151268 - DNA, 2601 bp, Artificial Sequence
  derived and/or modified sequence
atgggcaacagaggcatggaggagctgatccccctggtgaacaagctgcaggatgccttcagcagcatcggccagagctgccacctggacctgccccagattgctgtggtgggcggccagagcgctgggaagagctctgtgctggagaactttgtgggccgggacttcctgccccggggcagcggcatcgtgacccggcggcccctcatcctgcagctgatcttcagcaagacagagcacgccgagttcctgcactgcaagagcaagaagttcacagactttgatgaggtgcggcaggagattgaagctgagacagacagagtgacaggcaccaacaagggcatcagccctgtgcccatcaacctgcgggtgtacagcccccacgtgctgaacctgaccctgattgacctgcccggcatcaccaaggtgcctgtgggggaccagcccccagacatcgagtaccagatcaaggacatgatcctgcagttcatcagccgggagagcagcctcatcctggccgtgaccccagccaacatggacctggccaacagtgatgccctgaagctggccaaggaggtggacccccagggcctgcggaccatcggggtcatcaccaagctggacctgatggatgagggcacagatgccagagatgtgctggagaacaagctgctgcccctgcggcggggctacatcggcgtggtgaacagaagccagaaggacatcgagggcaagaaggacatccgggccgccctggccgctgagaggaagttcttcctgagccacccagcctaccgccacatggctgacaggatgggcaccccccacctgcagaagaccctgaaccagcagctgaccaaccacatccgggagagcctgcctgccctgcggagcaagctgcagagccagctgctgagcctggagaaggaggtggaggagtacaagaacttccggccagatgaccccaccaggaagaccaaggccctgctgcagatggtgcagcagtttggagtggactttgagaagagaattgagggcagcggggaccaggtggacaccctggagctgtctggaggagcccgcatcaaccgcatcttccacgagcgcttcccctttgagctggtgaagatggagtttgatgagaaggacctgcggcgggagatctcctatgccatcaagaacatccacggcgtgaggacaggcctcttcaccccagacctggcctttgaggccatcgtgaagaagcaggtggtgaagctgaaggagccctgcctgaagtgtgtggacctggtgatccaggagctgatcaacacagtgcggcagtgcaccagcaagctgagcagctacccccggctgcgggaggagacagaaagaattgtgaccacctacatccgggagcgggagggccgcaccaaggaccagatcctgctgctgattgatattgagcagagctacatcaacaccaaccacgaggacttcatcggctttgccaatgcccagcagaggagcacccagctgaacaagaagagggccatccccaaccaggtgatccggcggggctggctgaccatcaacaacatcagcctgatgaagggcggcagcaaggagtactggtttgtgctgacagctgagagcctgtcctggtacaaggatgaggaggagaaggagaagaagtacatgctgcccctggacaacctgaagatcagagatgtggagaagggcttcatgagcaacaagcacgtgtttgccatcttcaacacagagcagagaaatgtgtacaaggacctgcggcagatcgagctggcctgtgacagccaggaggatgtggacagctggaaggccagcttcctgcgggccggcgtgtacccagagaaggaccaggctgaaaatgaagatggagcccaggagaacaccttctccatggacccccagctggagcggcaggtggagaccatccggaacctggtggacagctatgtggccatcatcaacaagagcatccgggacctgatgcccaagaccatcatgcacctgatgatcaacaacaccaaggccttcatccaccacgagctgctggcctacctgtacagcagcgctgaccagagcagcctgatggaggagagcgctgaccaggcccagaggagagatgacatgctgaggatgtaccacgccctgaaggaggccctgaacatcatcggggacatcagcaccagcacagtgtccacccctgtgcccccacctgtggatgacacctggctgcagagcgccagcagccacagccccaccccccagaggaggcctgtgagcagcatccaccccccaggccggcccccagctgtgcggggccccaccccaggccccccactcatccctgtgcctgtgggcgctgctgccagcttcagcgccccacccatccccagcaggcctggcccccagagcgtgtttgccaacagcgacctcttccctgccccaccccagatccccagcaggcctgtgcgcatccccccaggcatccccccaggagtgcccagcagaagacctcctgctgcccccagccggcccaccatcatccggcctgctgagcccagcctgctggactag

SEQ ID NO: 151269 - DNA, 2601 bp, Artificial Sequence
  derived and/or modified sequence
atgggcaaccggggcatggaggagctgatccccctggtgaacaagctgcaggacgccttctcctcaatcggacagtcctgccacttggatctgcctcagatcgcggtagtgggcggacagagtgctggaaagagttccgtgctggaaaattttgtcggccgtgacttcttgccaagaggcagcgggatagttacccggaggccactcatcctgcagctgatctttagcaaaaccgagcatgctgagtttctgcattgtaaaagtaagaaatttacagacttcgatgaggtgaggcaggagatcgaggcagaaacagacagagtgactgggaccaataaaggcatctctcctgtgcccattaacctccgtgtgtacagtccacacgtgctcaacttgacactaattgatctgccaggcatcaccaaagtgcccgtcggcgatcaaccaccagatattgagtatcaaatcaaagacatgatcttacagtttataagccgcgagtctagcctgattcttgcagtgactcccgcaaacatggatttagctaactctgatgctctgaagctggcaaaggaggtggatccacagggattgcgaacaataggcgtcattacaaagctggatctcatggatgaggggacagatgcacgggacgtattggagaacaaactgctgcccctccgtagggggtacattggagtggtcaacaggagtcaaaaagacattgaagggaagaaagatattcgagccgctctggctgccgaaagaaaattttttctgagccacccggcgtacagacatatggccgaccgtatgggtacacctcaccttcagaagaccctgaaccagcagctaacgaatcacatcagggagtccctgcccgcactgaggagtaaactgcagtcgcagcttctgtcgctggaaaaggaggtcgaggaatataagaatttcaggcctgatgaccctacaaggaaaaccaaggccctgctgcagatggtccagcagtttggggtggattttgaaaagagaatcgagggttctggcgaccaggttgacacgctggaactcagcggcggtgctcggattaatcgcatttttcacgaaaggttcccgttcgaactggtgaaaatggagttcgatgagaaagatctgcgacgggaaatttcctacgccatcaagaacatccacggcgtgaggactgggttgttcacccccgatttagcatttgaagccattgtaaagaaacaggtagtgaagctcaaggagccatgtctgaagtgcgttgacctggtgattcaagagctaatcaacaccgtccggcaatgcacttctaagctgagcagttatcctagactaagagaagagacagagcggatagtcacaacttacatccgcgaaagagaggggagaactaaagaccagatcctcctgctcatcgatattgaacagtcctacattaacaccaatcatgaggacttcattgggttcgcaaatgcccagcagcgttcgacccaactgaacaaaaaacgcgccatccccaaccaagtaattagaagaggatggctaaccattaataatatttcgctgatgaagggggggagcaaagaatattggtttgtgctgacagctgagtcactgagttggtacaaagacgaggaggaaaaagaaaagaaatacatgctccctctggataatctgaaaatcagagacgttgaaaaaggctttatgagcaacaagcatgtctttgcaatctttaatacagaacagcggaacgtctataaagatctcaggcagatagaactagcatgtgactcccaagaggatgtggacagttggaaggcctcctttctcagagcaggcgtgtaccctgagaaagaccaggccgagaatgaagacggcgctcaggagaatacattcagcatggatccccagctcgagaggcaggtcgaaacaattcgcaaccttgtggattcctacgtggctatcatcaataagtctatccgggatctaatgcccaaaacaatcatgcacctgatgattaataatacaaaagcctttatacaccatgagctgctggcctacttgtactccagcgcggatcagtccagtctgatggaagagagtgccgaccaagcccagcggcgagacgatatgttacgaatgtatcacgctcttaaggaagcgttaaacattatcggggacatctctacgtctaccgtgtcaaccccggtacccccccccgtggacgatacttggctccagagcgcttccagccacagtccaacaccgcaacgtagacctgtatcttccatccaccccccggggcgtcctcccgctgtgcgcggcccaacaccgggaccgccccttattccggtcccagtgggagctgcagcttcattctccgcgcctcccatccctagccgtcccggacctcagagtgtattcgcgaatagtgacctgttccccgccccgcctcagatcccttcccgccccgtcaggatcccccccggtatcccccccggggtgcccagtcggcgaccacccgccgctcctagccgaccaaccattattcggccagccgagccttccctcctcgattag

SEQ ID NO: 151270 - DNA, 2601 bp, Artificial Sequence
  derived and/or modified sequence
atggggaatcggggaatggaggagctaataccacttgtgaacaagctccaggatgcctttagtagtatcggacagagctgtcacctagatttgccgcagatcgccgttgtcggaggccaatccgccggaaaaagctccgttctagaaaatttcgttggccgagattttcttccacgcggttcgggaattgttacgaggcggccacttatcctgcaactcatttttagtaagactgagcatgccgagttcctgcactgtaagtcgaaaaagttcactgacttcgatgaagtgagacaggagatagaggctgaaacagatcgagtgacgggtaccaacaagggcatttctcccgtccccattaaccttcgggtatactccccacatgttttaaatctaacccttatcgatctccctggtatcaccaaggtccctgtgggtgatcaaccccctgatatagagtatcagattaaagacatgatccttcagttcattagcagagagagctcactgatcctggccgtgacacccgcaaatatggacctggcgaattccgacgctctgaagttagctaaggaggtggatccccaaggccttcggacgattggtgtcatcacgaagttagaccttatggacgagggcacagatgccagggacgttctcgagaacaagctcctgccgctgaggagaggctatattggagtggtgaatcgttcccaaaaggatatcgagggcaaaaaggatatccgcgctgcactggccgcagaaaggaaatttttcctgtctcatcctgcctatagacacatggctgaccgcatggggacccctcacctccagaaaacacttaaccagcagcttaccaatcacatccgggaatcactgccagccctcaggtccaaacttcaatcacagttgttgtccctagaaaaggaggtcgaggagtacaagaacttcagaccagatgaccctacacgcaagacaaaagcacttcttcagatggtgcagcagtttggtgtggacttcgaaaaacgcatagaaggatcaggggaccaggtggacacactggagttgtctggaggggctaggatcaaccgcatttttcatgaacggtttccgttcgaactcgtgaagatggagttcgacgaaaaagacctcagacgagagatttcctatgccatcaagaacatccatggggtgcggacaggcctctttactccagacctggcattcgaggctatagtgaaaaagcaggtcgtcaaactgaaggagccttgtttgaagtgtgtggacctcgtgatccaagaattaattaacaccgtcaggcagtgtacttccaaactgagttcgtacccacggctgagggaagagacagaacgcatcgtcacaacctatatccgggaacgggaagggcgtacaaaagaccagattctactgttgatagacatcgaacagtcttacatcaacacaaaccatgaagactttattggatttgccaacgctcaacagcgctcaacgcaacttaataagaagagggcaattccaaaccaggtgatcaggcgcggttggttgacgattaataacatctctcttatgaaagggggaagtaaagagtactggttcgtgctgaccgccgaaagcctctcctggtataaagatgaggaagagaaggagaagaagtacatgctgccattagataatctcaaaattcgcgacgtcgaaaagggatttatgtctaataagcacgtgtttgcgattttcaatactgagcagcggaacgtgtataaagacctgcgccagatagagttggcctgcgattctcaggaagatgtcgattcatggaaggcttccttccttcgagcaggagtgtaccctgagaaagatcaggctgaaaatgaggacggggctcaagagaatactttctcaatggatccccaactcgagcgccaggttgagaccattcgaaacctggtcgatagctacgtggctatcatcaacaagtccatccgagacctgatgcctaagacaattatgcacctgatgattaataataccaaagctttcattcaccatgaactgttagcttacctctactcatcagctgaccagagttccttaatggaggaaagcgctgatcaagcacagagaagggacgatatgctaaggatgtatcatgcgctgaaagaggctctgaacatcataggcgatatcagtacatcaacggtctcaacgccagtcccaccgcctgtggatgatacatggctccaatctgctagctcccattctcccactcctcagagacgtcctgtgtcctccatacaccctcctggtaggcctcccgcagtgaggggtccgacacccggacctcctctcatccctgttcctgtcggcgctgcagcatccttttccgcgcctcctatcccttcaagacctggccctcagtccgtgttcgccaacagcgatttatttccggcaccgccacagattcctagtagaccagtgaggatcccccctggcatcccgcctggcgtgccatctcgaaggcctcctgctgccccatctagaccaaccataattaggccggcagaaccttcactcctcgactag

SEQ ID NO: 151271 - DNA, 2601 bp, Artificial Sequence
  derived and/or modified sequence
atgggcaacagaggcatggaggagctgatccccctggtgaacaagctgcaggacgccttcagcagcatcggccagagctgccacctggacctgccccagatcgccgtggtgggcggccagagcgccggcaagagcagcgtgctggagaacttcgtgggcagagacttcctgcccagaggcagcggcatcgtgaccagaagacccctgatcctgcagctgatcttcagcaagaccgagcacgccgagttcctgcactgcaagagcaagaagttcaccgacttcgacgaggtgagacaggagatcgaggccgagaccgacagagtgaccggcaccaacaagggcatcagccccgtgcccatcaacctgagagtgtacagcccccacgtgctgaacctgaccctgatcgacctgcccggcatcaccaaggtgcccgtgggcgaccagccccccgacatcgagtaccagatcaaggacatgatcctgcagttcatcagcagagagagcagcctgatcctggccgtgacccccgccaacatggacctggccaacagcgacgccctgaagctggccaaggaggtggacccccagggcctgagaaccatcggcgtgatcaccaagctggacctgatggacgagggcaccgacgccagagacgtgctggagaacaagctgctgcccctgagaagaggctacatcggcgtggtgaacagaagccagaaggacatcgagggcaagaaggacatcagagccgccctggccgccgagagaaagttcttcctgagccaccccgcctacagacacatggccgacagaatgggcaccccccacctgcagaagaccctgaaccagcagctgaccaaccacatcagagagagcctgcccgccctgagaagcaagctgcagagccagctgctgagcctggagaaggaggtggaggagtacaagaacttcagacccgacgaccccaccagaaagaccaaggccctgctgcagatggtgcagcagttcggcgtggacttcgagaagagaatcgagggcagcggcgaccaggtggacaccctggagctgagcggcggcgccagaatcaacagaatcttccacgagagattccccttcgagctggtgaagatggagttcgacgagaaggacctgagaagagagatcagctacgccatcaagaacatccacggcgtgagaaccggcctgttcacccccgacctggccttcgaggccatcgtgaagaagcaggtggtgaagctgaaggagccctgcctgaagtgcgtggacctggtgatccaggagctgatcaacaccgtgagacagtgcaccagcaagctgagcagctaccccagactgagagaggagaccgagagaatcgtgaccacctacatcagagagagagagggcagaaccaaggaccagatcctgctgctgatcgacatcgagcagagctacatcaacaccaaccacgaggacttcatcggcttcgccaacgcccagcagagaagcacccagctgaacaagaagagagccatccccaaccaggtgatcagaagaggctggctgaccatcaacaacatcagcctgatgaagggcggcagcaaggagtactggttcgtgctgaccgccgagagcctgagctggtacaaggacgaggaggagaaggagaagaagtacatgctgcccctggacaacctgaagatcagagacgtggagaagggcttcatgagcaacaagcacgtgttcgccatcttcaacaccgagcagagaaacgtgtacaaggacctgagacagatcgagctggcctgcgacagccaggaggacgtggacagctggaaggccagcttcctgagagccggcgtgtaccccgagaaggaccaggccgagaacgaggacggcgcccaggagaacaccttcagcatggacccccagctggagagacaggtggagaccatcagaaacctggtggacagctacgtggccatcatcaacaagagcatcagagacctgatgcccaagaccatcatgcacctgatgatcaacaacaccaaggccttcatccaccacgagctgctggcctacctgtacagcagcgccgaccagagcagcctgatggaggagagcgccgaccaggcccagagaagagacgacatgctgagaatgtaccacgccctgaaggaggccctgaacatcatcggcgacatcagcaccagcaccgtgagcacccccgtgcccccccccgtggacgacacctggctgcagagcgccagcagccacagccccaccccccagagaagacccgtgagcagcatccacccccccggcagaccccccgccgtgagaggccccacccccggcccccccctgatccccgtgcccgtgggcgccgccgccagcttcagcgccccccccatccccagcagacccggcccccagagcgtgttcgccaacagcgacctgttccccgcccccccccagatccccagcagacccgtgagaatcccccccggcatcccccccggcgtgcccagcagaagaccccccgccgcccccagcagacccaccatcatcagacccgccgagcccagcctgctggactag

SEQ ID NO: 151272 - DNA, 3654 bp, Artificial Sequence
  derived and/or modified sequence
gaggtcgctcgggtcgggtgtcgcctgagaaccggatgaggcggcgaccgtgaggccgagccgggagcgggcgtcttgccgaggcccgggcgggcggggagcaacggctacagacgccgcggggccaggtcgttgagggtcggcggcgggcgaggagcgcagggcgctcgggccgggggccgccggcgccatgggcaaccgcgggatggaagagctgatcccgctggtcaacaaactgcaggacgccttcagctccatcggccagagctgccacctggacctgccgcagatcgctgtagtgggcggccagagcgccggcaagagctcggtgctggagaacttcgtgggccgggacttccttccccgcggttcaggaatcgtcacccggcggcctctcattctgcagctcatcttctcaaaaacagaacatgccgagtttttgcactgcaagtccaaaaagtttacagactttgatgaagtccggcaggagattgaagcagagaccgacagggtcacggggaccaacaaaggcatctccccagtgcccatcaaccttcgagtctactcgccacacgtgttgaacttgaccctcatcgacctcccgggtatcaccaaggtgcctgtgggcgaccagcctccagacatcgagtaccagatcaaggacatgatcctgcagttcatcagccgggagagcagcctcattctggctgtcacgcccgccaacatggacctggccaactccgacgccctcaagctggccaaggaagtcgatccccaaggcctacggaccatcggtgtcatcaccaagcttgacctgatggacgagggcaccgacgccagggacgtcttggagaacaagttgctcccgttgagaagaggctacattggcgtggtgaaccgcagccagaaggatattgagggcaagaaggacatccgtgcagcactggcagctgagaggaagttcttcctctcccacccggcctaccggcacatggccgaccgcatgggcacgccacatctgcagaagacgctgaatcagcaactgaccaaccacatccgggagtcgctgccggccctacgtagcaaactacagagccagctgctgtccctggagaaggaggtggaggagtacaagaactttcggcccgacgaccccacccgcaaaaccaaagccctgctgcagatggtccagcagtttggggtggattttgagaagaggatcgagggctcaggagatcaggtggacactctggagctctccgggggcgcccgaatcaatcgcatcttccacgagcggttcccatttgagctggtgaagatggagtttgacgagaaggacttacgacgggagatcagctatgccattaagaacatccatggagtcaggaccgggcttttcaccccggacttggcattcgaggccattgtgaaaaagcaggtcgtcaagctgaaagagccctgtctgaaatgtgtcgacctggttatccaggagctaatcaatacagttaggcagtgtaccagtaagctcagttcctacccccggttgcgagaggagacagagcgaatcgtcaccacttacatccgggaacgggaggggagaacgaaggaccagattcttctgctgatcgacattgagcagtcctacatcaacacgaaccatgaggacttcatcgggtttgccaatgcccagcagaggagcacgcagctgaacaagaagagagccatccccaatcaggtgatccgcaggggctggctgaccatcaacaacatcagcctgatgaaaggcggctccaaggagtactggtttgtgctgactgccgagtcactgtcctggtacaaggatgaggaggagaaagagaagaagtacatgctgcctctggacaacctcaagatccgtgatgtggagaagggcttcatgtccaacaagcacgtcttcgccatcttcaacacggagcagagaaacgtctacaaggacctgcggcagatcgagctggcctgtgactcccaggaagacgtggacagctggaaggcctcgttcctccgagctggcgtctaccccgagaaggaccaggcagaaaacgaggatggggcccaggagaacaccttctccatggacccccaactggagcggcaggtggagaccattcgcaacctggtggactcatacgtggccatcatcaacaagtccatccgcgacctcatgccaaagaccatcatgcacctcatgatcaacaatacgaaggccttcatccaccacgagctgctggcctacctatactcctcggcagaccagagcagcctcatggaggagtcggctgaccaggcacagcggcgggacgacatgctgcgcatgtaccatgccctcaaggaggcgctcaacatcatcggtgacatcagcaccagcactgtgtccacgcctgtacccccgcctgtcgatgacacctggctccagagcgccagcagccacagccccactccacagcgccgaccggtgtccagcatacacccccctggccggcccccagcagtgaggggccccactccagggccccccctgattcctgttcccgtgggggcagcagcctccttctcggcgcccccaatcccatcccggcctggaccccagagcgtgtttgccaacagtgacctcttcccagccccgcctcagatcccatctcggccagttcggatccccccagggattcccccaggagtgcccagcagaagaccccctgctgcgcccagccggcccaccattatccgcccagccgagccatccctgctcgactaggcctcgaggggggcgtgctctcgggggggcctcacgcacccgcggcgcaggagcttcagtggtctggggccctccgccgcccctatgctgggaccaggctcccagtgggcagccctggcctcttccttaacgctggccccggtccagggccggcccctgtgcctggctggacaccgcactgcgcaaaggggccctggagctccaggcagggggcgctggggtgttgcactttgggggatggagtctcagggtggcagaggggggaccagaacccttgacaccatcctgaatgaggggtccagcctgggggggactctaccaaggtcttcttgggctgggaaagcccatgtagggcaggccttctataagtgcgggcaccaagggcgcctacatccccaggccttgctggggtgcaggggtatatcaacttcccattagcaggagctccccagcggcaagcctggcccagtgggctcggtagtgcccagctggcaggcctgaggtgtacatagtccttcccggccatattaaccacacagcctgagcctggcccagcctcggctgccagaggtgcctttgctaggcccggagccgttggcccgggccggccttgccctattcctctcctcctcctcctcctgggtcccccagggtggctgggcttgggctatgtgggtggtggtggcggggggtcttgggggcctctcagctcccgcccatgcctccctgatgggtgggcccagggcggcctctctctgaggagacctcacccactcctcgctcagtttgaccactgtaagtgcctgcactctgtattctattaataaactaaaataaagggaagacgctgctggtggctgctg

SEQ ID NO: 151273 - protein, 1830 aa, Artificial Sequence
  derived and/or modified sequence
MAPWRKADKERHGVAIYNFQGSGAPQLSLQIGDVVRIQETCGDWYRGYLIKHKMLQGIFPKSFIHIKEVTVEKRRNTENIIPAEIPLAQEVTTTLWEWGSIWKQLYVASKKERFLQVQSMMYDLMEWRSQLLSGTLPKDELKELKQKVTSKIDYGNKILELDLIVRDEDGNILDPDNTSVISLFHAHEEATDKITERIKEEMSKDQPDYAMYSRISSSPTHSLYVFVRNFVCRIGEDAELFMSLYDPNKQTVISENYLVRWGSRGFPKEIEMLNNLKVVFTDLGNKDLNRDKIYLICQIVRVGKMDLKDTGAKKCTQGLRRPFGVAVMDITDIIKGKAESDEEKQHFIPFHPVTAENDFLHSLLGKVIASKGDSGGQGLWVTMKMLVGDIIQIRKDYPHLVDRTTVVARKLGFPEIIMPGDVRNDIYITLLQGDFDKYNKTTQRNVEVIMCVCAEDGKTLPNAICVGAGDKPMNEYRSVVYYQVKQPRWMETVKVAVPIEDMQRIHLRFMFRHRSSLESKDKGEKNFAMSYVKLMKEDGTTLHDGFHDLVVLKGDSKKMEDASAYLTLPSYRHHVENKGATLSRSSSSVGGLSVSSRDVFSISTLVCSTKLTQNVGLLGLLKWRMKPQLLQENLEKLKIVDGEEVVKFLQDTLDALFNIMMEHSQSDEYDILVFDALIYIIGLIADRKFQHFNTVLEAYIQQHFSATLAYKKLMTVLKTYLDTSSRGEQCEPILRTLKALEYVFKFIVRSRTLFSQLYEGKEQMEFEESMRRLFESINNLMKSQYKTTILLQVAALKYIPSVLHDVEMVFDAKLLSQLLYEFYTCIPPVKLQKQKVQSMNEIVQSNLFKKQECRDILLPVITKELKELLEQKDDMQHQVLERKYCVELLNSILEVLSYQDAAFTYHHIQEIMVQLLRTVNRTVITMGRDHILISHFVACMTAILNQMGDQHYSFYIETFQTSSELVDFLMETFIMFKDLIGKNVYPGDWMAMSMVQNRVFLRAINKFAETMNQKFLEHTNFEFQLWNNYFHLAVAFITQDSLQLEQFSHAKYNKILNKYGDMRRLIGFSIRDMWYKLGQNKICFIPGMVGPILEMTLIPEAELRKATIPIFFDMMLCEYQRSGDFKKFENEIILKLDHEVEGGRGDEQYMQLLESILMECAAEHPTIAKSVENFVNLVKGLLEKLLDYRGVMTDESKDNRMSCTVNLLNFYKDNNREEMYIRYLYKLRDLHLDCDNYTEAAYTLLLHTWLLKWSDEQCASQVMQTGQQHPQTHRQLKETLYETIIGYFDKGKMWEEAISLCKELAEQYEMEIFDYELLSQNLIQQAKFYESIMKILRPKPDYFAVGYYGQGFPSFLRNKVFIYRGKEYERREDFQMQLMTQFPNAEKMNTTSAPGDDVKNAPGQYIQCFTVQPVLDEHPRFKNKPVPDQIINFYKSNYVQRFHYSRPVRRGTVDPENEFASMWIERTSFVTAYKLPGILRWFEVVHMSQTTISPLENAIETMSTANEKILMMINQYQSDETLPINPLSMLLNGIVDPAVMGGFAKYEKAFFTEEYVRDHPEDQDKLTHLKDLIAWQIPFLGAGIKIHEKRVSDNLRPFHDRMEECFKNLKMKVEKEYGVREMPDFDDRRVGRPRSMLRSYRQMSIISLASMNSDCSTPSKPTSESFDLELASPKTPRVEQEEPISPGSTLPEVKLRRSKKRTKRSSVVFADEKAAAESDLKRLSRKHEFMSDTNLSEHAAIPLKASVLSQMSFASQSMPTIPALALSVAGIPGLDEANTSPRLSQTFLQLSDGDKKTLTRKKVNQFFKTMLASKSAEEGKQIPDSLSTDL

SEQ ID NO: 151274 - protein, 891 aa, Artificial Sequence
  derived and/or modified sequence
MTAILNQMGDQHYSFYIETFQTSSELVDFLMETFIMFKDLIGKNVYPGDWMAMSMVQNRVFLRAINKFAETMNQKFLEHTNFEFQLWNNYFHLAVAFITQDSLQLEQFSHAKYNKILNKYGDMRRLIGFSIRDMWYKLGQNKICFIPGMVGPILEMTLIPEAELRKATIPIFFDMMLCEYQRSGDFKKFENEIILKLDHEVEGGRGDEQYMQLLESILMECAAEHPTIAKSVENFVNLVKGLLEKLLDYRGVMTDESKDNRMSCTVNLLNFYKDNNREEMYIRYLYKLRDLHLDCDNYTEAAYTLLLHTWLLKWSDEQCASQVMQTGQQHPQTHRQLKETLYETIIGYFDKGKMWEEAISLCKELAEQYEMEIFDYELLSQNLIQQAKFYESIMKILRPKPDYFAVGYYGQGFPSFLRNKVFIYRGKEYERREDFQMQLMTQFPNAEKMNTTSAPGDDVKNAPGQYIQCFTVQPVLDEHPRFKNKPVPDQIINFYKSNYVQRFHYSRPVRRGTVDPENEFASMWIERTSFVTAYKLPGILRWFEVVHMSQTTISPLENAIETMSTANEKILMMINQYQSDETLPINPLSMLLNGIVDPAVMGGFAKYEKAFFTEEYVRDHPEDQDKLTHLKDLIAWQIPFLGAGIKIHEKRVSDNLRPFHDRMEECFKNLKMKVEKEYGVREMPDFDDRRVGRPRSMLRSYRQMSIISLASMNSDCSTPSKPTSESFDLELASPKTPRVEQEEPISPGSTLPEVKLRRSKKRTKRSSVVFADEKAAAESDLKRLSRKHEFMSDTNLSEHAAIPLKASVLSQMSFASQSMPTIPALALSVAGIPGLDEANTSPRLSQTFLQLSDGDKKTLTRKKVNQFFKTMLASKSAEEGKQIPDSLSTDL

SEQ ID NO: 151275 - DNA, 5493 bp, Artificial Sequence
  derived and/or modified sequence
atggcgccttggcgcaaagctgacaaggagaggcatggagttgccatctacaactttcaagggtcaggcgctccacagctgagtttgcagatcggagacgtcgtccgaatccaggaaacctgtggtgactggtatcgcggttatctgatcaaacataaaatgctgcagggaatcttcccgaaatcctttatacacattaaggaggtaaccgttgaaaaacgtcgcaacactgagaatattattcccgcagaaatcccactggcccaagaagtgaccaccacactctgggagtgggggtcaatatggaagcaactgtacgttgcctcgaagaaggaaaggttcctgcaagttcaatctatgatgtacgatctgatggagtggcgttctcaactgttgtcgggcaccctcccaaaggacgaactcaaggaactcaaacagaaggtgacgagcaaaatagattatggcaacaagatcctggaactagacttgatcgtaagagacgaagatgggaacatcctcgatccggacaacacctccgtaatatccttgtttcacgctcatgaggaggctacagataagatcactgaacggataaaggaagagatgagcaaggaccagccggattatgcgatgtattccaggatatcttctagcccaacccacagtctatacgtgttcgtgagaaattttgtgtgccgtattggggaagatgcagagctttttatgtcgctctacgatcccaacaagcagaccgttatttccgagaattacctggtgagatggggcagtagaggttttccaaaagaaatcgaaatgttaaataacctgaaagtggtgttcaccgatctgggtaacaaggacctgaatcgggacaagatttaccttatttgccagattgtgcgtgtgggcaaaatggatttgaaggacaccggcgcaaaaaaatgcacacaaggactgaggcgtcccttcggcgtggcagtgatggacatcaccgacattataaagggtaaagcggaaagcgatgaagagaagcagcactttattccttttcacccggttactgcggaaaacgacttccttcacagtcttctgggaaaggtaatcgcctcaaagggggactccggcggccaaggattgtgggttactatgaagatgctggtcggagacattattcaaatcagaaaggactatcctcacctcgtggacaggacaacagttgtggcacgcaagttgggctttcccgaaatcattatgcccggggacgtgaggaacgacatctacatcacattgctgcagggagattttgacaaatacaacaagacaacccagcgcaatgttgaggtcattatgtgtgtgtgcgcagaggacggtaaaaccctgcctaacgctatttgtgttggagctggagataagcctatgaacgagtacagaagcgtcgtgtattatcaggttaagcagccccgctggatggagacagtgaaggtcgcagtcccaattgaggatatgcagcgtatacatcttcgcttcatgtttaggcatagatcaagtttagagagcaaggacaagggggagaagaacttcgcgatgtcatacgtgaagctgatgaaagaggatggcacaaccctacatgatggatttcacgacctggttgtgctgaagggtgacagtaaaaaaatggaagatgcatccgcataccttacactgcccagctacaggcatcacgtggaaaacaagggtgcaaccctctcaagatcgtcttctagcgtaggtgggctgtctgtttcctcaagagacgtgtttagcatatcaactctggtatgctccaccaaactcacgcagaatgtggggctgctgggccttcttaaatggcggatgaagcctcagttattacaggagaatctggaaaagttaaagatcgtggatggagaggaggtggtgaagttcctgcaggatacccttgatgctctgttcaatattatgatggaacactcacagtccgacgagtacgacatcctggtgtttgacgcactcatttacataatcggcctgattgctgatcggaaatttcagcacttcaacactgtcctcgaggcctatatacaacaacactttagcgccacactggcctataagaaattaatgaccgtgttgaagacttatctagataccagttctcgtggggaacagtgtgaacctattctgcgcaccctcaaggccctagagtatgtgttcaagttcatagtgcgatctcgtacactttttagccagttgtacgagggaaaagagcagatggagttcgaggagtccatgcggcggcttttcgaaagtatcaataatctgatgaagagccaatataagactaccatcttactccaggtcgctgccctgaagtacattccctcagtgctgcacgatgtggagatggtgtttgatgctaagctcttatcccaactcctgtacgaattttacacgtgtatacccccagtcaaactgcagaagcagaaggtgcaaagtatgaatgaaatcgtccagagcaatctgtttaaaaaacaagaatgtagggatattttgctgccagttattacgaaagagctgaaggaactgcttgagcaaaaggacgacatgcagcaccaggtgctagaaaggaagtactgcgtggaactcctgaattctattctggaggtcctctcctaccaagatgccgcctttacctatcaccatattcaagaaataatggttcaactcttgagaacagtgaataggactgtgattactatgggccgggaccatattctcattagtcactttgtggcctgtatgacagctatcctgaaccagatgggcgatcagcattacagcttttacatcgagactttccagacaagcagtgaactggtggacttcctcatggagacctttatcatgttcaaggatctgattggtaagaacgtgtaccctggtgattggatggcgatgagtatggttcagaatcgggtgtttctgcgggccatcaacaaattcgctgagaccatgaatcagaagtttctagagcatacaaacttcgaattccaattgtggaacaactatttccatttggcagtcgcctttatcacccaagattcactgcagttggaacagttcagccacgcaaagtataacaagatcctgaacaaatacggcgatatgcgcaggcttattggatttagtatccgcgacatgtggtataagctcggccaaaacaagatctgttttatacccgggatggtgggcccgatcctcgaaatgaccctcatccccgaggcagaactccggaaggcaaccatcccgatcttcttcgatatgatgctttgcgaatatcagcgctcaggagacttcaaaaagttcgaaaacgaaattattttgaaattggaccatgaggtagagggaggcaggggcgacgaacaatacatgcagctgctcgagagcatcttgatggaatgtgccgcagagcacccaaccatcgcaaaatctgttgagaattttgtgaacctagtcaagggactcctggagaagctgttggactataggggagttatgacggatgaatctaaagacaaccgaatgagctgtaccgtgaatcttttgaacttttataaagataataatcgggaggaaatgtacatcaggtacctctataagctcagagatctccacctggactgtgataattataccgaagccgcctacacgctgcttctgcatacctggctacttaagtggagcgatgaacagtgcgcaagccaggtcatgcaaacaggacagcaacacccgcagactcatcgtcagctgaaggagacactgtacgagactattatagggtatttcgacaagggaaagatgtgggaagaggccatcagcctgtgcaaagagctcgccgagcagtacgaaatggagatttttgactatgagctgctgtcacagaacctcatacagcaggccaaattctacgagtctataatgaagatcctcagacccaaacccgattactttgccgtgggctactacggccagggcttcccctctttcctgagaaacaaagttttcatatatcgcggcaaggagtatgagcgaagggaggacttccagatgcagctgatgacccagttccctaatgctgagaaaatgaacaccaccagtgcgcccggagacgatgtgaaaaacgccccaggacagtacatccagtgttttacggtccaaccggtcctagatgaacatccgaggtttaagaataagcccgtgcccgatcagatcatcaacttttacaaatcgaactatgtgcagcgattccattattcgaggcccgtccggagggggaccgtagaccccgaaaatgagtttgccagtatgtggatagaaaggacttccttcgtgacggcgtacaagctgccaggcatcctccgctggttcgaggttgttcacatgtcgcagacaacgatctctccgctggaaaatgccattgagacgatgtccaccgctaacgaaaagatactgatgatgatcaaccagtatcagagcgatgaaaccctgcccattaaccctctctcaatgctcttaaatggtatcgtggaccccgccgttatggggggcttcgcgaaatacgaaaaggctttttttaccgaagaatatgtgcgagatcaccctgaagatcaagacaaacttactcacttaaaggatcttatcgcatggcaaatcccattcctgggcgctggcattaagattcacgagaaacgggtttcggacaatcttaggccctttcatgatcgaatggaggagtgcttcaagaatctgaagatgaaggttgagaaggagtacggggtaagagaaatgccggactttgatgataggagagtcggcaggccaagaagcatgctcagatcctaccgccagatgagcatcatatcgctcgctagtatgaacagcgactgctccactcccagcaagcctacaagcgagtccttcgaccttgaactggcatctccaaaaaccccacgcgtagaacaagaagaaccaatatctcccggctctacattgcccgaagtgaaacttagacggtctaaaaagaggacgaagcgctctagcgtggttttcgctgatgaaaaggcagctgccgaatcagatctgaaacggctatcacggaagcacgagttcatgtcagataccaacctttccgaacacgccgctatccctctgaaagctagcgtattgagccaaatgtcttttgcatcccagagcatgcctacaattcctgccttggcattatctgttgcaggcattcctggcttagatgaggccaacacatccccacggctaagtcagacttttttgcagctgtctgacggagataagaagaccttgacgagaaagaaggtcaatcagtttttcaagaccatgctcgcctctaagagcgcagaagaaggtaaacagattcccgactccctgagcaccgacctgtag

SEQ ID NO: 151276 - DNA, 2676 bp, Artificial Sequence
  derived and/or modified sequence
atgaccgctatcctaaaccagatgggcgatcagcactactcattctatattgaaacatttcaaacttcaagcgaattagttgattttttgatggagaccttcataatgttcaaggatctgatcgggaaaaacgtgtaccccggcgactggatggccatgagcatggtgcaaaaccgggtgttcttgagagccataaataaatttgccgagacaatgaaccagaagtttctggagcacaccaactttgagttccaattatggaacaattacttccacctggccgtggcctttatcacacaggatagcctgcagttggagcaattttcacacgctaaatacaacaagatcttaaataaatacggagacatgcgacgcttgattgggttctcgattcgcgatatgtggtacaaactggggcagaataagatctgctttatcccgggaatggtgggccccattctcgagatgacactgattcccgaggctgagctgcgtaaggctactatccctatattctttgacatgatgctgtgcgaatatcagcgatctggcgactttaaaaaatttgagaatgaaattattctgaagctagaccatgaagtggaaggggggaggggcgatgagcagtacatgcaactattagagagcattttgatggagtgcgccgccgagcatccgacaatcgcaaaatccgtggaaaattttgtgaatctggtgaagggtttgcttgagaagctgctggactatcgtggtgtcatgactgatgaatcgaaggataaccgtatgagttgtactgtgaatctgctcaatttctataaggacaacaaccgtgaggagatgtacatccggtacctgtacaaactgagggatctacatctcgattgtgataactatactgaggctgcttacacgcttcttttgcacacttggttgcttaagtggtccgacgagcagtgtgcctcccaggtaatgcaaaccggacagcagcatccgcagacccatcggcagcttaaggagactctgtacgaaaccattatcgggtatttcgataaaggtaagatgtgggaggaggccattagcctttgtaaggaactggccgagcagtatgaaatggaaattttcgactacgagttgttgtcccagaatctgatccaacaagcgaagttctacgagagcataatgaaaattctgcgaccgaagcccgactattttgcggtgggctattacggacagggatttcccagttttttgcgaaacaaggtctttatctaccgagggaaggagtatgaacgaagagaagacttccagatgcagctgatgacccagttcccaaatgccgagaagatgaacacgacttcagcccctggagatgacgtgaaaaatgcgcccgggcagtacatccagtgtttcaccgtgcagcctgtgcttgatgagcatccccgattcaagaacaagcccgtacctgaccagatcatcaacttctataagagcaactacgtacagaggttccattattctaggccagtgcgtagggggacagtggaccccgagaacgagttcgccagcatgtggatcgaacgtacttcctttgtcaccgcatacaaactaccaggcattttgcgttggttcgaagtcgtccatatgtcccagactacgatctcacccttggagaacgccattgaaacgatgtcgaccgccaacgaaaaaatcctgatgatgattaatcaataccagtccgatgagacgctccccatcaaccctctgtccatgctactaaatgggatcgtcgacccagccgtcatgggtgggttcgcaaaatatgaaaaagcctttttcacagaggagtacgtgcgcgatcaccccgaggaccaggacaaattaactcatctcaaagatctaattgcttggcaaataccttttctgggcgcagggattaaaatacacgaaaagagagtgtctgacaacttgagaccctttcatgatcggatggaagaatgcttcaagaacttgaagatgaaggtggaaaaggaatatggggttagggaaatgcccgacttcgatgataggcgggtgggccgcccacgctctatgctgagatcgtatcgtcagatgagcattatcagtctggcctcaatgaactcagattgctctacccctagtaaacccacatctgagtctttcgacttggagcttgccagccccaaaaccccgagggtagagcaggaagagcctatctcaccaggttctactctgcctgaggtaaagttacgcagatcaaagaagcggaccaagcgatccagcgtggtcttcgctgacgagaaagcagccgcagagagcgacctgaaacgcttgagcagaaagcatgagtttatgtctgataccaacctttcagagcatgcagcgatcccactgaaagccagtgttttgagtcaaatgagcttcgccagtcaatccatgcccaccatccccgcactagcgctgagcgtggccggtatcccaggactggatgaggccaacacatccccacggctgagccagaccttcttacagctgagcgacggggacaaaaaaactctcactcgaaagaaagttaaccagtttttcaagaccatgctcgcttcgaagtctgccgaggagggcaagcagatccctgacagtttatccacggacctctag

SEQ ID NO: 151277 - DNA, 5493 bp, Artificial Sequence
  derived and/or modified sequence
atggccccctggaggaaggctgacaaggagagacatggagtggccatctacaacttccagggcagcggggccccccagctgagcctgcagattggagatgtggtgcgcatccaggagacctgtggggactggtaccggggctacctgatcaagcacaagatgctgcagggcatcttccccaagagcttcatccacatcaaggaggtgacagtggagaagagaagaaacacagagaacatcatcccagctgagatccccctggcccaggaggtgaccaccaccctgtgggagtggggcagcatctggaagcagctgtatgtggccagcaagaaggagcgcttcctgcaggtgcagagcatgatgtatgacctgatggagtggaggagccagctgctgagcggcaccctgcccaaggatgagctgaaggagctgaagcagaaggtgaccagcaagattgattatggcaacaagatcctggagctggacctgattgtgagagatgaagatggcaacatcctggaccctgacaacaccagcgtcatcagcctcttccacgcccacgaggaggccacagacaagatcacagagcgcatcaaggaggagatgagcaaggaccagcctgactatgccatgtacagccgcatcagcagcagccccacccacagcctgtatgtgtttgtgaggaactttgtgtgccgcatcggggaggatgctgagctgttcatgagcctgtatgaccccaacaagcagaccgtcatcagcgagaactacctggtgcgctggggcagccggggcttccccaaggagattgagatgctgaacaacctgaaggtggtgttcacagacctgggcaacaaggacctgaacagagacaagatctacctgatctgccagatcgtgcgggtgggcaagatggacctgaaggacaccggggccaagaagtgcacccagggcctgcggcggccctttggagtggccgtgatggacatcacagacatcatcaagggcaaggccgagagtgatgaggagaagcagcacttcatccccttccaccctgtgacagcagaaaatgacttcctgcacagcctgctgggcaaggtgattgccagcaaaggagacagcggcggccagggcctgtgggtgaccatgaagatgctggtgggggacatcatccagatcaggaaggactacccccacctggtggacaggaccaccgtggtggccaggaagctgggcttccctgagatcatcatgcctggagatgtgagaaatgacatctacatcaccctgctgcagggcgactttgacaagtacaacaagaccacccagagaaatgtggaggtgatcatgtgtgtgtgtgctgaagatggcaagaccctgcccaatgccatctgtgtgggcgctggggacaagcccatgaatgagtacagatctgtggtgtactaccaggtgaagcagccccgctggatggagaccgtgaaggtggccgtgcccatcgaggacatgcagaggatccacctgcgcttcatgttccgccacaggagcagcctggagagcaaggacaagggggagaagaactttgccatgtcctatgtgaagctgatgaaggaggatggcaccaccctgcatgatggcttccatgacctggtggtgctgaagggggacagcaagaagatggaggatgccagcgcctacctgaccctgcccagctaccgccaccacgtggagaacaagggggccaccctgagccgcagcagcagctctgtgggcggcctgtctgtgagcagcagagatgtgttcagcatcagcaccctggtgtgcagcaccaagctgacccagaatgtgggcctgctgggcctgctgaagtggaggatgaagccccagctgctgcaggagaacctggagaagctgaagatcgtggatggagaggaggtggtgaagttcctgcaggacaccctggatgccctcttcaacatcatgatggagcacagccagagtgatgaatatgacatcctggtgtttgatgccctgatctacatcatcggcctgattgctgacaggaagttccagcacttcaacacagtgctggaggcctacatccagcagcacttcagcgccaccctggcctacaagaagctgatgacagtgctgaagacctacctggacaccagcagcagaggagagcagtgtgagcccatcctgcggaccctgaaggccctggagtatgtgttcaagttcatcgtgcgcagcaggaccctcttcagccagctgtatgagggcaaggagcagatggagtttgaggagagcatgagaagactctttgagagcatcaacaacctgatgaagagccagtacaagaccaccatcctgctgcaggtggccgccctgaagtacatccccagcgtgctgcatgatgtggagatggtgtttgatgccaagctgctgagccagctgctgtatgagttctacacctgcatcccccctgtgaagctgcagaagcagaaggtgcagagcatgaatgagatcgtgcagagcaacctcttcaagaagcaggagtgccgggacatcctgctgcctgtgatcaccaaggagctgaaggagctgctggagcagaaggatgacatgcagcaccaggtgctggagaggaagtactgtgtggagctgctgaacagcatcctggaggtgctgagctaccaggatgctgccttcacctaccaccacatccaggagatcatggtgcagctgctgaggacagtgaacagaactgtcatcaccatgggccgggaccacatcctgatcagccactttgtggcctgcatgacagccatcctgaaccagatgggagaccagcactacagcttctacatcgagaccttccagaccagcagcgagctggtggacttcctgatggagaccttcatcatgttcaaggacctgattggcaagaatgtgtacccaggggactggatggccatgtccatggtgcagaacagagtcttcctgcgggccatcaacaagtttgctgagaccatgaaccagaagttcctggagcacaccaactttgagttccagctgtggaacaactacttccacctggccgtggccttcatcacccaggacagcctgcagctggagcagttcagccacgccaagtacaacaagatcctgaacaagtatggagacatgagaagactcatcggcttcagcatccgggacatgtggtacaagctgggccagaacaagatctgcttcatccctggcatggtgggccccatcctggagatgaccctcatccctgaggccgagctgaggaaggccaccatccccatcttctttgacatgatgctgtgtgagtaccagaggtctggggacttcaagaagtttgaaaatgagatcatcctgaagctggaccacgaggtggagggcggcagaggagatgagcagtacatgcagctgctggagagcatcctgatggagtgtgccgctgagcaccccaccatcgccaagtctgtggagaactttgtgaacctggtgaagggcctgctggagaagctgctggactaccggggcgtgatgacagatgagagcaaggacaacaggatgagctgcaccgtgaacctgctgaacttctacaaggacaacaaccgggaggagatgtacatccgctacctgtacaagctgcgggacctgcacctggactgtgacaactacacagaggccgcctacaccctgctgctgcacacctggctgctgaagtggagcgatgagcagtgtgccagccaggtgatgcagacaggccagcagcacccccagacccaccggcagctgaaggagaccctgtatgagaccatcatcggctactttgacaagggcaagatgtgggaggaggccatcagcctgtgcaaggagctggccgagcagtatgagatggagatctttgattatgagctgctgagccagaacctgatccagcaggccaagttctatgagagcatcatgaagatcctgcggcccaagccagactactttgctgtgggctactacggccagggcttccccagcttcctgaggaacaaggtgttcatctaccggggcaaggagtatgaaagaagagaggacttccagatgcagctgatgacccagttccccaatgctgagaagatgaacaccaccagcgcccctggagatgatgtgaagaatgcccctggccagtacatccagtgcttcaccgtgcagcctgtgctggatgagcacccccgcttcaagaacaagcctgtgcctgaccagatcatcaacttctacaagagcaactacgtgcagcgcttccactacagcaggcctgtgagaagaggcaccgtggaccctgaaaatgaatttgcctccatgtggattgaaagaaccagctttgtgacagcctacaagctgcccggcatcctgcgctggtttgaggtggtgcacatgagccagaccaccatcagccccctggagaatgccatcgagaccatgagcacagccaatgagaagatcctgatgatgatcaaccagtaccagagtgatgagaccctgcccatcaaccccctgtccatgctgctgaatggcatcgtggaccctgctgtgatgggcggctttgccaagtatgagaaggccttcttcacagaggagtatgtgcgggaccaccctgaggaccaggacaagctgacccacctgaaggacctgattgcctggcagatccccttcctgggcgccggcatcaagatccacgagaagagggtgtctgacaacctgcggcccttccatgacaggatggaggagtgcttcaagaacctgaagatgaaggtggagaaggagtatggagtgcgggagatgccagactttgatgaccggcgggtgggccggcccaggtccatgctgcggagctaccggcagatgagcatcatcagcctggcctccatgaacagcgactgcagcacccccagcaagcccaccagcgagagctttgacctggagctggccagccccaagaccccccgggtggagcaggaggagcccatcagccctggcagcaccctgcctgaggtgaagctgcggcgcagcaagaagaggaccaagaggagctctgtggtgtttgctgatgagaaggctgctgctgagagtgacctgaagaggctgagcaggaagcatgagttcatgtctgacaccaacctgtctgagcacgccgccatccccctgaaggcctctgtgctgagccagatgagctttgccagccagagcatgcccaccatcccagccctggccctgtctgtggccggcatccctggcctggatgaggccaacaccagcccccggctgagccagaccttcctgcagctgagtgatggagacaagaagaccctgaccaggaagaaggtgaaccagttcttcaagaccatgctggccagcaagtctgctgaggagggcaagcagatcccagacagcctgagcacagacctgtag

SEQ ID NO: 151278 - DNA, 2676 bp, Artificial Sequence
  derived and/or modified sequence
atgacagccatcctgaaccagatgggagaccagcactacagcttctacatcgagaccttccagaccagcagcgagctggtggacttcctgatggagaccttcatcatgttcaaggacctgattggcaagaatgtgtacccaggggactggatggccatgtccatggtgcagaacagagtcttcctgcgggccatcaacaagtttgctgagaccatgaaccagaagttcctggagcacaccaactttgagttccagctgtggaacaactacttccacctggccgtggccttcatcacccaggacagcctgcagctggagcagttcagccacgccaagtacaacaagatcctgaacaagtacggggacatgaggcggctgattggcttcagcatccgggacatgtggtacaagctgggccagaacaagatctgcttcatccctggcatggtgggccccatcctggagatgaccctcatccctgaggccgagctgaggaaggccaccatccccatcttctttgacatgatgctgtgtgagtaccagaggtctggggacttcaagaagtttgaaaatgagatcatcctgaagctggaccacgaggtggagggcggcagaggagatgagcagtacatgcagctgctggagagcatcctgatggagtgtgccgctgagcaccccaccatcgccaagtctgtggagaactttgtgaacctggtgaagggcctgctggagaagctgctggactacagaggagtgatgacagatgagagcaaggacaacaggatgagctgcaccgtgaacctgctgaacttctacaaggacaacaaccgggaggagatgtacatccgctacctgtacaagctgcgggacctgcacctggactgtgacaactacacagaagctgcctacaccctgctgctgcacacctggctgctgaagtggagcgatgagcagtgtgccagccaggtgatgcagacaggccagcagcacccccagacccaccggcagctgaaggagaccctgtatgagaccatcatcggctactttgataaaggcaagatgtgggaggaggccatcagcctgtgcaaggagctggccgagcagtatgagatggagatctttgattatgagctgctgagccagaacctgatccagcaggccaagttctatgagagcatcatgaagatcctgcggcccaagccagactactttgctgtgggctactacggccagggcttccccagcttcctgaggaacaaggtgttcatctaccggggcaaggagtatgaaagaagagaggacttccagatgcagctgatgacccagttccccaatgctgagaagatgaacaccaccagcgcccctggagatgatgtgaagaatgcccctggccagtacatccagtgcttcaccgtgcagcctgtgctggatgagcacccccgcttcaagaacaagcctgtgcctgaccagatcatcaacttctacaagagcaactacgtgcagcgcttccactacagcaggcctgtgcggcggggcaccgtggaccctgaaaatgaatttgcctccatgtggattgaaagaaccagctttgtgacagcctacaagctgcccggcatcctgcgctggtttgaggtggtgcacatgagccagaccaccatcagccccctggagaatgccatcgagaccatgagcacagccaatgagaagatcctgatgatgatcaaccagtaccagagtgatgagaccctgcccatcaaccccctgtccatgctgctgaatggaattgtggaccctgctgtgatgggcggctttgccaagtatgagaaggccttcttcacagaggagtatgtgcgggaccaccctgaggaccaggacaagctgacccacctgaaggacctgattgcctggcagatccccttcctgggcgccggcatcaagatccacgagaagagggtgtctgacaacctgcggcccttccatgacaggatggaggagtgcttcaagaacctgaagatgaaggtggagaaggagtatggagtgcgggagatgccagactttgatgacagaagagtgggccggcccaggtccatgctgcggagctaccggcagatgagcatcatcagcctggcctccatgaacagcgactgcagcacccccagcaagcccaccagcgagagctttgacctggagctggccagccccaagaccccccgggtggagcaggaggagcccatcagccctggcagcaccctgcctgaggtgaagctgcggcgcagcaagaagaggaccaagaggagctctgtggtgtttgctgatgagaaggctgctgctgagagtgacctgaagaggctgagcaggaagcatgagttcatgtctgacaccaacctgtctgaacatgctgccatccccctgaaggcctctgtgctgagccagatgagctttgccagccagagcatgcccaccatcccagccctggccctgtctgtggccggcatccctggcctggatgaggccaacaccagcccccggctgagccagaccttcctgcagctgagtgatggagacaagaagaccctgaccaggaagaaggtgaaccagttcttcaagaccatgctggccagcaagtctgctgaggagggcaagcagatcccagacagcctgagcacagacctgtag

SEQ ID NO: 151279 - DNA, 5493 bp, Artificial Sequence
  derived and/or modified sequence
atggccccctggcggaaggccgacaaggagcggcacggcgtggccatttacaactttcagggcagcggcgctccacagctctcattgcagataggtgacgtggtgcgtatccaagagacttgcggagactggtatcgcggttacctcatcaaacataagatgctacagggcatctttccgaaatcattcatccacatcaaggaagtcacggtagagaagagaaggaataccgagaacattatccccgcggagatccccctcgcacaggaagtgaccactaccctatgggagtggggcagtatttggaaacagttgtacgtggctagcaagaaggaacggttcctgcaggtccagtccatgatgtatgatctgatggagtggcgatcacagttgttgtccgggaccctcccgaaggacgaactgaaggaactgaaacagaaggtaacgtcaaagattgattacggcaacaaaatcctcgagctggacttaattgtccgggacgaggatggcaatatcctggaccccgataatacgtcagttatttccctcttccatgcccatgaggaagcgaccgacaaaatcactgagaggatcaaagaagaaatgtccaaagaccagcctgattacgctatgtactcgcgtatttcctccagccctacacactctctctatgtgttcgtgcgcaactttgtgtgcaggattggcgaagatgctgaactgttcatgtccctgtatgacccaaacaaacagacagttatttcagagaactacctggtgcgttggggaagcagaggtttccccaaggagatagagatgctgaataatcttaaggtggtgttcactgatttggggaataaagatttgaaccgcgacaagatctacttgatttgtcagatcgtgagagtggggaagatggacttgaaagacacaggcgcgaagaagtgtacacagggactgaggcgtcctttcggagtggcagtaatggatattactgacatcattaaaggcaaggccgaatcagacgaggagaagcagcatttcatcccatttcatcctgttacagccgaaaatgatttcttacacagtctgctgggaaaggtgattgccagtaagggggattctggcggacagggcctctgggtcaccatgaagatgctggtcggagatataattcagattcgaaaggactatccacacctcgtggaccgtacgaccgtagttgcgcggaaactgggcttccctgaaatcatcatgcccggcgacgtacgcaacgatatttatatcactttgctgcagggcgatttcgataaatacaacaaaaccactcagagaaatgttgaggtgatcatgtgcgtgtgtgctgaggacgggaagactcttccaaatgccatctgtgttggcgccggcgacaaaccaatgaatgagtaccggtccgtggtgtattaccaggtgaagcaaccccggtggatggaaaccgttaaagtggccgtccctatcgaagatatgcagcgcatacatctgcgctttatgttcagacaccgctcaagcctcgagtccaaggataagggagaaaagaacttcgcaatgagctacgtgaaactgatgaaagaggatggcaccaccttacacgacggatttcacgacttggttgtgcttaagggagacagcaagaagatggaagatgcatctgcttacctcaccttaccctcgtatcgacaccacgtggaaaataagggagctacactgtcccggtcttcctcgtcagtcggggggctgagcgtgagctcccgggacgtgttttctatctcaaccctcgtttgttccactaaactgactcagaacgtgggcctgctcggcctgctaaaatggcgcatgaagccccaactcctgcaggaaaacctcgagaaactgaagatcgttgatggtgaagaggtagtgaaatttttgcaagatacactggatgctctgttcaatatcatgatggagcatagtcagtctgatgaatacgacatcctggttttcgacgcccttatctatattatcgggctcatcgccgaccgtaagttccaacacttcaatactgtgctcgaggcttacatccagcagcactttagtgcaactctagcctacaaaaagttgatgacggtgctcaagacctaccttgatacctcttccaggggcgagcagtgtgagccaattttaaggaccctgaaggcactcgagtacgtgttcaaattcattgtgcgctccagaactctattcagccagctttacgaaggcaaagaacagatggagtttgaggagtctatgcggaggttgttcgagagtataaacaatctcatgaaaagccagtacaagaccaccattcttttgcaggtggcggcactgaaatatatcccgtctgtgctgcatgatgtggaaatggtgtttgatgctaagctactgtcccagcttctttacgagttctatacctgtataccccctgtgaagctgcaaaaacaaaaggtccagtcaatgaacgagatcgtccagagtaaccttttcaagaaacaagaatgcagggacattctacttcccgtcatcactaaagagctgaaggaactgctagagcagaaggatgacatgcagcatcaggtgttagaaaggaaatactgtgtggaactgctgaactctattcttgaggtcctttcataccaggatgcagccttcacctatcaccatatccaagaaattatggtgcagttgcttaggaccgtcaaccgtaccgtgatcacaatgggcagggatcacatcttgatttcacactttgtggcttgtatgactgcaattctgaaccaaatgggggaccagcactattctttttacatagagacatttcagacttcaagcgagcttgtagacttcctcatggagacatttattatgttcaaagacctgatcgggaaaaatgtctacccaggagactggatggccatgagcatggtgcagaacagagtgtttctaagggccattaacaagttcgccgaaacaatgaaccagaagtttctggaacacacaaatttcgagtttcaactatggaataattattttcatctggcagtcgccttcattacccaggatagcctccagctggaacagtttagtcatgcaaagtataacaagatactaaacaaatatggggatatgaggcgccttataggtttttctattcgcgatatgtggtataagctcgggcagaataagatctgcttcattcccggtatggtcggcccaatactcgaaatgaccctgataccagaagctgaactgcggaaagccaccatcccaatcttctttgacatgatgctttgcgagtaccagaggagtggcgatttcaagaagttcgagaacgaaatcatccttaaactggaccacgaagttgagggcggccgcggtgacgaacagtacatgcagctgcttgagtctattctgatggaatgtgcggcagagcatcccacaattgcaaagtctgtagaaaattttgtcaatttggtgaaggggctgttagagaaactgctcgactatcgcggtgtaatgacagacgagtccaaagacaatcgaatgtcttgtacagtaaatctgctgaacttctacaaggacaacaatcgggaggagatgtacatccggtacctgtataagttgagggacctgcacctggattgtgataactataccgaggctgcttataccttgctcctccatacttggctgctaaaatggtcggatgaacagtgtgcctcccaggtcatgcagactggccaacaacacccgcaaacacacagacagctaaaggagacactctatgaaaccattatcggctatttcgacaagggtaagatgtgggaggaagccatttcactttgcaaagagctcgctgaacaatacgagatggagatctttgattacgagctgctgagtcaaaacctgatacagcaggcaaaattttacgaatctattatgaaaattctgaggccaaaaccagactatttcgcagtgggttactacggtcaggggttcccctctttcctgcgtaataaagttttcatatatcggggaaaagaatacgagcgcagggaggactttcagatgcaactcatgacacagttcccaaatgccgagaaaatgaatacaaccagtgcccctggggatgatgtcaaaaatgcccccggtcagtatattcagtgctttactgtccagcctgtgctggatgaacacccgagatttaagaataagccagttcctgatcagattattaacttttacaaaagcaattacgtgcagcggtttcattacagtagaccagtgcgtcgtggaacagtggaccccgagaatgagtttgcatcaatgtggatcgagcgaacctcattcgtgactgcctataaacttccaggaatacttagatggttcgaagtcgtgcatatgtctcaaacaaccatcagtcctctggagaatgcaatcgaaactatgagtacagcaaatgaaaagatccttatgatgataaaccagtaccagagcgacgaaaccttacccatcaaccccttgtcaatgcttctgaacggaatcgtggacccggccgtaatgggtggatttgctaagtacgagaaggccttttttaccgaggagtatgtccgggaccatcccgaagaccaggataaactgacccatctcaaggatttgatcgcttggcaaatccccttccttggtgccggtatcaagattcatgaaaagagagtctcagataacctaaggccctttcatgaccggatggaggaatgtttcaagaacctgaaaatgaaagtcgagaaagaatatggtgtgagagaaatgccagacttcgacgacagaagagtgggacgcccgagaagcatgttgaggagctacaggcagatgtccatcataagtctggcgtctatgaactctgattgcagcacccccagtaagcctaccagcgagtctttcgatctggagctggcaagcccaaagactcccagagtagaacaggaagagccaattagcccgggtagcaccctgccggaggtcaaactcaggcgaagcaagaagcgaactaagagaagctcagtagttttcgcggatgaaaaggctgcagctgagagtgacctcaagaggctgtcaagaaagcatgagttcatgtcagacaccaacctcagcgagcatgctgctatcccactaaaggcctcagtgctgtctcagatgagtttcgcaagccagtccatgcctactatccctgcacttgctctcagcgtggctggtatccccggcttggatgaggctaacacaagccccaggctgagccaaacatttctccaactatccgatggcgataagaaaacactgacacggaaaaaagttaatcagttttttaagacaatgctcgccagtaaaagcgccgaggagggtaagcaaattccagattcactgtccaccgacctctag

SEQ ID NO: 151280 - DNA, 2676 bp, Artificial Sequence
  derived and/or modified sequence
atgaccgccatcctgaaccagatgggcgaccagcactacagcttctacattgagaccttccagacgtcttcagagcttgtggacttcctcatggagaccttcattatgtttaaagatctcatagggaagaatgtctatccaggcgactggatggcaatgagtatggtccaaaatagagtgttcctccgtgcgatcaacaagtttgccgagaccatgaaccagaagttccttgaacacaccaacttcgaattccagctgtggaataactacttccacttggctgtggccttcatcacacaggactccttacagctcgagcagtttagtcatgcaaaatacaacaagattctgaataaatacggcgatatgcggaggttgattggattttccattcgtgacatgtggtataaactgggacagaacaagatctgctttataccggggatggtggggcccattctcgaaatgaccttaattccagaggccgagcttcggaaagccacgattccgatcttcttcgatatgatgctgtgcgagtatcagcggtctggcgacttcaagaagtttgagaacgagatcattctgaagctggaccatgaggtcgaaggaggacgcggagatgagcagtatatgcaattgcttgaaagcattctcatggaatgtgcagcagagcaccctaccattgcaaaatctgttgagaattttgttaatctggttaaaggtctcctggaaaagttgcttgactatcgcggagttatgacagacgagtccaaggataatcgcatgtcctgcaccgttaatcttttgaatttctacaaagacaacaatcgcgaggaaatgtatatccgctacctctataaactgagggaccttcatctggactgcgataattataccgaggcagcctacactctgctccttcatacgtggctgcttaaatggagcgatgagcaatgcgcctctcaggttatgcagaccggtcaacagcaccctcagacccacaggcagctgaaagagactctgtatgagacaattattgggtatttcgataagggaaagatgtgggaggaggccatatctttgtgtaaggaattagctgagcagtatgagatggagattttcgactacgaactgctgagccagaacctgatccagcaggctaaattttatgaatccatcatgaagatcttgcgccctaaaccagattacttcgcagtgggttactacggccagggctttccttcgtttctccgtaataaggtgtttatatatagaggaaaagagtatgagagaagggaggatttccagatgcagcttatgacacagttcccgaacgctgaaaagatgaatacaaccagcgcccccggagatgatgtgaaaaacgcccctggacagtacattcagtgctttaccgtgcagcccgtcctggatgagcacccgcgctttaaaaacaagcccgttcccgatcagatcatcaatttctacaagtcaaattacgtccagagattccattactcccgccccgtgcgtcgtggaacagtggaccctgaaaatgaatttgcttcgatgtggatagagaggacttcattcgtcaccgcttacaagctgccgggcattctccggtggtttgaagtcgttcatatgtctcagaccaccatctctccgctggagaatgccatagagacaatgtctaccgcgaacgaaaagattctgatgatgattaatcagtatcagtctgatgagaccctcccaataaaccctttgtctatgcttttgaacggaatcgtcgatcccgccgtgatgggcggttttgctaaatacgagaaggccttcttcaccgaagaatatgtgagggaccatcccgaggatcaggataaactgacccacctaaaagacctgatcgcctggcagattccgttccttggagcggggataaagatacatgagaagagagtctctgacaatctgcgtcccttccatgatcgaatggaagagtgctttaaaaatctgaagatgaaagttgagaaggagtatggggttcgggaaatgcctgacttcgatgaccggcgagtgggaaggcctcggagcatgctaagaagctatcgccaaatgtccatcatttctctggcttcaatgaattcggattgctcaacacctagcaaaccaacatcagagtcatttgatttggagctcgcctcaccgaaaaccccccgcgtggagcaggaggagcctattagtccaggcagcacgctgccagaggtgaaattaagacgttccaaaaaacggacaaaacgatcatcagtggttttcgcagacgagaaagctgccgccgagtctgaccttaagaggctatcccgcaaacatgagttcatgtccgacaccaacctgtcggagcacgccgccattccactgaaagcgagtgtcttgtcccagatgagcttcgcaagccagagtatgcccacgatacccgctcttgccctaagtgtcgccggaatacccggtcttgatgaagccaatacaagcccacgcctgtcacagaccttcctgcagctgtccgacggtgataaaaagaccctcactcggaaaaaggtaaaccagttctttaagaccatgcttgcctcgaagagtgctgaagagggcaagcaaatccctgactctttgtcgaccgatctgtag

SEQ ID NO: 151281 - DNA, 5493 bp, Artificial Sequence
  derived and/or modified sequence
atggcaccgtggcgcaaggcagacaaggaacggcacggtgtcgccatctataacttccaagggtccggagcccctcagctctccctgcagatcggcgacgtcgtccgcatccaagaaacgtgcggcgactggtatcgagggtacctcatcaagcataagatgctccaaggtatatttcccaaatcatttattcacatcaaagaagttaccgtagaaaaaagacgcaataccgaaaatatcatccctgcagagattcctttggcccaagaggtgaccacaacactttgggaatggggctctatctggaagcagctctatgttgcttcgaaaaaagagcggtttctgcaggtccagtccatgatgtacgacttgatggagtggcgcagtcagttgctctcgggtacactaccaaaagatgaacttaaggaactaaagcaaaaagtaaccagcaagatcgactatggcaacaagatactcgaactggaccttatcgtaagagacgaagacgggaacattctcgaccccgacaacacctctgttattagcttgtttcacgcccacgaagaagcaaccgacaaaattacagagagaattaaagaggagatgagtaaggatcagcccgactatgccatgtactccagaatttcttccagccctacccactctctgtatgtgttcgttcgcaacttcgtctgcagaatcggggaggacgcggagttgttcatgagtctgtatgaccctaacaagcagacagtgataagtgagaactatctagttcggtggggttcgcgcggatttcccaaagagattgaaatgctgaacaacctgaaggtcgtcttcactgatctgggaaacaaggaccttaacagagacaaaatttatctgatttgtcagatagtgcgggtgggcaagatggacttgaaagatacaggggctaaaaagtgtacacagggacttagacggccttttggcgtggctgtgatggacattacagacattatcaagggtaaggccgagagcgacgaggagaaacaacactttatccccttccacccggtgaccgctgaaaacgatttcctgcactctttactgggcaaggtgatcgccagcaagggcgactctgggggacagggcctctgggtcaccatgaaaatgcttgtcggggatattattcaaatccgaaaggattaccctcatctggtggatagaacgactgttgtcgcacgaaagctcggctttcctgaaataattatgccaggtgatgtcagaaatgatatttacattacattgctgcaaggtgatttcgataagtacaataagaccacgcagagaaacgtggaggtgataatgtgcgtgtgtgctgaagatggtaaaactctgccaaatgctatctgtgtgggggcaggtgataagcctatgaatgaatatagatccgttgtttattaccaagtgaagcagccaagatggatggaaacagtgaaggttgccgtcccgatcgaggatatgcagcggatccatctccgattcatgtttcggcaccggagttccctcgagtcgaaggacaaaggtgaaaagaatttcgccatgtcatacgtaaagttgatgaaggaagacggtaccaccttgcatgacggatttcatgatcttgtggtcctgaagggggattcaaagaaaatggaagatgccagtgcctacctgacattgccatcttatcgccaccatgtggaaaataagggtgcaaccctgagccgatcgtcaagctctgtagggggtctgtccgtgagctccagggacgtgttttctattagtaccctggtgtgttctactaaattgactcaaaacgtaggcctcctcggccttttaaagtggcgcatgaagccccagctgctgcaggaaaacctggaaaaattgaagattgtagatggtgaagaagtggttaaatttctacaggatactctggacgcactgtttaacatcatgatggagcacagccagtcagatgagtatgacatcctggtattcgatgccctgatctacatcatcggactaattgccgaccggaagtttcagcacttcaatacggtgctggaagcttacatacaacagcatttcagtgctacactagcctacaagaagctcatgacagttctgaaaacttatctggataccagttcacgcggagaacaatgtgaacctatcctacgcacattgaaggccctggagtacgtgtttaagtttatcgttagatctcgaaccttgtttagtcaactctatgagggcaaggagcagatggagtttgaggagtctatgcgaaggttgtttgagagtattaataacctaatgaagagtcagtataaaaccactatcttactgcaggtggccgcactgaagtacattccatctgtccttcacgatgtagagatggtgttcgatgccaagctgctgtcacagctcctctacgagttttatacatgtattccacctgtgaagttgcagaaacaaaaggttcagtcgatgaatgagatcgtccagtccaatcttttcaaaaagcaggagtgcagggacatactcctgccagtcatcacgaaggaactgaaagagttgctagagcagaaggatgacatgcaacaccaggtgctggaacgaaagtattgtgtagagctgcttaacagcatcttggaggtgctgtcttaccaagacgctgccttcacctaccatcacatccaggagataatggtgcagctgttgagaaccgttaatcggaccgtgattactatgggtcgtgaccatattctcatatctcatttcgtggcgtgtatgacagccatcctaaatcagatgggcgaccagcattacagcttttatattgaaacttttcagacctcctctgagcttgtcgacttcttgatggaaacctttattatgttcaaggaccttatcgggaagaacgtgtatccgggtgattggatggctatgtccatggtccaaaacagagtgttcttgagggccataaataagtttgctgagacaatgaatcagaagttcctcgaacacacaaactttgaattccagctctggaataactattttcatttagccgtagcatttatcactcaggattctctccagctggagcagttcagtcatgctaaatacaacaaaatcctgaataagtatggtgatatgaggaggcttatcggattcagcatacgagatatgtggtacaagctggggcagaacaaaatttgcttcataccgggtatggttggtcccatcctggagatgacactgatcccagaggcagaactgcgcaaggccacgattcccattttttttgacatgatgctctgtgagtatcagcgcagcggagatttcaaaaaatttgagaacgagattatccttaagcttgatcacgaggtggagggcggtcggggagacgaacagtacatgcaactcctagagtccatcctcatggaatgtgccgcagaacaccctacaattgctaaaagcgtcgagaatttcgtcaatcttgttaaggggttactggagaaacttctggactatagaggcgtgatgacggacgaaagcaaggacaataggatgagctgtaccgtgaatctgttaaatttctacaaagacaacaatagagaggagatgtacataagatacctttacaaattgagagatctgcatctggattgcgacaactacactgaggcagcctacactctgctgctgcacacctggctgctcaaatggagtgatgaacaatgcgccagccaagtgatgcagaccgggcagcagcacccacagacccacagacaactcaaggagacactgtatgagaccataattgggtattttgacaaaggcaagatgtgggaggaagccatttccctgtgcaaggagctggcggaacaatacgaaatggagatctttgactatgagctgctgtcacagaatctgatccagcaggcaaaattttacgagagtattatgaagatccttcggcctaagcccgactatttcgctgtaggatactatggtcagggcttcccttctttcctcaggaacaaggtgttcatatacaggggcaaggagtacgaaaggcgggaggacttccagatgcagctaatgacacagtttccaaatgctgagaagatgaacacgacatctgcaccaggtgacgacgttaagaatgctcctggacagtacatccagtgctttactgtgcaacctgtgctagatgaacaccccaggttcaagaacaaaccggttcccgatcagatcataaacttttacaaaagtaattacgtccagcgctttcattattctcggcctgtcagacggggtactgtagaccccgagaatgaattcgcatccatgtggatagaaaggactagttttgtgaccgcttataaactgcctgggatcctccggtggttcgaggtcgtccacatgtcgcagacgacaatcagccccttggaaaacgccatcgagactatgtccactgcaaacgaaaaaatcctcatgatgatcaaccagtaccaatcagatgagaccctcccaatcaatcctctcagcatgctcctgaacggcattgttgatcctgccgttatggggggttttgctaagtatgaaaaggcattttttacagaagaatatgtccgtgatcaccctgaagaccaggacaagctgacgcacctcaaggacttgattgcttggcagatcccctttttgggggcaggaattaagatccatgagaaacgcgtgtctgacaatcttcgcccatttcatgacagaatggaggaatgttttaagaatctgaaaatgaaagtggagaaggagtacggcgtcagagagatgccagatttcgacgaccggcgagtgggacggccacgatcaatgcttcgtagctataggcagatgagtatcatttctttggcttcaatgaacagcgattgttccacaccaagcaaacctacaagtgaaagtttcgacctggagttggcttcacccaagactccacgggtcgagcaggaagagccgatctctcccggttcaaccctgccagaagtcaaattgaggaggtcgaaaaaaagaactaagcgaagttccgttgtattcgccgatgaaaaagccgctgcagagtccgacttgaagcgattgagtaggaaacacgagttcatgagtgacactaatctttcagagcacgcggcaatccccctcaaggcttctgtgctcagtcagatgtcctttgctagtcagagtatgcctacaatcccggctctggcactgtccgtggctggtattcctgggcttgatgaggcaaacacatcccctcgtctgagccaaacttttctccagttgtccgatggagataagaagactctcacccgcaaaaaggttaatcagttcttcaaaactatgctagccagcaaatctgccgaagagggtaagcaaatcccagattcacttagtacagacctgtat

SEQ ID NO: 151282 - DNA, 2676 bp, Artificial Sequence
  derived and/or modified sequence
atgaccgcaattctgaaccagatgggcgaccagcattacagcttctacattgagacctttcaaacctcctcagaacttgtggattttctgatggagactttcatcatgttcaaggatctgatcggcaaaaacgtgtacccaggggactggatggctatgtctatggtgcagaaccgggtgttcctgcgcgcaattaacaaattcgccgagacaatgaatcaaaagtttctggaacacacaaattttgagttccaactttggaacaactactttcacctggcagtggcttttataacacaggacagccttcagttggaacagttttcacacgcaaagtacaataagatcttgaacaaatatggagatatgagacgtctgattgggttctcaatcagggacatgtggtataagcttggccagaacaaaatttgctttatccctggaatggttggccctattctggagatgacacttattcctgaggcagagttacggaaggcaaccattccaatcttctttgacatgatgttatgtgaataccaacgatccggcgatttcaaaaagtttgagaacgaaataatcttgaagttggatcacgaagttgaaggcggacggggtgatgagcagtatatgcagttgctggagtccattctgatggaatgtgctgctgagcatccaaccattgccaagtccgtagaaaatttcgttaatttagttaagggtttattggagaaactgctggattacaggggagtcatgacagacgagagtaaggataatagaatgagctgtacggtcaatctcctgaacttctataaggataacaaccgagaggaaatgtacatccgctatctgtacaagttacgggatctgcacctagactgtgacaactacaccgaggctgcctataccctcctcctgcacacatggctgctaaaatggagtgatgagcagtgcgcctcccaggtgatgcaaactggacaacagcatccacaaacgcatagacaactgaaggagacattgtacgagactattattggctacttcgataaaggaaagatgtgggaggaggctatcagtctctgcaaagagctggccgaacagtacgagatggagatcttcgactacgagttactgagccaaaatcttattcagcaggcgaagttctacgagagcattatgaagatattgagacccaaacctgattattttgccgtggggtactatggccagggttttccctcattcctccgaaacaaggtctttatatatcgcggtaaggaatatgagaggcgagaagactttcaaatgcagctgatgactcagttcccaaatgccgaaaagatgaacactacgtccgccccaggcgatgatgtgaagaatgcaccgggacagtatatccaatgcttcactgtgcagcctgtgttggacgaacatccacggtttaagaataagccagtacccgatcaaatcatcaacttctataaatccaactacgttcagcggttccactacagtagacccgtgcggagaggcactgtagaccctgagaacgagtttgcatctatgtggatagagcgtacgagcttcgtcactgcctataaactgcccggaattctgcgatggtttgaagtcgtccatatgagtcaaaccacgattagtccgcttgaaaacgccatagagacgatgtccactgccaatgagaaaattctaatgatgattaatcagtatcagtcagacgagaccttaccaatcaatccgctcagcatgcttctcaacggcattgtcgaccccgctgtgatggggggtttcgcgaaatacgaaaaagctttttttactgaagaatatgttagagaccatccagaagatcaggacaaactcacccacctgaaggatctgattgcttggcagatcccattcctcggggctggcattaaaatccacgagaagcgtgtgagtgataacctcagaccgttccacgaccggatggaagaatgttttaagaatttaaagatgaaagtcgagaaagaatacggtgttagggaaatgcccgattttgatgatcgtcgagtgggaagacccagatcaatgctccggtcttatagacaaatgtcaattatttcactagcctctatgaattccgactgctctacaccatccaagcccacatcagaatctttcgatcttgagctggcaagcccgaagacccctcgggtcgaacaggaagagcctattagcccgggttctaccctgccagaggtgaagctcagaaggtcaaagaaaaggacgaaacggtcatcagtagtcttcgccgatgagaaagccgcagccgagagtgatctgaagcgcctctctagaaaacacgagtttatgtctgatactaacctgagtgaacatgctgcaatcccactgaaggcgtcggtgcttagtcagatgtcttttgcatctcagtctatgcctacaatccccgcactagccctctccgtcgccggaataccaggtctggacgaagcaaacactagtcctaggctctcccagacctttctgcagctgtccgatggtgacaaaaagaccctgactcgcaagaaagtaaaccaatttttcaagactatgctagcatctaaatccgctgaggaggggaaacaaattcccgatagcctgtctaccgacttgtag

SEQ ID NO: 151283 - DNA, 5493 bp, Artificial Sequence
  derived and/or modified sequence
atggccccctggagaaaggccgacaaggagagacacggcgtggccatctacaacttccagggcagcggcgccccccagctgagcctgcagatcggcgacgtggtgagaatccaggagacctgcggcgactggtacagaggctacctgatcaagcacaagatgctgcagggcatcttccccaagagcttcatccacatcaaggaggtgaccgtggagaagagaagaaacaccgagaacatcatccccgccgagatccccctggcccaggaggtgaccaccaccctgtgggagtggggcagcatctggaagcagctgtacgtggccagcaagaaggagagattcctgcaggtgcagagcatgatgtacgacctgatggagtggagaagccagctgctgagcggcaccctgcccaaggacgagctgaaggagctgaagcagaaggtgaccagcaagatcgactacggcaacaagatcctggagctggacctgatcgtgagagacgaggacggcaacatcctggaccccgacaacaccagcgtgatcagcctgttccacgcccacgaggaggccaccgacaagatcaccgagagaatcaaggaggagatgagcaaggaccagcccgactacgccatgtacagcagaatcagcagcagccccacccacagcctgtacgtgttcgtgagaaacttcgtgtgcagaatcggcgaggacgccgagctgttcatgagcctgtacgaccccaacaagcagaccgtgatcagcgagaactacctggtgagatggggcagcagaggcttccccaaggagatcgagatgctgaacaacctgaaggtggtgttcaccgacctgggcaacaaggacctgaacagagacaagatctacctgatctgccagatcgtgagagtgggcaagatggacctgaaggacaccggcgccaagaagtgcacccagggcctgagaagacccttcggcgtggccgtgatggacatcaccgacatcatcaagggcaaggccgagagcgacgaggagaagcagcacttcatccccttccaccccgtgaccgccgagaacgacttcctgcacagcctgctgggcaaggtgatcgccagcaagggcgacagcggcggccagggcctgtgggtgaccatgaagatgctggtgggcgacatcatccagatcagaaaggactacccccacctggtggacagaaccaccgtggtggccagaaagctgggcttccccgagatcatcatgcccggcgacgtgagaaacgacatctacatcaccctgctgcagggcgacttcgacaagtacaacaagaccacccagagaaacgtggaggtgatcatgtgcgtgtgcgccgaggacggcaagaccctgcccaacgccatctgcgtgggcgccggcgacaagcccatgaacgagtacagaagcgtggtgtactaccaggtgaagcagcccagatggatggagaccgtgaaggtggccgtgcccatcgaggacatgcagagaatccacctgagattcatgttcagacacagaagcagcctggagagcaaggacaagggcgagaagaacttcgccatgagctacgtgaagctgatgaaggaggacggcaccaccctgcacgacggcttccacgacctggtggtgctgaagggcgacagcaagaagatggaggacgccagcgcctacctgaccctgcccagctacagacaccacgtggagaacaagggcgccaccctgagcagaagcagcagcagcgtgggcggcctgagcgtgagcagcagagacgtgttcagcatcagcaccctggtgtgcagcaccaagctgacccagaacgtgggcctgctgggcctgctgaagtggagaatgaagccccagctgctgcaggagaacctggagaagctgaagatcgtggacggcgaggaggtggtgaagttcctgcaggacaccctggacgccctgttcaacatcatgatggagcacagccagagcgacgagtacgacatcctggtgttcgacgccctgatctacatcatcggcctgatcgccgacagaaagttccagcacttcaacaccgtgctggaggcctacatccagcagcacttcagcgccaccctggcctacaagaagctgatgaccgtgctgaagacctacctggacaccagcagcagaggcgagcagtgcgagcccatcctgagaaccctgaaggccctggagtacgtgttcaagttcatcgtgagaagcagaaccctgttcagccagctgtacgagggcaaggagcagatggagttcgaggagagcatgagaagactgttcgagagcatcaacaacctgatgaagagccagtacaagaccaccatcctgctgcaggtggccgccctgaagtacatccccagcgtgctgcacgacgtggagatggtgttcgacgccaagctgctgagccagctgctgtacgagttctacacctgcatcccccccgtgaagctgcagaagcagaaggtgcagagcatgaacgagatcgtgcagagcaacctgttcaagaagcaggagtgcagagacatcctgctgcccgtgatcaccaaggagctgaaggagctgctggagcagaaggacgacatgcagcaccaggtgctggagagaaagtactgcgtggagctgctgaacagcatcctggaggtgctgagctaccaggacgccgccttcacctaccaccacatccaggagatcatggtgcagctgctgagaaccgtgaacagaaccgtgatcaccatgggcagagaccacatcctgatcagccacttcgtggcctgcatgaccgccatcctgaaccagatgggcgaccagcactacagcttctacatcgagaccttccagaccagcagcgagctggtggacttcctgatggagaccttcatcatgttcaaggacctgatcggcaagaacgtgtaccccggcgactggatggccatgagcatggtgcagaacagagtgttcctgagagccatcaacaagttcgccgagaccatgaaccagaagttcctggagcacaccaacttcgagttccagctgtggaacaactacttccacctggccgtggccttcatcacccaggacagcctgcagctggagcagttcagccacgccaagtacaacaagatcctgaacaagtacggcgacatgagaagactgatcggcttcagcatcagagacatgtggtacaagctgggccagaacaagatctgcttcatccccggcatggtgggccccatcctggagatgaccctgatccccgaggccgagctgagaaaggccaccatccccatcttcttcgacatgatgctgtgcgagtaccagagaagcggcgacttcaagaagttcgagaacgagatcatcctgaagctggaccacgaggtggagggcggcagaggcgacgagcagtacatgcagctgctggagagcatcctgatggagtgcgccgccgagcaccccaccatcgccaagagcgtggagaacttcgtgaacctggtgaagggcctgctggagaagctgctggactacagaggcgtgatgaccgacgagagcaaggacaacagaatgagctgcaccgtgaacctgctgaacttctacaaggacaacaacagagaggagatgtacatcagatacctgtacaagctgagagacctgcacctggactgcgacaactacaccgaggccgcctacaccctgctgctgcacacctggctgctgaagtggagcgacgagcagtgcgccagccaggtgatgcagaccggccagcagcacccccagacccacagacagctgaaggagaccctgtacgagaccatcatcggctacttcgacaagggcaagatgtgggaggaggccatcagcctgtgcaaggagctggccgagcagtacgagatggagatcttcgactacgagctgctgagccagaacctgatccagcaggccaagttctacgagagcatcatgaagatcctgagacccaagcccgactacttcgccgtgggctactacggccagggcttccccagcttcctgagaaacaaggtgttcatctacagaggcaaggagtacgagagaagagaggacttccagatgcagctgatgacccagttccccaacgccgagaagatgaacaccaccagcgcccccggcgacgacgtgaagaacgcccccggccagtacatccagtgcttcaccgtgcagcccgtgctggacgagcaccccagattcaagaacaagcccgtgcccgaccagatcatcaacttctacaagagcaactacgtgcagagattccactacagcagacccgtgagaagaggcaccgtggaccccgagaacgagttcgccagcatgtggatcgagagaaccagcttcgtgaccgcctacaagctgcccggcatcctgagatggttcgaggtggtgcacatgagccagaccaccatcagccccctggagaacgccatcgagaccatgagcaccgccaacgagaagatcctgatgatgatcaaccagtaccagagcgacgagaccctgcccatcaaccccctgagcatgctgctgaacggcatcgtggaccccgccgtgatgggcggcttcgccaagtacgagaaggccttcttcaccgaggagtacgtgagagaccaccccgaggaccaggacaagctgacccacctgaaggacctgatcgcctggcagatccccttcctgggcgccggcatcaagatccacgagaagagagtgagcgacaacctgagacccttccacgacagaatggaggagtgcttcaagaacctgaagatgaaggtggagaaggagtacggcgtgagagagatgcccgacttcgacgacagaagagtgggcagacccagaagcatgctgagaagctacagacagatgagcatcatcagcctggccagcatgaacagcgactgcagcacccccagcaagcccaccagcgagagcttcgacctggagctggccagccccaagacccccagagtggagcaggaggagcccatcagccccggcagcaccctgcccgaggtgaagctgagaagaagcaagaagagaaccaagagaagcagcgtggtgttcgccgacgagaaggccgccgccgagagcgacctgaagagactgagcagaaagcacgagttcatgagcgacaccaacctgagcgagcacgccgccatccccctgaaggccagcgtgctgagccagatgagcttcgccagccagagcatgcccaccatccccgccctggccctgagcgtggccggcatccccggcctggacgaggccaacaccagccccagactgagccagaccttcctgcagctgagcgacggcgacaagaagaccctgaccagaaagaaggtgaaccagttcttcaagaccatgctggccagcaagagcgccgaggagggcaagcagatccccgacagcctgagcaccgacctgtag

SEQ ID NO: 151284 - DNA, 2676 bp, Artificial Sequence
  derived and/or modified sequence
atgaccgccatcctgaaccagatgggcgaccagcactacagcttctacatcgagaccttccagaccagcagcgagctggtggacttcctgatggagaccttcatcatgttcaaggacctgatcggcaagaacgtgtaccccggcgactggatggccatgagcatggtgcagaacagagtgttcctgagagccatcaacaagttcgccgagaccatgaaccagaagttcctggagcacaccaacttcgagttccagctgtggaacaactacttccacctggccgtggccttcatcacccaggacagcctgcagctggagcagttcagccacgccaagtacaacaagatcctgaacaagtacggcgacatgagaagactgatcggcttcagcatcagagacatgtggtacaagctgggccagaacaagatctgcttcatccccggcatggtgggccccatcctggagatgaccctgatccccgaggccgagctgagaaaggccaccatccccatcttcttcgacatgatgctgtgcgagtaccagagaagcggcgacttcaagaagttcgagaacgagatcatcctgaagctggaccacgaggtggagggcggcagaggcgacgagcagtacatgcagctgctggagagcatcctgatggagtgcgccgccgagcaccccaccatcgccaagagcgtggagaacttcgtgaacctggtgaagggcctgctggagaagctgctggactacagaggcgtgatgaccgacgagagcaaggacaacagaatgagctgcaccgtgaacctgctgaacttctacaaggacaacaacagagaggagatgtacatcagatacctgtacaagctgagagacctgcacctggactgcgacaactacaccgaggccgcctacaccctgctgctgcacacctggctgctgaagtggagcgacgagcagtgcgccagccaggtgatgcagaccggccagcagcacccccagacccacagacagctgaaggagaccctgtacgagaccatcatcggctacttcgacaagggcaagatgtgggaggaggccatcagcctgtgcaaggagctggccgagcagtacgagatggagatcttcgactacgagctgctgagccagaacctgatccagcaggccaagttctacgagagcatcatgaagatcctgagacccaagcccgactacttcgccgtgggctactacggccagggcttccccagcttcctgagaaacaaggtgttcatctacagaggcaaggagtacgagagaagagaggacttccagatgcagctgatgacccagttccccaacgccgagaagatgaacaccaccagcgcccccggcgacgacgtgaagaacgcccccggccagtacatccagtgcttcaccgtgcagcccgtgctggacgagcaccccagattcaagaacaagcccgtgcccgaccagatcatcaacttctacaagagcaactacgtgcagagattccactacagcagacccgtgagaagaggcaccgtggaccccgagaacgagttcgccagcatgtggatcgagagaaccagcttcgtgaccgcctacaagctgcccggcatcctgagatggttcgaggtggtgcacatgagccagaccaccatcagccccctggagaacgccatcgagaccatgagcaccgccaacgagaagatcctgatgatgatcaaccagtaccagagcgacgagaccctgcccatcaaccccctgagcatgctgctgaacggcatcgtggaccccgccgtgatgggcggcttcgccaagtacgagaaggccttcttcaccgaggagtacgtgagagaccaccccgaggaccaggacaagctgacccacctgaaggacctgatcgcctggcagatccccttcctgggcgccggcatcaagatccacgagaagagagtgagcgacaacctgagacccttccacgacagaatggaggagtgcttcaagaacctgaagatgaaggtggagaaggagtacggcgtgagagagatgcccgacttcgacgacagaagagtgggcagacccagaagcatgctgagaagctacagacagatgagcatcatcagcctggccagcatgaacagcgactgcagcacccccagcaagcccaccagcgagagcttcgacctggagctggccagccccaagacccccagagtggagcaggaggagcccatcagccccggcagcaccctgcccgaggtgaagctgagaagaagcaagaagagaaccaagagaagcagcgtggtgttcgccgacgagaaggccgccgccgagagcgacctgaagagactgagcagaaagcacgagttcatgagcgacaccaacctgagcgagcacgccgccatccccctgaaggccagcgtgctgagccagatgagcttcgccagccagagcatgcccaccatccccgccctggccctgagcgtggccggcatccccggcctggacgaggccaacaccagccccagactgagccagaccttcctgcagctgagcgacggcgacaagaagaccctgaccagaaagaaggtgaaccagttcttcaagaccatgctggccagcaagagcgccgaggagggcaagcagatccccgacagcctgagcaccgacctgtag

SEQ ID NO: 151285 - DNA, 6097 bp, Artificial Sequence
  derived and/or modified sequence
aggaaggaagtggggccctgcggcgcccagccaccccctgacggcttccccacgggaggacgcgaggccccggcccagccatggccccctggcgcaaagctgacaaggagcggcacggcgtggccatatacaacttccaaggcagcggagccccccagctctccctgcagatcggcgatgtggtgcgaatacaggagacgtgtggagactggtataggggatacctcataaagcacaaaatgttacagggcatttttcctaagtcatttatccacatcaaggaagtgacagttgagaaaagaagaaatactgagaacatcattcctgcagaaattcctctggcacaagaagtgacaacgacactttgggaatggggaagcatctggaaacaactctatgtggccagcaaaaaggagcgttttctccaggtgcagtccatgatgtacgatctgatggagtggaggtcccagcttctctcaggaaccttacccaaggatgagctgaaggaactgaagcagaaagtcacgtccaaaattgactatggcaacaaaatccttgagcttgatttgattgtcagagatgaagacggaaatatcttggaccctgataataccagtgtcatcagcttgttccatgcacatgaggaagcaactgataaaatcacagagcgtatcaaagaagaaatgtcaaaagaccagccagattatgcaatgtattcccggatctcctcatcccccacccatagcctctatgtgtttgtgagaaactttgtgtgcagaattggggaagatgctgagctcttcatgtctctctacgaccccaacaagcaaacggtcataagtgagaactacctagtgcgatggggcagccggggcttccctaaggagattgagatgctcaacaatctgaaggtggtcttcacggatcttggaaacaaagacctcaacagggataaaatttacttgatttgtcaaatagtccgggtcggcaagatggatcttaaggatactggtgcaaagaagtgcacgcagggactgaggaggccctttggggtggcagttatggatataacagacatcatcaaggggaaagcagagagtgatgaagaaaagcagcacttcattccttttcacccggttacagctgagaatgacttcctacacagcctgctgggcaaagtcatagcctccaagggggacagtggagggcaaggcctctgggtgaccatgaagatgctggtgggtgacatcattcagattcgcaaggactatccacacctggtggacaggaccaccgtggtggccaggaagctgggattcccagagatcatcatgccaggggatgtcaggaacgacatctacattactctcttacaaggtgactttgacaagtacaacaagaccacacagaggaatgtggaagtcatcatgtgtgtgtgcgcggaggatggcaaaacgctgcctaatgcaatttgcgtgggagcaggggacaagcccatgaatgagtatcgctccgttgtgtactatcaagtcaaacagccacgctggatggaaacagtcaaggtggctgtccctattgaagacatgcagaggatccatctgcgattcatgtttcgacatcggtcatctctggaatctaaagataaaggagaaaagaactttgccatgtcctatgtgaagctgatgaaagaagatgggactactctacacgatggattccatgacttagttgtcctcaagggggacagcaagaagatggaggatgccagcgcatacctgacccttccttcttatcgacaccatgtggaaaacaagggggccacgctgagcaggagctccagcagtgttggggggctttctgtcagctcccgggatgtgttctccatttccaccctggtgtgctccacaaagctcactcagaatgtgggcttgctgggtttgctgaagtggcgtatgaagcctcaactgctacaggagaatttagaaaagttgaagattgtggatggagaggaagtggtgaagtttctccaggatactctggatgccctcttcaacatcatgatggagcattctcaaagtgatgaatatgacatcctcgtctttgatgccttgatttacataataggactcattgcagaccggaaatttcagcatttcaacaccgttctggaggcttacatccaacagcatttcagtgcgaccttggcttacaagaaattgatgacagtgctgaagacttacttggatacctccagcagaggggagcaatgtgagccaatcctaagaacgctgaaggctttggaatatgtgttcaagttcattgttcggtcgaggacattattttcacagctttatgaaggcaaagaacagatggagtttgaagaatccatgagacggctctttgaatccatcaacaatctgatgaaaagtcaatacaaaactaccatccttttgcaggtggcggctttgaaatacatcccatctgtcctgcatgatgtagaaatggtctttgatgcgaagttactcagccaactcctgtatgagttctacacctgcatccctcctgtgaaactccagaagcagaaagtacagtctatgaatgagatagtccagagcaacctctttaaaaagcaagaatgccgggacattctgcttcctgtcatcaccaaagagctgaaggagctgctggagcagaaggatgacatgcaacaccaggtcctggagaggaagtactgcgttgaattgctcaacagcatcttggaagtccttagctaccaggatgcggccttcacctaccaccatatccaggagatcatggtccagctgctgcggacagtgaaccggacagtcatcaccatgggccgggatcacattctgattagtcactttgtggcatgtatgacagccatcttaaaccagatgggtgaccagcactactccttctacattgagaccttccagaccagctctgaacttgtggacttcttgatggagaccttcatcatgttcaaggacctcattggaaagaacgtgtaccctggagactggatggccatgagcatggttcaaaacagggtcttcctgagagctatcaacaagtttgcagaaaccatgaaccagaagttcctagaacacacgaactttgagttccagctgtggaacaactattttcatctggcagtggcttttatcacccaggattctctgcagctggagcagttctcacacgccaaatacaacaaaatcctgaataagtatggggacatgagacggctaattggcttctccatccgtgatatgtggtacaagcttggtcagaacaaaatctgcttcatcccaggcatggtaggacctatattagagatgacacttatccctgaggctgagctccggaaagccaccataccaatcttcttcgacatgatgctgtgtgaatatcaaagaagtggggatttcaaaaagtttgaaaacgaaatcatcctgaagctggaccacgaggtagaagggggccgaggcgacgagcagtacatgcagctcctggagtcaatcctgatggaatgtgctgcagagcacccaaccattgccaagtcggtggagaacttcgtgaacctggtcaaaggcctcctggagaagctgctggattaccggggtgtgatgacagatgagagcaaagacaaccgcatgagctgcaccgtgaacctgctgaatttctacaaagataacaacagggaggagatgtacataaggtacctgtacaaactccgcgatcttcacctggactgtgacaattacacagaggctgcctacacgctccttctccacacctggcttctcaagtggtcggatgagcagtgtgcatcacaggtcatgcagacaggccagcagcacccccagacacaccggcagctgaaggagacgctctacgagaccatcataggctactttgacaaaggaaagatgtgggaagaggccataagtctgtgcaaggagctggcggaacagtacgagatggagatctttgactatgagctgctcagccagaacctgatccagcaggcaaaattctatgaaagcatcatgaaaatcctcaggcccaaaccagactactttgctgttggatactacggccagggattcccctccttcctgcggaacaaagtgttcatctaccgcgggaaggaatatgagcgaagagaagatttccagatgcagctgatgacccagttccccaatgcagagaagatgaacaccacctctgccccgggagatgatgtgaagaatgccccaggccagtatatccagtgcttcactgtccagcctgtcttggatgaacatcccaggttcaagaataagccagtgcctgaccagattataaacttctacaaatccaactacgtgcaaaggttccactactcccggcccgtgcgcagggggaccgtagacccagagaatgagtttgcttccatgtggattgagagaacctccttcgtgactgcatacaagctgccggggatcctgcgctggtttgaggtggtgcacatgtcgcagaccacaattagtcctctggagaatgccatagaaaccatgtccacggccaatgagaagatcctgatgatgataaaccagtaccagagtgatgagaccctccccatcaacccactctccatgctcctgaacgggattgtggaccctgctgtcatgggaggcttcgccaagtatgagaaggccttcttcactgaagagtatgtcagggaccaccctgaggaccaggacaagctgacccacctcaaggacctgattgcatggcagatccccttcttgggagctgggattaagatccatgagaaaagggtgtcagataacttgcgacccttccatgaccggatggaggaatgtttcaagaacctgaaaatgaaggtggagaaggagtacggtgtccgagagatgcctgactttgacgacaggagagtgggccgtcccaggtctatgctgcgctcatacagacagatgtccatcatctctctggcttccatgaattctgactgcagcacccccagcaagcctacctcagagagctttgacctggaattagcatcacccaagacgccgagagtggagcaggaggaaccgatctccccggggagcaccctgcctgaggtcaagctgcggaggtccaagaagaggacaaagagaagcagcgtagtttttgcggatgagaaagcagctgcagagtcggacctgaagcggctttccaggaagcatgagttcatgagtgacaccaacctctcggagcatgcggccatccccctcaaggcgtctgtcctctctcaaatgagctttgccagccagtccatgcctaccatcccagccctggcgctctcagtggcaggcatccctgggttggatgaggccaacacatctccccgcctcagccagaccttcctccaactctcagatggtgacaagaagacactcacacggaagaaggtcaatcagttcttcaagacaatgctggccagcaaatcggctgaagaaggcaaacagatcccagactcgctgtccacggacctgtgagctgctgctgactagggctgcatgggagagccagggaggggagtttctggaagaggaaagccatgcgtggaacatcgaagcctcagagagtgggagactgtccccatcagttgtccttacttagaggagacagagaggccaatcaggtcccagagcttgaatgctaacaagcccagcatcccctggggctgtgatcatggtggatgaggaagcctcaacgtagattcctgaactcaaggtaccagcaagaatgccttctcccagtgtgctctccccaacatcctaggcacagctttcataacccagtttcttaggtgtaagaaactgtttttatctcatttattaagtctcagaacttaacagaaaaggaagccttttaaatattctttttaattttattttagattaacagttttgtactttacatttttttatacaaccaaccagtttcttttctagccaatcatctctgaagagttgctgtttcttactgacaataaaaaatgttctcttggttcgaataa

SEQ ID NO: 151286 - DNA, 2438 bp, Artificial Sequence
  derived and/or modified sequence
aggaaggaagtggggccctgcggcgcccagccaccccctgacggcttccccacgggaggacgcgaggccccggcccagccatggccccctggcgcaaagctgacaaggagcggcacggcgtggccatatacaacttccaaggcagcggagccccccagctctccctgcagatcggcgatgtggtgcgaatacaggagacgtgtggagactggtataggggatacctcataaagcacaaaatgttacagggcatttttcctaagtcatttatccacatcaaggaagtgacagttgagaaaagaagaaatactgagaacatcattcctgcagaaattcctctggcacaagaagtgacaacgacactttgggaatggggaagcatctggaaacaactctatgtggccagcaaaaaggagcgttttctccaggtgcagtccatgatgtacgatctgatggagtggaggtcccagcttctctcaggaaccttacccaaggatgagctgaaggaactgaagcagaaagtcacgtccaaaattgactatggcaacaaaatccttgagcttgatttgattgtcagagatgaagacggaaatatcttggaccctgataataccagtgtcatcagcttgttccatgcacatgaggaagcaactgataaaatcacagagcgtatcaaagaagaaatgtcaaaagaccagccagattatgcaatgtattcccggatctcctcatcccccacccatagcctctatgtgtttgtgagaaactttgtgtgcagaattggggaagatgctgagctcttcatgtctctctacgaccccaacaagcaaacggtcataagtgagaactacctagtgcgatggggcagccggggcttccctaaggagattgagatgctcaacaatctgaaggtggtcttcacggatcttggaaacaaagacctcaacagggataaaatttacttgatttgtcaaatagtccgggtcggcaagatggatcttaaggatactggtgcaaagaagtgcacgcagggactgaggaggccctttggggtggcagttatggatataacagacatcatcaaggggaaagcagagagtgatgaagaaaagcagcacttcattccttttcacccggttacagctgagaatgacttcctacacagcctgctgggcaaagtcatagcctccaagggggacagtggagggcaaggcctctgggtgaccatgaagatgctggtgggtgacatcattcagattcgcaaggactatccacacctggtggacaggaccaccgtggtggccaggaagctgggattcccagagatcatcatgccaggggatgtcaggaacgacatctacattactctcttacaaggtgactttgacaagtacaacaagaccacacagaggaatgtggaagtcatcatgtgtgtgtgcgcggaggatggcaaaacgctgcctgtggctgtccctattgaagacatgcagaggatccatctgcgattcatgtttcgacatcggtcatctctggaatctaaagataaaggagaaaagaactttgccatgtcctatgtgaagctgatgaaagaagatgggactactctacacgatggattccatgacttagttgtcctcaagggggacagcaagaagatggaggatgccagcgcatacctgacccttccttcttatcgacaccatgtggaaaacaagggggccacgctgagcaggagctccagcagtgttggggggctttctgtcagctcccgggatgtgttctccatttccaccctggtgtgctccacaaagctcactcagaatgtgggcttgctgggtttgctgaagtggcgtatgaagcctcaactggaagaatccatgagacggctctttgaatccatcaacaatctgatgaaaagtcaatacaaaactaccatccttttgcaggtggcggctttgaaatacatcccatctgtcctgcatgatgtagaaatggtctttgatgcgaagttactcagccaactcctgtatgagttctacacctgcatccctcctgtgaaactccagaagcagaaagtacagtctatgaatgagatagtccagagcaacctctttaaaaagcaagaatgccgggacattctgcttcctgtcatcaccaaagagctgaaggagctgctggagcagaaggatgacatgcaacaccaggtcctggagaggaagtactgcgttgaattgctcaacagcatcttggaagtccttagctaccaggatgcggccttcacctaccaccatatccaggagatcatggtccagctgctgcggacagtgaaccggacagtcatcaccatgggccgggatcacattctgattggagcttgctgcaactgcggattcccatcctccaccccacactctctgattcagtggctttggggctga

SEQ ID NO: 151287 - DNA, 4652 bp, Artificial Sequence
  derived and/or modified sequence
aaaagacacagttaacaggcaagcagccatcttatctcctgtctgagccactctttcttccacttttgtcaccctttcaagtcactaccgagcaggctgagcagatgcacttatccaagatgagtagaatgcaatttgcgtgggagcaggggacaagcccatgaatgagtatcgctccgttgtgtactatcaagtcaaacagccacgctggatggaaacagtcaaggtggctgtccctattgaagacatgcagaggatccatctgcgattcatgtttcgacatcggtcatctctggaatggggacagcaagaagatggaggatgccagcgcatacctgacccttccttcttatcgacaccatgtggaaaacaagggggccacgctgagcaggagctccagcagtgttggggggctttctgtcagctcccgggatgtgttctccatttccaccctggtgtgctccacaaagctcactcagaatgtgggcttgctgggtttgctgaagtggcgtatgaagcctcaactgctacaggagaatttagaaaagttgaagattgtggatggagaggaagtggtgaagtttctccaggatactctggatgccctcttcaacatcatgatggagcattctcaaagtgatgaatatgacatcctcgtctttgatgccttgatttacataataggactcattgcagaccggaaatttcagcatttcaacaccgttctggaggcttacatccaacagcatttcagtgcgaccttggcttacaagaaattgatgacagtgctgaagacttacttggatacctccagcagaggggagcaatgtgagccaatcctaagaacgctgaaggctttggaatatgtgttcaagttcattgttcggtcgaggacattattttcacagctttatgaaggcaaagaacagatggagtttgaagaatccatgagacggctctttgaatccatcaacaatctgatgaaaagtcaatacaaaactaccatccttttgcaggtggcggctttgaaatacatcccatctgtcctgcatgatgtagaaatggtctttgatgcgaagttactcagccaactcctgtatgagttctacacctgcatccctcctgtgaaactccagaagcagaaagtacagtctatgaatgagatagtccagagcaacctctttaaaaagcaagaatgccgggacattctgcttcctgtcatcaccaaagagctgaaggagctgctggagcagaaggatgacatgcaacaccaggtcctggagaggaagtactgcgttgaattgctcaacagcatcttggaagtccttagctaccaggatgcggccttcacctaccaccatatccaggagatcatggtccagctgctgcggacagtgaaccggacagtcatcaccatgggccgggatcacattctgattagtcactttgtggcatgtatgacagccatcttaaaccagatgggtgaccagcactactccttctacattgagaccttccagaccagctctgaacttgtggacttcttgatggagaccttcatcatgttcaaggacctcattggaaagaacgtgtaccctggagactggatggccatgagcatggttcaaaacagggtcttcctgagagctatcaacaagtttgcagaaaccatgaaccagaagttcctagaacacacgaactttgagttccagctgtggaacaactattttcatctggcagtggcttttatcacccaggattctctgcagctggagcagttctcacacgccaaatacaacaaaatcctgaataagtatggggacatgagacggctaattggcttctccatccgtgatatgtggtacaagcttggtcagaacaaaatctgcttcatcccaggcatggtaggacctatattagagatgacacttatccctgaggctgagctccggaaagccaccataccaatcttcttcgacatgatgctgtgtgaatatcaaagaagtggggatttcaaaaagtttgaaaacgaaatcatcctgaagctggaccacgaggtagaagggggccgaggcgacgagcagtacatgcagctcctggagtcaatcctgatggaatgtgctgcagagcacccaaccattgccaagtcggtggagaacttcgtgaacctggtcaaaggcctcctggagaagctgctggattaccggggtgtgatgacagatgagagcaaagacaaccgcatgagctgcaccgtgaacctgctgaatttctacaaagataacaacagggaggagatgtacataaggtacctgtacaaactccgcgatcttcacctggactgtgacaattacacagaggctgcctacacgctccttctccacacctggcttctcaagtggtcggatgagcagtgtgcatcacaggtcatgcagacaggccagcagcacccccagacacaccggcagctgaaggagacgctctacgagaccatcataggctactttgacaaaggaaagatgtgggaagaggccataagtctgtgcaaggagctggcggaacagtacgagatggagatctttgactatgagctgctcagccagaacctgatccagcaggcaaaattctatgaaagcatcatgaaaatcctcaggcccaaaccagactactttgctgttggatactacggccagggattcccctccttcctgcggaacaaagtgttcatctaccgcgggaaggaatatgagcgaagagaagatttccagatgcagctgatgacccagttccccaatgcagagaagatgaacaccacctctgccccgggagatgatgtgaagaatgccccaggccagtatatccagtgcttcactgtccagcctgtcttggatgaacatcccaggttcaagaataagccagtgcctgaccagattataaacttctacaaatccaactacgtgcaaaggttccactactcccggcccgtgcgcagggggaccgtagacccagagaatgagtttgcttccatgtggattgagagaacctccttcgtgactgcatacaagctgccggggatcctgcgctggtttgaggtggtgcacatgtcgcagaccacaattagtcctctggagaatgccatagaaaccatgtccacggccaatgagaagatcctgatgatgataaaccagtaccagagtgatgagaccctccccatcaacccactctccatgctcctgaacgggattgtggaccctgctgtcatgggaggcttcgccaagtatgagaaggccttcttcactgaagagtatgtcagggaccaccctgaggaccaggacaagctgacccacctcaaggacctgattgcatggcagatccccttcttgggagctgggattaagatccatgagaaaagggtgtcagataacttgcgacccttccatgaccggatggaggaatgtttcaagaacctgaaaatgaaggtggagaaggagtacggtgtccgagagatgcctgactttgacgacaggagagtgggccgtcccaggtctatgctgcgctcatacagacagatgtccatcatctctctggcttccatgaattctgactgcagcacccccagcaagcctacctcagagagctttgacctggaattagcatcacccaagacgccgagagtggagcaggaggaaccgatctccccggggagcaccctgcctgaggtcaagctgcggaggtccaagaagaggacaaagagaagcagcgtagtttttgcggatgagaaagcagctgcagagtcggacctgaagcggctttccaggaagcatgagttcatgagtgacaccaacctctcggagcatgcggccatccccctcaaggcgtctgtcctctctcaaatgagctttgccagccagtccatgcctaccatcccagccctggcgctctcagtggcaggcatccctgggttggatgaggccaacacatctccccgcctcagccagaccttcctccaactctcagatggtgacaagaagacactcacacggaagaaggtcaatcagttcttcaagacaatgctggccagcaaatcggctgaagaaggcaaacagatcccagactcgctgtccacggacctgtgagctgctgctgactagggctgcatgggagagccagggaggggagtttctggaagaggaaagccatgcgtggaacatcgaagcctcagagagtgggagactgtccccatcagttgtccttacttagaggagacagagaggccaatcaggtcccagagcttgaatgctaacaagcccagcatcccctggggctgtgatcatggtggatgaggaagcctcaacgtagattcctgaactcaaggtaccagcaagaatgccttctcccagtgtgctctccccaacatcctaggcacagctttcataacccagtttcttaggtgtaagaaactgtttttatctcatttattaagtctcagaacttaacagaaaaggaagccttttaaatattctttttaattttattttagattaacagttttgtactttacatttttttatacaaccaaccagtttcttttctagccaatcatctctgaagagttgctgtttcttactgacaataaaaaatgttctcttggttcg

SEQ ID NO: 151288 - protein, 2030 aa, Artificial Sequence
  derived and/or modified sequence
MWTPTEEEKYGVVICSFRGSVPQGLVLEIGETVQILEKCEGWYRGVSTKKPNVKGIFPANYIHLKKAIVSNRGQYETVVPLEDSIVTEVTATLQEWASLWKQLYVKHKVDLFYKLRHVMNELIDLRRQLLSGHLTQDQVREVKRHITVRLDWGNEHLGLDLVPRKDFEVVDSDQISVSDLYKMHLSSRQSVQQSTSQVDTMRPRHGETCRMPVPHHFFLSLKSFTYNTIGEDTDVFFSLYDMREGKQISERFLVRLNKNGGPRNPEKIERMCALFTDLSSKDMKRDLYIVAHVIRIGRMLLNDSKKGPPHLHYRRPYGCAVLSILDVLQSLTEVKEEKDFVLKVYTCNNESEWSQIHENIIRKSSAKYSAPSASHGLIISLQLLRGDMEQIRRENPMIFNRGLAITRKLGFPDVIMPGDIRNDLYLTLEKGDFERGGKSVQKNIEVTMYVLYADGEILKDCISLGSGEPNRSSYHSFVLYHSNSPRWGEIIKLPIPIDRFRGSHLRFEFRHCSTKDKGEKKLFGFAFSTLMRDDGTTLSDDIHELYVYKCDENSTFNNHALYLGLPCCKEDYNGCPNIPSSLIFQRSTKESFFISTQLSSTKLTQNVDLLALLKWKAFPDRIMDVLGRLRHVSGEEIVKFLQDILDTLFVILDDNTEKYGLLVFQSLVFIINLLRDIKYFHFRPVMDTYIQKHFAGALAYKELIRCLKWYMDCSAELIRQDHIQEAMRALEYLFKFIVQSRILYSRATCGMEEEQFRSSIQELFQSIRFVLSLDSRNSETLLFTQAALLNSFPTIFDELLQMFTVQEVAEFVRGTLGSMPSTVHIGQSMDVVKLQSIARTVDSRLFSFSESRRILLPVVLHHIHLHLRQQKELLICSGILGSIFSIVKTSSLEADVMEEVEMMVESLLDVLLQTLLTIMSKSHAQEAVRGQRCPQCTAEITGEYVSCLLSLLRQMCDTHFQHLLDNFQSKDELKEFLLKIFCVFRNLMKMSVFPRDWMVMRLLTSNIIVTTVQYLSSALHKNFTETDFDFKVWNSYFSLAVLFINQPSLQLEIITSAKRKKILDKYGDMRVMMAYELFSMWQNLGEHKIHFIPGMIGPFLGVTLVPQPEVRNIMIPIFHDMMDWEQRKNGNFKQVEAELIDKLDSMVSEGKGDESYRELFSLLTQLFGPYPSLLEKVEQETWRETGISFVTSVTRLMERLLDYRDCMKGEETENKKIGCTVNLMNFYKSEINKEEMYIRYIHKLCDMHLQAENYTEAAFTLLLYCELLQWEDRPLREFLHYPSQTEWQRKEGLCRKIIHYFNKGKSWEFGIPLCRELACQYESLYDYQSLSWIRKMEASYYDNIMEQQRLEPEFFRVGFYGRKFPFFLRNKEYVCRGHDYERLEAFQQRMLSEFPQAVAMQHPNHPDDAILQCDAQYLQIYAVTPIPDYVDVLQMDRVPDRVKSFYRVNNVRKFRYDRPFHKGPKDKENEFKSLWIERTTLTLTHSLPGISRWFEVERRELVEVSPLENAIQVVENKNQELRSLISQYQHKQVHGNINLLSMCLNGVIDAAVNGGIARYQEAFFDKDYINKHPGDAEKITQLKELMQEQVHVLGVGLAVHEKFVHPEMRPLHKKLIDQFQMMRASLYHEFPGLDKLSPACSGTSTPRGNVLASHSPMSPESIKMTHRHSPMNLMGTGRHSSSSLSSHASSEAGNMVMLGDGSMGDAPEDLYHHMQLAYPNPRYQGSVTNVSVLSSSQASPSSSSLSSTHSAPSQMITSAPSSARGSPSLPDKYRHAREMMLLLPTYRDRPSSAMYPAAILENGQPPNFQRALFQQVVGACKPCSDPNLSVAEKGHYSLHFDAFHHPLGDTPPALPARTLRKSPLHPIPASPTSPQSGLDGSNSTLSGSASSGVSSLSESNFGHSSEAPPRTDTMDSMPSQAWNADEDLEPPYLPVHYSLSESAVLDSIKAQPCRSHSAPGCVIPQDPMDPPALPPKPYHPRLPALEHDEGVLLREETERPRGLHRKAPLPPGSAKEEQARMAWEHGRGEQ

SEQ ID NO: 151289 - DNA, 6093 bp, Artificial Sequence
  derived and/or modified sequence
atgtggaccccaacagaggaggaaaagtatggcgtggtcatatgctccttccgcggctccgtgccccagggcctggtgttagagattggtgagaccgttcaaatactggaaaaatgcgaggggtggtacagaggtgtctccacaaaaaagcctaacgtcaaaggaatctttcctgccaattatatacatctaaagaaagcgattgtgtcgaaccgcgggcagtacgagacggttgtcccgctcgaggacagcatcgtaacggaggtaaccgcaaccctccaggagtgggcgtctctttggaaacagttgtacgtaaagcacaaggttgaccttttttacaagctgcgtcacgtaatgaacgaattaattgaccttcgaaggcaacttctgtcgggccatttgacgcaagaccaggtccgggaagtgaaacgccatattaccgtgaggctcgactggggaaacgaacacctcggcctcgacctagttccacgaaaagattttgaggtggtggatagcgaccagatttccgtgagtgatctgtataagatgcaccttagctcacgccaaagtgtgcagcagagtacttctcaagtcgacacaatgcggccaaggcacggcgagacctgccgcatgccagtgccacaccactttttcttatcattgaaaagttttacttataatacaattggcgaagacacagacgtatttttttctctatatgacatgagagaggggaagcagatctcagagcggttccttgtgcgcctgaataaaaatggaggaccccgcaaccccgagaagatagaacggatgtgtgccctgttcacggacctgtcaagcaaagacatgaagagggatctctatatcgtcgcacacgtcattaggatcggacgcatgctgcttaatgatagcaagaagggtcctccacatcttcattaccgtaggccatacgggtgcgctgtgttatctatcctcgatgtgctgcagtcactcacagaagtgaaagaagagaaagattttgtgttaaaggtctacacatgcaacaatgagagcgagtggtctcagatccacgagaacataattcggaagagcagcgccaagtatagtgcgccctcagccagtcatggcttaatcatcagcctccagctgctgcgaggcgatatggaacagattcgcagagaaaaccctatgatctttaaccgaggattggccattacacggaaactggggtttccagatgtgattatgccaggggacatccgaaatgatctgtacctcactctggagaagggagacttcgagaggggcggtaaaagcgtgcagaagaatatagaagtaaccatgtatgtgctctatgccgatggcgaaatcctgaaggactgcatatcgctgggatccggagagcctaatcgcagctcctatcacagctttgtcctataccatagtaatagccccaggtggggcgagatcataaagctgccaatccccatagaccggttccgcgggtcccatctccgcttcgagtttagacactgtagcacgaaggacaaaggcgagaaaaaactctttgggttcgccttcagcactctcatgcgggatgacgggacgaccctgtctgatgacattcacgaactgtacgtctacaagtgcgacgagaattccacctttaacaaccacgcgctttacttgggtctcccctgttgtaaagaggactataatggctgcccgaacattccatcttctctgatatttcagaggagtaccaaggagtcttttttcatcagcacccagctgagttcaaccaagctgacccaaaacgtggacttgctggccctccttaagtggaaagcattccctgataggatcatggacgtactgggcagactgcggcatgtgtcaggtgaagagattgtgaagtttcttcaggacatccttgatacattattcgtcatcctggatgacaacacagagaaatacggactgctggtattccaaagtctcgtgttcatcatcaatctgttgcgcgacattaaatactttcacttccggcctgttatggatacctatatccaaaagcattttgccggggccttggcatataaagagttaattcggtgtctgaaatggtatatggattgctcagccgagctcatcaggcaagaccacatccaggaggccatgcgggccttggagtatctctttaaatttatcgtccagtcccggattctatacagcagggccacctgcggcatggaggaagaacagtttcgctcctccatccaggagctgtttcagtccatcagatttgtgttgagcctggacagtagaaactccgaaaccctgctcttcactcaggccgccctgctgaacagcttccccactatttttgatgaactcctacagatgtttacagtacaggaggtcgccgagtttgtacggggcacactgggctctatgcctagcacagtccacattgggcagagcatggacgtcgttaaactgcaatccatcgctaggactgtggactctcgcctgttctcattctctgagtcgaggaggatcctgctgccggtggtgctacaccacatccatctccatctgagacagcaaaaagaattgctgatctgtagtggcattttaggtagtatcttcagcatcgtgaagacaagttctctggaggctgatgtgatggaggaagttgaaatgatggtagagtcactcctagatgtacttttgcagactcttttgactattatgtcgaagtcccatgcccaggaagcagttagaggccagcgatgtcctcagtgtactgctgagatcactggtgagtacgtaagctgtctgctctcgcttttgcgtcaaatgtgtgatacacattttcagcacttgctggataatttccagagtaaggatgagctcaaggaatttctgctgaaaattttctgtgtcttccgcaatcttatgaagatgtccgtgtttccccgggattggatggtaatgaggctcttaacctcaaacattatcgtgaccacagttcaatacctaagctcagcattgcataagaacttcacggagactgatttcgatttcaaagtatggaattcatacttcagcctcgcagtgctatttatcaatcagccatcgctgcagctggagatcattacctccgcgaagagaaagaaaatcttggataagtatggggacatgcgagtgatgatggcctatgagctgttcagcatgtggcagaatctcggcgaacataagatccactttattcccggaatgataggccccttccttggagtgacactggttccgcaaccagaggttagaaatatcatgattccgatctttcatgatatgatggactgggagcagaggaaaaatgggaactttaagcaggtggaagccgaactcattgataaactggattcaatggtgagcgagggcaaaggggatgaatcctatagagagctcttcagtctgctgactcaattatttggcccatatcctagcctgctggagaaggttgagcaagaaacatggcgcgaaaccggtatatctttcgtcactagtgttactcggctaatggagcgcttgctggactaccgggattgcatgaaaggcgaagagaccgagaataaaaaaataggctgtactgtgaacctgatgaacttctataagtcggagattaataaagaggagatgtatatacgatacatccacaaattgtgtgacatgcatttgcaagcagaaaactataccgaggccgcctttacgctcctgctatattgcgagttactacaatgggaagacaggccactccgggagttcctgcactatcccagtcagactgagtggcagcggaaagaagggctctgccgtaaaatcatccactactttaacaagggtaagagctgggaatttggaatccctctctgcagagaactcgcctgccagtacgagagtctgtatgactatcaatctctgagctggatcagaaagatggaggctagttattatgacaacattatggagcagcagcgtctggagccagaattcttcagagtcgggttttacggacgcaaattcccattcttcctgcgcaataaggaatatgtgtgcaggggtcacgattacgaacggctggaggcattccagcagaggatgctctcagaatttccccaggccgtcgctatgcagcaccctaaccaccctgacgatgctatcctgcagtgcgatgcacagtatctgcaaatttatgctgtgaccccaatccctgattacgtggacgttctacagatggatagggtccctgacagggtgaaatccttttaccgtgtgaacaatgtacgtaaattccggtacgaccgtccttttcataagggccctaaagataaggaaaacgagttcaagtcactgtggatagagcggacaactctcaccctgacccactcacttccaggcattagtcggtggttcgaggtcgaacgaagggagctggtggaagtgtcaccacttgaaaacgccatccaggtcgtggaaaataagaaccaggagctgcgctcccttattagccaatatcaacacaaacaggtgcacggcaatatcaaccttctgagcatgtgtctcaacggggtgatagacgcggccgtgaatggcggaatcgcgcggtatcaggaggctttttttgataaggattacatcaacaagcatcctggcgacgcagagaagattacccagctgaaagaactcatgcaggaacaggtgcacgtgttgggtgtcggacttgcagtccacgagaaatttgttcaccccgaaatgcggcccctgcacaagaaactgatcgatcaatttcaaatgatgagggcttctctgtaccacgaattcccaggtttggacaagctgtcacccgcatgttcaggcacctcaactccccgaggcaatgtcctagcttcccactctccaatgtcgccggaatcgattaaaatgacccacaggcatagtcccatgaacctgatgggcaccggtcgccactccagttccagtctttcgagtcacgcgtccagcgaagcggggaacatggtgatgttgggcgatggtagcatgggcgatgcacccgaagatctgtaccatcatatgcaactggcctacccaaaccccaggtatcagggatcagtgacgaacgtttccgtgttgtcatcctcccaggctagtccctcgtcctcaagcctcagctctacccattcagccccttcccagatgataacgagcgccccatcctcagcccgggggtccccaagcctgccggacaaatatcgtcacgcaagagagatgatgctgctgcttcctacatatagagaccgccccagttctgctatgtaccccgctgccattctggaaaatgggcagccccccaatttccagagggcactgtttcagcaggtggtaggtgcgtgcaaaccctgtagcgatcccaacctgtctgtggccgagaagggtcactacagcctgcattttgacgcttttcatcatccacttggcgatactccacccgccctgcctgccaggactctgcgaaaatcaccacttcatccgatccccgcgtcacctaccagtccccagtctgggttggacggctctaactcaacacttagcgggtcggcgagctcgggagtctctagcctgagcgagtcaaacttcggtcatagtagcgaggccccacctaggaccgatacaatggacagcatgccgtcgcaggcttggaacgctgatgaagatctggaacctccatatctgcctgtgcattatagcctatcggagtctgctgtcttagactccattaaggcacagccatgccgttcacacagcgcgccaggttgcgtgataccacaggatccaatggacccaccagcacttccaccaaaaccgtatcatcctaggctgccggcacttgaacatgacgaaggcgttctactcagggaagagacagagcgaccccgaggactgcataggaaagctcccctacctcccgggtcagccaaagaagagcaggctcgaatggcctgggaacacggacgcggcgaacagtag

SEQ ID NO: 151290 - DNA, 6093 bp, Artificial Sequence
  derived and/or modified sequence
atgtggacccccacagaggaggagaagtatggagtggtgatctgcagcttccggggctctgtgccccagggcctggtgctggagattggagagaccgtgcagatcctggagaagtgtgagggctggtacagaggagtgtccaccaagaagcccaacgtgaagggcatcttccctgccaactacatccacctgaagaaggccatcgtgagcaacagaggccagtatgaaacagtggtgcccctggaggacagcatcgtgacagaggtgacagccaccctgcaggagtgggccagcctgtggaagcagctgtatgtgaagcacaaggtggacctcttctacaagctgcggcacgtgatgaatgagctgattgacctgcggcggcagctgctgagcggccacctgacccaggaccaggtgcgggaggtgaagaggcacatcaccgtgcggctggactggggcaatgagcacctgggcctggacctggtgcccaggaaggactttgaggtggtggacagcgaccagatctctgtgtctgacctgtacaagatgcacctgagcagccggcagagcgtgcagcagagcaccagccaggtggacaccatgaggcccaggcatggagagacctgcaggatgcctgtgccccaccacttcttcctgagcctgaagagcttcacctacaacaccatcggggaggacacagatgtgttcttcagcctgtatgacatgagggagggcaagcagatcagcgagcgcttcctggtgcggctgaacaagaatggaggccccagaaatcctgagaagattgaaagaatgtgtgccctcttcacagacctgagcagcaaggacatgaagagggacctgtacatcgtggcccacgtgatccgcatcggccgcatgctgctgaatgacagcaagaagggccccccccacctgcactaccgccggccctacggctgtgctgtgctgagcatcctggatgtgctgcagagcctgacagaggtgaaggaggagaaggactttgtgctgaaggtgtacacctgcaacaatgaaagtgagtggagccagatccacgagaacatcatcaggaagagcagcgccaagtacagcgcccccagcgccagccacggcctcatcatcagcctgcagctgctgcggggggacatggagcagatccggcgggagaaccccatgatcttcaacagaggcctggccatcaccaggaagctgggcttcccagatgtgatcatgcctggggacatcagaaatgacctgtacctgaccctggagaagggggactttgagcggggcggcaagtctgtgcagaagaacatcgaggtgaccatgtatgtgctgtatgcagatggagagatcctgaaggactgcatcagcctgggcagcggggagcccaacagaagcagctaccacagctttgtgctgtaccacagcaacagcccccgctggggcgagatcatcaagctgcccatccccatcgaccgcttccggggcagccacctgcgctttgagttccgccactgcagcaccaaggacaagggggagaagaagctgtttggatttgccttcagcaccctgatgagagatgatggcaccaccctgagtgatgacatccacgagctgtatgtgtacaagtgtgatgagaacagcaccttcaacaaccacgccctgtacctgggcctgccctgctgcaaggaggactacaacggctgccccaacatccccagcagcctcatcttccagaggagcaccaaggagagcttcttcatcagcacccagctgagcagcaccaagctgacccagaatgtggacctgctggccctgctgaagtggaaggccttcccagaccgcatcatggatgtgctgggccgcctgcggcacgtgtctggagaggagatcgtgaagttcctgcaggacatcctggacaccctgtttgtgatcctggatgacaacacagagaagtatggcctgctggtgttccagagcctggtgttcatcatcaacctgctgcgggacatcaagtacttccacttccggcctgtgatggacacctacatccagaagcactttgctggggccctggcctacaaggagctgatccgctgcctgaagtggtacatggactgcagcgctgagctgatccggcaggaccacatccaggaggccatgagggccctggagtacctgttcaagttcatcgtgcagagccgcatcctgtacagccgggccacctgtggcatggaggaggagcagttccgcagcagcatccaggagctgttccagagcatccgctttgtgctgagcctggacagcaggaacagcgagaccctgctcttcacccaggccgccctgctgaacagcttccccaccatctttgatgagctgctgcagatgttcaccgtgcaggaggtggccgagtttgtgcggggcaccctgggctccatgcccagcacagtgcacatcggccagagcatggatgtggtgaagctgcagagcatcgccaggacagtggacagccgcctcttctccttcagcgagagccgccgcatcctgctgcctgtggtgctgcaccacatccacctgcacctgcggcagcagaaggagctgctgatctgcagcggcatcctgggcagcatcttcagcatcgtgaagaccagcagcctggaggctgatgtgatggaggaggtggagatgatggtggagagcctgctggatgtgctgctgcagaccctgctgaccatcatgagcaagagccacgcccaggaggccgtgcggggccagcgctgcccccagtgcacagctgagatcactggagaatatgtgtcctgcctgctgagcctgctgcggcagatgtgtgacacccacttccagcacctgctggacaacttccagagcaaggatgagctgaaggagttcctgctgaagatcttctgtgtgttcaggaacctgatgaagatgtctgtgttcccccgggactggatggtgatgaggctgctgaccagcaacatcatcgtgaccaccgtgcagtacctgagcagcgccctgcacaagaacttcacagaaacagactttgacttcaaggtgtggaacagctacttcagcctggccgtgctcttcatcaaccagcccagcctgcagctggagatcatcaccagcgccaagaggaagaagatcctggacaagtacggggacatgagggtgatgatggcctatgagctgttctccatgtggcagaacctgggggagcacaagatccacttcatccctggcatgattggccccttcctgggcgtgaccctggtgccccagcctgaggtgaggaacatcatgatccccatcttccatgacatgatggactgggagcagaggaagaatggaaacttcaagcaggtggaggccgagctgattgacaagctggacagcatggtgtctgagggcaaaggagatgagagctaccgggagctgttcagcctgctgacccagctgtttggcccctaccccagcctgctggagaaggtggagcaggagacctggagggagaccggcatcagctttgtgacctctgtgacccggctgatggagcggctgctggactacagagactgcatgaagggggaggagacagagaacaagaagattggctgcaccgtgaacctgatgaacttctacaagtctgagatcaacaaggaggagatgtacatccgctacatccacaagctgtgtgacatgcacctgcaggccgagaactacacagaagctgccttcaccctgctgctgtactgtgagctgctgcagtgggaggaccggcccctgcgggagttcctgcactaccccagccagacagagtggcagaggaaggagggcctgtgcaggaagatcatccactacttcaacaagggcaagtcctgggagtttggcatccccctgtgccgggagctggcctgccagtatgagagcctgtatgactaccagagcctgtcctggatcaggaagatggaggccagctactatgacaacatcatggagcagcagaggctggagcctgagttcttccgggtgggcttctacggcaggaagttccccttcttcctgaggaacaaggagtatgtgtgccggggccatgactatgaaaggctggaggccttccagcagaggatgctgtctgagttcccccaggccgtggccatgcagcaccccaaccacccagatgatgccatcctgcagtgtgatgcccagtacctgcagatctatgctgtgacccccatcccagactatgtggatgtgctgcagatggacagagtgcctgacagagtgaagagcttctacagagtgaacaacgtgaggaagttccgctatgaccggcccttccacaagggccccaaggacaaggaaaatgagttcaagagcctgtggattgaaagaaccaccctgaccctgacccacagcctgcccggcatcagccgctggtttgaggtggagcggcgggagctggtggaggtgagccccctggagaatgccatccaggtggtggagaacaagaaccaggagctgcggagcctcatcagccagtaccagcacaagcaggtgcacggcaacatcaacctgctgtccatgtgcctgaatggagtgattgatgctgctgtgaatggaggcatcgcccgctaccaggaggccttctttgacaaggactacatcaacaagcaccctggagatgctgagaagatcacccagctgaaggagctgatgcaggagcaggtgcacgtgctgggcgtgggcctggccgtgcatgagaagtttgtgcaccctgagatgaggcccctgcacaagaagctgattgaccagttccagatgatgagggccagcctgtaccacgagttccctggcctggacaagctgagccctgcctgcagcggcaccagcaccccaagaggaaatgtgctggccagccacagccccatgagccctgagagcatcaagatgacccaccgccacagccccatgaacctgatgggcaccggccgccacagcagcagcagcctgagcagccacgccagcagcgaggccggcaacatggtgatgctgggagatggctccatgggagatgcccctgaggacctgtaccaccacatgcagctggcctaccccaacccccgctaccagggctctgtgaccaacgtgtctgtgctgagcagcagccaggccagccccagcagcagcagcctgagcagcacccacagcgcccccagccagatgatcaccagcgcccccagcagcgcccggggcagccccagcctgcctgacaagtacagacatgcccgggagatgatgctgctgctgcccacctacagagaccggcccagcagcgccatgtacccagctgccatcctggagaatggccagccccccaacttccagagggccctcttccagcaggtggtgggcgcctgcaagccctgcagcgaccccaacctgtctgtggccgagaagggccactacagcctgcactttgatgccttccaccaccccctgggggacaccccaccagccctgcctgcccggaccctgaggaagagccccctgcaccccatcccagccagccccaccagcccccagagcggcctggatggcagcaacagcaccctgagcggcagcgccagcagtggagtgagcagcctgtctgagagcaactttggccacagcagcgaggccccacccaggacagacaccatggacagcatgcccagccaggcctggaatgctgatgaggacctggagcccccctacctgcctgtgcactacagcctgtctgagagcgctgtgctggacagcatcaaggcccagccctgccgcagccacagcgcccctggctgtgtgatcccccaggaccccatggaccccccagccctgccccccaagccctaccacccccggctgcctgccctggagcatgatgagggcgtgctgctgcgggaggagacagagcggccccggggcctgcacaggaaggcccccctgcccccaggcagcgccaaggaggagcaggccaggatggcctgggagcacggccgcggggagcagtag

SEQ ID NO: 151291 - DNA, 6093 bp, Artificial Sequence
  derived and/or modified sequence
atgtggacccccaccgaggaggagaagtacggcgtggtgatctgctcctttcgtggcagcgtgccccaaggtctggttttagagatcggggagactgtacaaattctggaaaaatgcgaaggatggtacaggggagtctcaacaaagaaaccgaacgtaaaaggcatttttcccgccaactacattcacctcaagaaagctatcgtgagtaatcgaggtcaatatgaaacagttgtgccattggaagattccatcgtgactgaagtcacagcaactctacaggagtgggcctcactgtggaaacagctgtacgtgaagcacaaggttgacctgttttacaagctacggcacgtgatgaatgagttgatcgatctacggcggcagctgcttagcggacacctcactcaagaccaggttagggaggtgaagagacatataacagtgcggctagactgggggaacgagcacctcggactcgacctggtcccacgaaaggacttcgaagtagtggactcagatcaaatctcagtgtcggacctttataagatgcacctgagcagtcgacagtcagttcagcagtccactagtcaagttgacactatgaggcctcgccatggagagacgtgcagaatgcccgtgcctcatcatttttttctatccctgaagtcattcacgtacaatacaataggtgaggacacagacgtcttcttcagcctgtatgacatgcgcgagggcaaacaaatatcagagcgctttctcgttcggttgaacaaaaatggaggcccgaggaatccagaaaagattgaaaggatgtgtgccctgtttaccgacctttcttccaaagacatgaaaagggacctgtacattgttgcccatgtgatacgaataggaagaatgttgttgaatgacagcaaaaaggggccaccacacctacattataggaggccctacggctgtgctgttctatccattctggacgtccttcagagtctgacagaagtgaaggaggaaaaggatttcgtgctgaaagtatacacctgcaataatgagtccgaatggagccagatccacgaaaacataataagaaagtccagcgccaaatactccgctcctagtgccagccatgggctgatcatcagcctgcaactcctgagaggcgacatggaacagattcggcgagaaaacccaatgatatttaataggggactggctataactagaaagctcggttttccagatgtcattatgccaggcgacatcaggaacgacttatacctgactctcgagaagggtgatttcgagaggggcggaaaatctgtgcagaagaacatagaagtgaccatgtatgtgctgtacgcggacggagagatactgaaggattgcatctctctgggttcaggtgaaccgaaccgctccagctatcactctttcgtactgtatcatagtaactccccccgttggggcgaaataatcaagctgcctatccctattgacaggtttaggggttcccatttgcgatttgaatttaggcattgctcaacaaaggacaagggcgaaaagaagttgtttggttttgcattctctacacttatgagagacgatggcaccaccctcagcgatgacattcatgaactctacgtttacaagtgtgacgaaaactctactttcaataaccacgcgctatacctcggactgccatgctgcaaggaggattacaacggatgtccaaacattccgtcctcactgatctttcagaggtccaccaaggagtcgttctttatcagtactcagctctcatcaacgaagttaactcagaacgtggacctcttggctcttctcaagtggaaggcctttccagatcggattatggacgttctcggaagactgagacacgtgtcaggcgaggagattgtcaagtttctgcaggatatcctggatacactattcgtgattctggacgacaacacagaaaagtacgggctgctggtgtttcagagcctggtgttcatcattaacctgctaagagacatcaaatattttcacttccgccccgtgatggatacctacatacaaaagcatttcgcaggcgcgctggcttataaggaactcattcgctgcttgaagtggtacatggattgcagcgccgagctgattcgacaggatcacatccaggaggcaatgcgggcactggaatatcttttcaaatttattgttcagtcacggatcctgtactcccgagctacctgtgggatggaggaggagcaattcagaagcagcattcaagaactctttcagtccatccgattcgtgttaagcctcgatagcagaaattctgaaacactcctattcacacaggccgcactacttaactcctttcctaccatctttgatgaactcctccaaatgtttacggtgcaagaggtcgccgagtttgttagaggaacactcggcagcatgccatccactgtgcatatcggtcagtctatggacgtggtgaaactgcaaagcattgctcgtaccgttgactcacggctgtttagcttctcagaaagtcggcgtatcctgttgcccgtggtgctccatcacattcatctccatctgcggcagcaaaaggagctcctgatctgctccggcattctgggaagtatcttttcaattgttaagacgagttcattggaagccgacgtgatggaggaagtggagatgatggtcgagtcgctgcttgatgtgctcctgcagactttgctcacaatcatgtccaagagccatgctcaggaagcagtcaggggtcagcggtgcccacaatgtaccgctgagataaccggggagtacgtcagttgtctgctgagtctgctccgacaaatgtgtgacacacactttcagcatctgctggataattttcagtctaaggatgagctgaaggagtttctgctgaaaatcttctgtgtctttagaaatttaatgaaaatgagcgtgttccctcgtgactggatggttatgagactgttaacttccaacattattgtaaccaccgtgcagtatctctcttctgccctgcataaaaacttcactgaaacggacttcgactttaaggtttggaattcctacttttctctcgccgtgctgttcatcaatcagccatcattgcagctcgagattatcacaagcgctaagcgtaagaaaatcctagataagtacggcgatatgcgagtcatgatggcatacgagttatttagcatgtggcagaatttgggagagcacaagatccactttatacccgggatgatcgggccttttctcggcgtaacgcttgttccacagcccgaggtccggaacattatgattcctatttttcacgatatgatggactgggaacaacgcaagaatggaaattttaagcaggtggaagcagagcttatagacaaattggattctatggtctctgaaggcaaaggcgacgaatcgtaccgtgaacttttcagtctgctgacacaactgttcgggccttacccttcactgctggagaaagttgaacaggagacatggagagagactggaatatccttcgtcaccagcgttacccgacttatggagcggctgctggattacagagactgcatgaaaggagaggaaactgagaacaaaaagatcggttgtactgtgaatctgatgaacttctacaagagcgagatcaataaagaggaaatgtacatacggtacatacacaaactttgtgatatgcacctccaagccgagaactacactgaggccgcgttcacattgcttttgtattgtgaactgcttcaatgggaagaccggcctctgcgcgaatttctccattatccgagccagacagagtggcagcgtaaagaggggctctgccgtaaaattattcactactttaataaggggaagtcgtgggaatttgggatcccactctgccgcgaactggcctgtcagtacgagtcactgtatgactaccagtccttaagctggatccgcaaaatggaagcgtcttactatgacaacatcatggagcagcagcggttggagcccgaattttttagagtaggcttttacgggcggaaatttcctttttttctgcgcaacaaagagtatgtctgccgcggacatgattatgaacgactcgaggcctttcagcagcggatgttgtccgaattcccacaagccgtggcaatgcaacacccgaaccatccagatgatgcaattttgcagtgtgacgctcagtacttgcaaatttacgccgttaccccgatcccagactacgtggacgtgcttcagatggatcgtgtgcctgaccgggtcaagtccttctacagagtgaataatgttcgaaagtttaggtatgatcgtccctttcacaagggtccgaaggacaaggagaacgagtttaagtccctttggatcgaacggactactctcacgctgacccactctctacccggcatcagcaggtggttcgaagtcgaacgccgcgagctggtagaggtgagtcctttggagaatgctatacaggtggtggaaaacaagaaccaggaactgagaagcctgatttctcagtatcagcataagcaggttcacggcaacatcaacctcctcagcatgtgcctgaacggagtcatcgatgcagctgttaacggcggcatcgctaggtatcaggaggctttctttgacaaagattatatcaataaacatcctggcgatgcagagaaaattactcagcttaaagagctgatgcaggaacaggtgcatgtgttaggcgtcggcctcgcagtgcatgagaagttcgtgcatcctgagatgcggccactacataaaaagcttattgatcaatttcagatgatgagggcctcactgtatcacgaatttcctgggctggacaagctgagtcctgcgtgcagcggaacctccacccctcggggcaacgtgctcgccagccacagccctatgtccccagaaagcatcaagatgacccacaggcacagcccaatgaatttaatgggcaccggacgacacagctcttctagtctgagttcccacgcgtcttcagaggctgggaacatggtgatgctcggcgatgggtccatgggggatgccccagaagatctctatcaccacatgcagcttgcctatccgaatcctaggtaccagggcagcgtgaccaacgtcagcgtcctgtcaagtagtcaggccagtccctctagtagtagcctttcctcgactcacagcgcaccttcccaaatgatcacgtcggctccttcaagtgcacgtggatccccaagccttcctgacaagtaccggcatgcccgtgagatgatgctacttctgccaacttatagggataggccatcatctgccatgtatcctgccgctattctcgagaacggccagcccccgaactttcagcgagcgctcttccagcaggtcgtcggcgcttgtaagccttgctctgatcctaacctgtccgtcgctgagaaaggtcactattcactgcattttgatgcatttcatcaccctttgggcgacacccctcccgctttaccagccaggacgctccggaaatcgcctctccatcctatccctgcgagcccgactagcccccagagcggactcgacggctcgaactccactctaagcggctccgcaagcagtggagtttccagtctcagtgaatccaactttggccacagttcagaagccccacccaggacagacacaatggacagcatgccgtcgcaggcctggaatgcagacgaggatctggagccaccataccttcccgtgcattatagcctcagcgagagcgcagttctcgactcgatcaaagcccagccctgtagaagccactctgcaccgggatgcgtaattccacaggaccctatggatccccctgccctgcccccgaagccataccatcctaggttgcctgcactcgagcacgacgagggcgtcctcctgcgtgaggagaccgaacgtccccgaggactccacaggaaagctccactgcctcctggctccgcgaaagaagaacaggcaaggatggcctgggagcatggaaggggagagcagtag

SEQ ID NO: 151292 - DNA, 6093 bp, Artificial Sequence
  derived and/or modified sequence
atgtggacgcctactgaagaagagaaatatggtgtggtaatctgcagcttccgcggatcggtaccccagggcctggtgttggagataggggaaacagtgcagatcctggagaagtgcgaggggtggtaccgtggagtgagcaccaaaaaacccaatgtcaagggaatcttccctgcaaactacattcatttgaaaaaggccatagtatcgaataggggacaatatgaaacggtcgtaccacttgaggactccatcgtaaccgaggtcactgcgacactgcaggaatgggcctccctatggaagcaactctatgtaaagcataaagtcgacttattctacaaactacgccacgtcatgaacgaattgatcgatctacgcaggcagctgctgagtggccatttgactcaggaccaggtgagggaagtaaaacggcacattacagttcgccttgattggggcaacgagcatcttgggctcgacctcgtaccccgaaaggattttgaggtagtggactctgatcagatatctgtatccgacctgtacaaaatgcacctgtccagtcggcagtccgtgcagcagtctacatcacaggtggacacgatgcggccacgccacggcgaaacctgtcgcatgcccgtgccccatcacttctttctatctctcaagtctttcacatataacaccatcggtgaagacactgatgtatttttctcactctacgatatgcgcgaaggcaagcagatcagtgagcgttttctagtgagactgaacaagaatggcggtccgaggaaccccgaaaagattgagcggatgtgcgcacttttcacggatctgtcctctaaagacatgaagcgggatctctacattgtagctcatgtcattagaattggtaggatgctactgaacgactcaaaaaagggcccaccccacctgcattaccgccgtccatatggctgcgcagttctttccatcctggacgttctgcagtcactgaccgaggtgaaagaggaaaaggactttgtgctgaaagtgtacacatgcaacaatgagagcgagtggtcccagatccacgaaaatatcattcgtaaaagctctgcaaagtatagcgcacctagcgcaagtcacggactcatcatcagcttgcagcttttacggggtgacatggagcagattaggcgcgagaatcccatgattttcaacagaggtttggctatcacgaggaagctggggttccccgatgttattatgccaggcgacattagaaacgacctgtatctgaccctggagaagggtgatttcgagaggggagggaagtccgtccaaaaaaatattgaggtcaccatgtacgtgctttatgcggatggcgaaatcctgaaggactgtatttcgctgggatcaggcgaaccgaaccgctccagctaccacagtttcgtcctctatcattctaattctccacgatggggagagatcattaaactgcctattcccatcgacagatttcgcggatcgcacttacggtttgagtttcggcattgctctacaaaggataagggcgagaagaaactgttcgggtttgcattttctaccctcatgcgagatgacggcaccacactcagtgacgatattcatgaactgtacgtttacaaatgcgacgaaaacagtacttttaataaccacgcattgtacctgggcctgccctgctgtaaggaggattataatgggtgtcctaatattccctccagcctgatctttcaacggtccaccaaagaatcttttttcataagtactcaactctcaagcaccaaactgacccagaatgtggacctgctggcactgctgaaatggaaagccttcccagacagaatcatggatgtactcgggaggttacggcacgtatctggcgaggagatcgttaaatttcttcaagatatcctagacaccttattcgtgatcttagacgataatacagagaaatacggcttgctggtgtttcagagcctagtgttcattattaacctgctcagagatattaagtattttcacttcagacccgtcatggacacttacatacaaaaacattttgccggtgcgctggcctataaagagttaattaggtgcctgaagtggtatatggactgttccgccgaactgatcagacaggaccacatccaggaggcgatgcgggcactagagtatctctttaaatttatcgtgcaatcccgcattctctatagcagagctacctgcgggatggaagaggaacagtttcggagtagtattcaagagctgttccagagtattcgtttcgtactgagtctcgattctcgcaacagcgaaacactgctcttcacccaggctgccctcctgaattcttttcccaccatcttcgacgaattgctgcagatgttcactgtgcaagaggtggccgagttcgtgcgcggtacccttggcagcatgccgtcaacggtgcacataggccagtccatggacgtcgtcaagctgcagtctattgctcgaaccgtggatagcaggctgttcagtttcagcgagtctcgcaggattctacttcccgtagtgctgcatcacatccacctgcacctcaggcaacagaaagagttgttaatctgttccggcatcctcgggtcaattttctctattgtcaaaacaagtagcttagaagcggatgtgatggaggaggtggagatgatggtcgaatcactcttggacgtgctgctgcagaccctcctgaccatcatgagcaagagtcacgcccaggaagccgttcgcggacagagatgcccccagtgtaccgccgagattacgggggaatacgtgtcatgtttactgagccttctgcggcagatgtgcgacacacactttcagcacctgctggataactttcagagcaaggatgaactgaaagagttcctgctgaaaatcttctgtgtcttcaggaacttaatgaaaatgtccgtgtttcctcgcgattggatggtcatgaggctgctcaccagcaacattattgtgacaacagtgcaatatctatcgagtgcactgcacaagaacttcacggagacggactttgattttaaagtgtggaacagttacttcagcctggccgtgctcttcatcaatcagccttccctgcagctggaaatcattacgtccgctaagagaaaaaagatcctggataaatacggtgacatgcgcgtgatgatggcctacgagcttttctccatgtggcagaatctgggcgaacataaaatccacttcattccagggatgattggccctttcctgggggtgactctggttcctcagccagaagtcagaaacatcatgattccaatcttccatgatatgatggattgggaacaaagaaaaaacgggaattttaaacaggtggaggctgaattgattgataaactggacagtatggtgtccgagggaaagggtgatgaatcttacagagagttattctctcttcttactcaactgtttggtccgtacccatcgctgctagaaaaggtggagcaggagacatggcgcgagaccggcatctccttcgtgaccagtgtcacgagacttatggaacgcctcttggactaccgcgactgtatgaaaggtgaggagacagagaataaaaaaataggttgcactgtgaatctgatgaatttttataaaagcgagattaataaggaggagatgtatatacgttacatccacaaactgtgtgatatgcacctgcaggcagaaaactacacagaggccgcattcaccctgctgctgtactgcgaactgctgcagtgggaagacaggcccctaagagagtttctgcactacccgagccagactgaatggcagaggaaggagggtctgtgccgcaaaattatacattatttcaacaaagggaaatcttgggagtttggtatacctttgtgccgtgagttggcttgccagtatgagtccctgtacgactaccagagtctctcctggatcaggaaaatggaagccagctactatgataatatcatggaacagcagcgacttgaacctgaattttttcgagtgggcttctatggcaggaagttccctttctttctccgtaataaggagtatgtttgccgtgggcacgactatgagcgactagaggctttccaacagcgaatgttaagcgaattcccacaggccgttgcaatgcagcatcccaaccacccggacgacgccatactgcagtgtgatgcacagtatctgcagatttacgctgtaacacccatccctgattatgtggacgtcttacaaatggaccgcgtgccagacagggtcaagtccttttaccgggtcaataacgtaaggaaatttcgctatgaccgcccttttcataaagggcctaaggataaggagaacgagtttaagtctctttggattgagcgcacgacactgaccctgactcattctctgccagggatatctagatggttcgaagtcgagcgcagagagctcgttgaggtatccccactggagaatgccatccaggtcgtggaaaacaagaaccaagagctgcggagcctgatctcacagtatcaacataaacaggtccacggcaacatcaacttgttgagtatgtgcctgaacggcgtcattgatgccgctgttaatggagggatcgcaagatatcaagaggccttttttgataaagattacataaataagcaccccggtgacgctgagaaaataactcaacttaaagagctgatgcaggaacaagtgcatgtcctgggagtgggtctcgcggtgcacgaaaagtttgtccacccagagatgcgccctctgcataagaagctgatcgaccagtttcaaatgatgcgcgcttccctgtaccacgaatttccaggtttagacaagctgtccccagcctgttctggtacctcgacccccaggggcaatgtcctcgcaagtcatagtccaatgagcccagagagcattaagatgacccacagacattctcctatgaatctgatggggacgggacggcactcctcctcgtcactatcttcccacgctagttctgaggctggcaatatggtgatgcttggagacggatctatgggggacgctcccgaggacctgtaccaccacatgcagctggcctaccctaatcctagatatcaagggtcagtgactaatgtgagcgtcctctccagcagccaagcttccccttcttctagttccctgtctagcacccactcagctccctcccagatgattacatcggcaccaagctccgcacggggttctccaagcctgccagataagtatagacatgcacgggagatgatgctgctgttgccaacgtatagagatagacctagctctgcaatgtatccagccgctattctggagaatggacagccgcctaacttccagcgtgctctctttcagcaagtcgttggagcctgcaaaccatgttctgacccgaacctttcagttgcggagaagggacactactccctacatttcgacgcctttcaccatcctctgggcgatacccctccagccctgcctgccaggactttgcgcaagtctcccctgcacccaatcccggcaagcccaacttctccccagtcgggtttagacggatctaactcaacactatcaggttccgctagttcaggagtgtcctcgctctccgaaagcaactttggccactcctctgaagcgcctcctcgcaccgacacaatggattccatgcctagccaggcatggaatgcagacgaagacctggagccaccttacctgcccgtgcattattccctaagtgaatcagccgtgctggattctattaaagcccagccatgccgcagccactcagccccaggatgtgtaataccacaagaccccatggatccgccagctctaccccctaaaccttaccatcctaggttgcctgctctggagcacgacgaaggcgtgctccttcgtgaggagactgaacgcccacgtggtttacatcggaaggccccattgcctccgggaagcgctaaggaagaacaggccagaatggcctgggaacatggacgtggggaacagtag

SEQ ID NO: 151293 - DNA, 6093 bp, Artificial Sequence
  derived and/or modified sequence
atgtggacccccaccgaggaggagaagtacggcgtggtgatctgcagcttcagaggcagcgtgccccagggcctggtgctggagatcggcgagaccgtgcagatcctggagaagtgcgagggctggtacagaggcgtgagcaccaagaagcccaacgtgaagggcatcttccccgccaactacatccacctgaagaaggccatcgtgagcaacagaggccagtacgagaccgtggtgcccctggaggacagcatcgtgaccgaggtgaccgccaccctgcaggagtgggccagcctgtggaagcagctgtacgtgaagcacaaggtggacctgttctacaagctgagacacgtgatgaacgagctgatcgacctgagaagacagctgctgagcggccacctgacccaggaccaggtgagagaggtgaagagacacatcaccgtgagactggactggggcaacgagcacctgggcctggacctggtgcccagaaaggacttcgaggtggtggacagcgaccagatcagcgtgagcgacctgtacaagatgcacctgagcagcagacagagcgtgcagcagagcaccagccaggtggacaccatgagacccagacacggcgagacctgcagaatgcccgtgccccaccacttcttcctgagcctgaagagcttcacctacaacaccatcggcgaggacaccgacgtgttcttcagcctgtacgacatgagagagggcaagcagatcagcgagagattcctggtgagactgaacaagaacggcggccccagaaaccccgagaagatcgagagaatgtgcgccctgttcaccgacctgagcagcaaggacatgaagagagacctgtacatcgtggcccacgtgatcagaatcggcagaatgctgctgaacgacagcaagaagggccccccccacctgcactacagaagaccctacggctgcgccgtgctgagcatcctggacgtgctgcagagcctgaccgaggtgaaggaggagaaggacttcgtgctgaaggtgtacacctgcaacaacgagagcgagtggagccagatccacgagaacatcatcagaaagagcagcgccaagtacagcgcccccagcgccagccacggcctgatcatcagcctgcagctgctgagaggcgacatggagcagatcagaagagagaaccccatgatcttcaacagaggcctggccatcaccagaaagctgggcttccccgacgtgatcatgcccggcgacatcagaaacgacctgtacctgaccctggagaagggcgacttcgagagaggcggcaagagcgtgcagaagaacatcgaggtgaccatgtacgtgctgtacgccgacggcgagatcctgaaggactgcatcagcctgggcagcggcgagcccaacagaagcagctaccacagcttcgtgctgtaccacagcaacagccccagatggggcgagatcatcaagctgcccatccccatcgacagattcagaggcagccacctgagattcgagttcagacactgcagcaccaaggacaagggcgagaagaagctgttcggcttcgccttcagcaccctgatgagagacgacggcaccaccctgagcgacgacatccacgagctgtacgtgtacaagtgcgacgagaacagcaccttcaacaaccacgccctgtacctgggcctgccctgctgcaaggaggactacaacggctgccccaacatccccagcagcctgatcttccagagaagcaccaaggagagcttcttcatcagcacccagctgagcagcaccaagctgacccagaacgtggacctgctggccctgctgaagtggaaggccttccccgacagaatcatggacgtgctgggcagactgagacacgtgagcggcgaggagatcgtgaagttcctgcaggacatcctggacaccctgttcgtgatcctggacgacaacaccgagaagtacggcctgctggtgttccagagcctggtgttcatcatcaacctgctgagagacatcaagtacttccacttcagacccgtgatggacacctacatccagaagcacttcgccggcgccctggcctacaaggagctgatcagatgcctgaagtggtacatggactgcagcgccgagctgatcagacaggaccacatccaggaggccatgagagccctggagtacctgttcaagttcatcgtgcagagcagaatcctgtacagcagagccacctgcggcatggaggaggagcagttcagaagcagcatccaggagctgttccagagcatcagattcgtgctgagcctggacagcagaaacagcgagaccctgctgttcacccaggccgccctgctgaacagcttccccaccatcttcgacgagctgctgcagatgttcaccgtgcaggaggtggccgagttcgtgagaggcaccctgggcagcatgcccagcaccgtgcacatcggccagagcatggacgtggtgaagctgcagagcatcgccagaaccgtggacagcagactgttcagcttcagcgagagcagaagaatcctgctgcccgtggtgctgcaccacatccacctgcacctgagacagcagaaggagctgctgatctgcagcggcatcctgggcagcatcttcagcatcgtgaagaccagcagcctggaggccgacgtgatggaggaggtggagatgatggtggagagcctgctggacgtgctgctgcagaccctgctgaccatcatgagcaagagccacgcccaggaggccgtgagaggccagagatgcccccagtgcaccgccgagatcaccggcgagtacgtgagctgcctgctgagcctgctgagacagatgtgcgacacccacttccagcacctgctggacaacttccagagcaaggacgagctgaaggagttcctgctgaagatcttctgcgtgttcagaaacctgatgaagatgagcgtgttccccagagactggatggtgatgagactgctgaccagcaacatcatcgtgaccaccgtgcagtacctgagcagcgccctgcacaagaacttcaccgagaccgacttcgacttcaaggtgtggaacagctacttcagcctggccgtgctgttcatcaaccagcccagcctgcagctggagatcatcaccagcgccaagagaaagaagatcctggacaagtacggcgacatgagagtgatgatggcctacgagctgttcagcatgtggcagaacctgggcgagcacaagatccacttcatccccggcatgatcggccccttcctgggcgtgaccctggtgccccagcccgaggtgagaaacatcatgatccccatcttccacgacatgatggactgggagcagagaaagaacggcaacttcaagcaggtggaggccgagctgatcgacaagctggacagcatggtgagcgagggcaagggcgacgagagctacagagagctgttcagcctgctgacccagctgttcggcccctaccccagcctgctggagaaggtggagcaggagacctggagagagaccggcatcagcttcgtgaccagcgtgaccagactgatggagagactgctggactacagagactgcatgaagggcgaggagaccgagaacaagaagatcggctgcaccgtgaacctgatgaacttctacaagagcgagatcaacaaggaggagatgtacatcagatacatccacaagctgtgcgacatgcacctgcaggccgagaactacaccgaggccgccttcaccctgctgctgtactgcgagctgctgcagtgggaggacagacccctgagagagttcctgcactaccccagccagaccgagtggcagagaaaggagggcctgtgcagaaagatcatccactacttcaacaagggcaagagctgggagttcggcatccccctgtgcagagagctggcctgccagtacgagagcctgtacgactaccagagcctgagctggatcagaaagatggaggccagctactacgacaacatcatggagcagcagagactggagcccgagttcttcagagtgggcttctacggcagaaagttccccttcttcctgagaaacaaggagtacgtgtgcagaggccacgactacgagagactggaggccttccagcagagaatgctgagcgagttcccccaggccgtggccatgcagcaccccaaccaccccgacgacgccatcctgcagtgcgacgcccagtacctgcagatctacgccgtgacccccatccccgactacgtggacgtgctgcagatggacagagtgcccgacagagtgaagagcttctacagagtgaacaacgtgagaaagttcagatacgacagacccttccacaagggccccaaggacaaggagaacgagttcaagagcctgtggatcgagagaaccaccctgaccctgacccacagcctgcccggcatcagcagatggttcgaggtggagagaagagagctggtggaggtgagccccctggagaacgccatccaggtggtggagaacaagaaccaggagctgagaagcctgatcagccagtaccagcacaagcaggtgcacggcaacatcaacctgctgagcatgtgcctgaacggcgtgatcgacgccgccgtgaacggcggcatcgccagataccaggaggccttcttcgacaaggactacatcaacaagcaccccggcgacgccgagaagatcacccagctgaaggagctgatgcaggagcaggtgcacgtgctgggcgtgggcctggccgtgcacgagaagttcgtgcaccccgagatgagacccctgcacaagaagctgatcgaccagttccagatgatgagagccagcctgtaccacgagttccccggcctggacaagctgagccccgcctgcagcggcaccagcacccccagaggcaacgtgctggccagccacagccccatgagccccgagagcatcaagatgacccacagacacagccccatgaacctgatgggcaccggcagacacagcagcagcagcctgagcagccacgccagcagcgaggccggcaacatggtgatgctgggcgacggcagcatgggcgacgcccccgaggacctgtaccaccacatgcagctggcctaccccaaccccagataccagggcagcgtgaccaacgtgagcgtgctgagcagcagccaggccagccccagcagcagcagcctgagcagcacccacagcgcccccagccagatgatcaccagcgcccccagcagcgccagaggcagccccagcctgcccgacaagtacagacacgccagagagatgatgctgctgctgcccacctacagagacagacccagcagcgccatgtaccccgccgccatcctggagaacggccagccccccaacttccagagagccctgttccagcaggtggtgggcgcctgcaagccctgcagcgaccccaacctgagcgtggccgagaagggccactacagcctgcacttcgacgccttccaccaccccctgggcgacaccccccccgccctgcccgccagaaccctgagaaagagccccctgcaccccatccccgccagccccaccagcccccagagcggcctggacggcagcaacagcaccctgagcggcagcgccagcagcggcgtgagcagcctgagcgagagcaacttcggccacagcagcgaggccccccccagaaccgacaccatggacagcatgcccagccaggcctggaacgccgacgaggacctggagcccccctacctgcccgtgcactacagcctgagcgagagcgccgtgctggacagcatcaaggcccagccctgcagaagccacagcgcccccggctgcgtgatcccccaggaccccatggacccccccgccctgccccccaagccctaccaccccagactgcccgccctggagcacgacgagggcgtgctgctgagagaggagaccgagagacccagaggcctgcacagaaaggcccccctgccccccggcagcgccaaggaggagcaggccagaatggcctgggagcacggcagaggcgagcagtag

SEQ ID NO: 151294 - DNA, 8455 bp, Artificial Sequence
  derived and/or modified sequence
gcggggccgcgcccggcacggccatgtggacccccacggaggaggagaaatacggcgtagtgatatgcagctttcgaggatctgtccctcaagggttggtcttagaaataggagaaacagtccagattcttgaaaaatgtgaaggttggtacagaggagtttcaacaaagaagccaaatgtgaaggggatctttcctgcaaattacattcacttgaaaaaggcaattgtcagtaatagggggcagtatgaaactgtggttccacttgaagattctattgtgactgaggttacagcaactctacaagaatgggcaagtttgtggaaacagttgtatgtgaaacacaaagtagatcttttctacaaactacgccatgtgatgaatgaacttattgacctgcgaaggcagctactgtctggtcacctgactcaggatcaggtgcgggaggttaagcggcacatcaccgtgcgcctggactggggtaatgaacatttgggcctggacctggtgcctcggaaggactttgaagtagtggactcggaccagattagtgtctcagatctctataagatgcatttatctagccggcagagtgtacagcaaagcacatcccaggtagatacaatgcgcccacgtcatggggaaacatgtcggatgccagtgccacatcacttcttcctcagcctgaagagtttcacttacaatactattggggaagataccgatgtcttcttttccttatatgacatgagggaaggcaagcagatcagtgagcggtttctggtaagactgaacaagaatggtgggccgaggaacccagagaagatagaacgaatgtgtgccctttttacagatctgagcagcaaagatatgaagagagatttgtatatcgttgcccatgtgatccgaataggccggatgctcctgaacgactcaaagaaaggtcctcctcacctgcactacaggcgaccatatggctgtgcggtcctaagcatcttggatgtcctacagtcactcacagaagtaaaggaagaaaaggattttgttcttaaggtttacacgtgcaacaacgagagtgagtggtcccagatccacgagaacatcatccgaaagtccagtgccaagtactctgcccccagcgccagccatggtcttatcatttctctgcagcttcttcgtggagacatggaacagattcggagagaaaatcccatgatatttaataggggattggcaattacaagaaaattgggatttcctgatgtcattatgccaggtgatatccgcaatgacctgtacctaaccctggagaagggggatttcgagagaggaggaaagagtgtacaaaagaatattgaagtgaccatgtatgtgctttatgcagatggagaaatcttgaaggattgcatcagcttgggttcaggagagccaaataggagttcctaccactcctttgtcctctaccacagtaatagtcctcgctggggagaaattatcaaattgcctatccccattgaccggttccggggctcccacctgcgctttgagttcagacattgttccacaaaggacaaaggggaaaagaaactctttggctttgcattctcaaccctgatgcgtgatgatggcaccaccctctcagatgatattcacgagctttatgtgtacaagtgtgatgagaatagcacgtttaataaccatgctctgtacctgggcctgccctgctgcaaagaggactacaatggctgccctaatattccttctagcctcatcttccagcgcagcaccaaagagtctttcttcatctccactcagctctcctctaccaaactcacccagaatgtggacctcctagctctgctgaagtggaaagccttccccgaccggatcatggatgtactagggcggctgcggcatgtcagtggggaggaaattgttaagtttctgcaggacatcttagatacactctttgtgattttggatgataatacagagaagtacggcctgttggtttttcagtctctggtgttcatcatcaacctgctccgagacatcaagtattttcactttcgacctgtgatggacacgtatatccagaagcactttgctggagctctggcatacaaggagctcatccgctgtttgaagtggtatatggactgctcagcagaactgattcgacaggaccacattcaagaagctatgcgggccttggagtaccttttcaagttcattgtacagtcacggatcctgtactcacgagccacttgtggaatggaagaggaacaattcagatccagtatccaagaacttttccagtccatccggtttgtgctcagtctggacagccgaaactcagaaacactcctttttactcaggctgcactcctcaattctttcccaaccatctttgatgagcttctgcaaatgttcaccgtgcaagaggtggcagagtttgtgagagggacactggggagcatgcccagcactgtgcacattgggcagtcaatggacgtggtcaagctgcagtccattgccaggacagtggatagccgcctgttttctttctcagaatcccgccgcatcctgcttcctgtggttctccatcacattcaccttcacctgaggcagcagaaagagctgctaatttgctcagggattcttggcagcatcttctccatcgtcaagaccagctctctggaggcagatgtcatggaggaagtagagatgatggtggagagcctcctggacgtgctcttgcagactctgctcaccatcatgagcaaatcgcacgctcaggaggcggtaagagggcagcggtgcccgcagtgcacagccgagatcactggcgagtatgtgtcctgccttctctcactgctccgccagatgtgtgacacccatttccagcacctcctggacaacttccagagcaaagatgaactcaaggaatttctgctgaagattttttgcgtgttccggaacctgatgaagatgagtgtcttccctcgggactggatggtaatgagactgctcacaagcaatattatagtcactactgtccagtacctgtcctctgcactgcacaagaatttcacagagactgactttgactttaaggtgtggaattcttactttagcctggcagttctattcataaatcagccaagccttcagctagaaattatcacctcagccaaaaggaagaagattctagataagtatggggacatgcgtgtaatgatggcctatgaactgttcagcatgtggcagaatttgggtgaacataagatccactttattccgggaatgattggtccttttctgggtgtgacactggtcccacagccagaagtacggaatatcatgattcccatctttcatgacatgatggactgggagcagagaaaaaatggcaacttcaaacaggtggaggccgagttgattgacaagctggacagcatggtgtcagaagggaaaggtgacgagagctacagggagctcttcagcctactaacccagctgtttgggccctaccccagcctgctggagaaggttgaacaagaaacatggcgcgagaccggcatttcctttgtgacctcagtcacccgcctcatggaacgtcttcttgactacagggactgcatgaaaggagaggaaacagagaataagaagataggctgcactgttaacctgatgaatttttacaaatctgagattaacaaggaagaaatgtatatccgctacatccataagctttgtgacatgcacttgcaggccgaaaactacacagaggccgcatttaccctgctcctttactgtgagctgctgcagtgggaggaccggccactacgggaattcctccactacccatcgcagacagagtggcagcggaaggagggactgtgccggaagatcattcactacttcaacaaaggcaagagctgggagtttgggatcccactgtgcagggagctggcgtgtcagtacgagagcctctatgattaccagagcctcagctggattcggaaaatggaggccagctactatgacaacattatggagcagcaacgcctggagcctgagttctttcgggtcggcttctatggcaggaagtttcctttctttcttcggaacaaagaatacgtgtgccgtggccatgactacgagaggctggaggccttccagcagaggatgctcagtgagtttccgcaggctgtcgccatgcagcaccccaaccatcctgatgacgccatcctacagtgcgatgcccagtacttgcagatctatgcagtgacgcccattccagattatgtggatgttctgcagatggatagggtaccagatcgagtcaagagcttctatcgcgtcaacaatgtgaggaagttccggtatgacaggccttttcacaaaggccccaaggacaaggagaatgaattcaagagcctgtggattgaacgtaccacactgaccctgacccacagcttgcctggcatctctcggtggtttgaagtggagaggagggaactggtggaggtgagccctctggagaatgccatccaagtggttgagaataagaaccaggagctacgctccctgatcagccagtatcaacacaagcaggtgcatggcaacattaacctgctaagcatgtgcctgaatggtgtcattgatgcagctgtcaatggaggcattgcacgctatcaggaggccttctttgataaagattacatcaacaagcacccaggagatgctgagaagatcacccagctcaaggagcttatgcaggagcaggttcatgtccttggagttgggctagcagttcatgagaagtttgtgcacccagaaatgcggcctctgcataagaagctaattgatcagttccagatgatgcgggccagtctctaccatgagtttccaggtttggataagctaagtcctgcatgttcaggcaccagcaccccacggggaaatgttctggcatcccatagccccatgagtccggagagcatcaagatgacccaccggcacagccccatgaacttgatgggcacaggccgccattcatcatcctctctctcctcacatgcgtctagtgaagcaggaaacatggtgatgctgggtgacggctccatgggtgatgctcctgaggacctgtaccaccacatgcagctcgcgtatcccaaccccaggtaccaaggctcagtcaccaacgtctctgttctgtcctcgtcccaggcaagcccttcttcctccagcctgagttccactcactcagcaccatcccagatgattacctctgccccttccagtgcccgaggctctccctctctgccagataagtaccgccatgcccgtgaaatgatgttgttgctgcccacataccgggaccgcccaagcagtgccatgtatccagcagccatcctggagaacggacagccgccgaatttccagcgagccctgttccagcaagtggtcggagcctgcaaaccctgcagtgatcccaatctgtctgtggctgaaaaaggtcattactccctacactttgacgccttccaccaccctctgggtgatacccccccagccctccctgcccggaccctgcgcaagtctcctctccaccctatcccagcctcccccacaagcccccagtcaggtctggacggcagcaactctacgctgtccggcagtgccagcagcggcgtgtcctccttgagtgagagtaactttgggcactcctcggaggccccacctcgcactgacaccatggactccatgccaagtcaggcctggaatgctgacgaagatcttgagccaccctacctccctgtccactacagcctctctgagtctgccgtcctggactccatcaaggcccagccatgccgaagccactcagccccagggtgcgtcatccctcaggaccccatggacccgcctgcgctgccgcccaagccctaccacccccgcctgccggccctggagcacgatgagggggtgctgctgcgtgaagagactgagaggcctcgaggcctgcaccgcaaggctccattgcctcctgggagcgctaaggaggagcaggcccgcatggcctgggagcacggccgaggggagcagtgaggggcaacgaggcggctgggatgccgccctcagtaagcagcttgccaatcactccaggtctgaaaagcaagtcccccagccccaccccagggagccagagaggcttgcactcaggagagaaccacccccaagtctccgttctactgccgtgaactcatgtgttgccatgtacagaggccacagcagcatgaagggttgtggcttccctttttatttttttacatttccatttctatgggttttcctttctttcctttatgcagtagatgctttcttcctcctgcagttctggaccatgtggagctacatggagaaattgcacagacagaatcactttgccacactgcagggcccaggagtgggagcccaggccctccctccagggtagagatgcaccgaatggaaattgcactaaggacctcttcctttgctgtatggacagaagagttcatggttgcattcagggattgcaaggaccatatagacatgtcacaggtggaaaaagggccacaagccgttttgcacaaatgcctgcccacctgcccctcttccatccaggagtgtgctactgaggggctggctggaccaacctgctggctcaggcatgtgactggcctaactgcatgcccagggcactgccagggttcaatgggccagccgtctcctactccaccttggatttttctctccatcacatcatttctgaccatttgctcccttccattcttgaaacacctcatgccccacaggagccccagtggtgactggatctgcaagggttatctcccgccctctggggtttgagtggaggtatggagccagagaggctatcctagctaccttcctcctagggggagctggtccccttcctatgtggtagagagactggtgtaagagtgtggggtgtggcaggcgccggaaatcctcaaagctttcagaagcatccagaatgcctaccatcagctcctgaatcagggattttcagcactacctctgagccatggggttggctgcccagccaggcttccaggccctgaggacatgtggtcaggttcagcaggctcctgggtaaagagggtgggagggggcttctccttttggaagcagatagccatgcaggtagaattgtcatctcccaagtggccacatacagcaacccactccaggccatggggaccaccactcagggttcggggctggcaggagggtagtttctccagtctccccagtctgttggtgtctttataggaaactataaagcagagcagtggtgtctttagaggaaactcattcaagtcagggcactgattttcctctcagtttattatttggggggatagggtcaggtgggtatagtagtactttaccagggtgcttttaagttactttaaaaaaagcctacaaaatattttttttcttttatttgctcgagttcacattaatgatggtcacaaggctgccttgttgggcaggcgtattgcccccagttcctcttctgctggcctgtatgacctccacagccaggccctgggcccaagccccttgtcccttctccactgcccctctttccagacagtaaaggccatggtcagtgtgtttttctcttgtaaacaaaccccagcttgtttaacagaaatgctaataacctactgggaaagatggaggtctaaattacctccagggtttttctgggggtttatcaccagtgtgggtcccttctgataccaccaggttcactccaggcagagtggggcggaaggctgctgaggatatgggtcagttacagcagccctcacctcaaagggctggcctgcttctcagcctacattcatttgcaagcttcaatctctggaccatctggtgttcacaggtgttagagggttaggggttaggggctagttttggatttgattcataggtaggagggcttagattttaaggcacttctgaaagtcaatccctggacaaggcagtcatcacataagaacagctaccttctccacttggtggcacaagaggtagggaggggagtatgggttcatttggcttcgcattatgcaaggtgaaaccgtttgttttccctctccattttccctaactaaatgaaaaggacacattctgaaatcccttttgttggagaataagtcagtctgaggggaaatgggaggccagagatgagaaccctttgaaaagattgtaaaatactgattttcattctttcaagcttatttgtaaatacctatttgaatgctgtgtatttgtacaggaatttgagcaaaaaatgtatagagtgtgatgtccaattggtattcagcactataaatgtgtttttaacctcc

SEQ ID NO: 151295 - DNA, 5120 bp, Artificial Sequence
  derived and/or modified sequence
atgccaaagtggctagaggaaacagagaataagaagataggctgcactgttaacctgatgaatttttacaaatctgagattaacaaggaagaaatgtatatccgctacatccataagctttgtgacatgcacttgcaggccgaaaactacacagaggccgcatttaccctgctcctttactgtgagctgctgcagtgggaggaccggccactacgggaattcctccactacccatcgcagacagagtggcagcggaaggagggactgtgccggaagatcattcactacttcaacaaaggcaagagctgggagtttgggatcccactgtgcagggagctggcgtgtcagtacgagagcctctatgattaccagagcctcagctggattcggaaaatggaggccagctactatgacaacattatggagcagcaacgcctggagcctgagttctttcgggtcggcttctatggcaggaagtttcctttctttcttcggaacaaagaatacgtgtgccgtggccatgactacgagaggctggaggccttccagcagaggatgctcagtgagtttccgcaggctgtcgccatgcagcaccccaaccatcctgatgacgccatcctacagtgcgatgcccagtacttgcagatctatgcagtgacgcccattccagattatgtggatgttctgcagatggatagggtaccagatcgagtcaagagcttctatcgcgtcaacaatgtgaggaagttccggtatgacaggccttttcacaaaggccccaaggacaaggagaatgaattcaagagcctgtggattgaacgtaccacactgaccctgacccacagcttgcctggcatctctcggtggtttgaagtggagaggagggaactggtggaggtgagccctctggagaatgccatccaagtggttgagaataagaaccaggagctacgctccctgatcagccagtatcaacacaagcaggtgcatggcaacattaacctgctaagcatgtgcctgaatggtgtcattgatgcagctgtcaatggaggcattgcacgctatcaggaggccttctttgataaagattacatcaacaagcacccaggagatgctgagaagatcacccagctcaaggagcttatgcaggagcaggttcatgtccttggagttgggctagcagttcatgagaagtttgtgcacccagaaatgcggcctctgcataagaagctaattgatcagttccagatgatgcgggccagtctctaccatgagtttccaggtttggataagctaagtcctgcatgttcaggcaccagcaccccacggggaaatgttctggcatcccatagccccatgagtccggagagcatcaagatgacccaccggcacagccccatgaacttgatgggcacaggccgccattcatcatcctctctctcctcacatgcgtctagtgaagcaggaaacatggtgatgctgggtgacggctccatgggtgatgctcctgaggacctgtaccaccacatgcagctcgcgtatcccaaccccaggtaccaaggctcagtcaccaacgtctctgttctgtcctcgtcccaggcaagcccttcttcctccagcctgagttccactcactcagcaccatcccagatgattacctctgccccttccagtgcccgaggctctccctctctgccagataagtaccgccatgcccgtgaaatgatgttgttgctgcccacataccgggaccgcccaagcagtgccatgtatccagcagccatcctggagaacggacagccgccgaatttccagcgagccctgttccagcaagtggtcggagcctgcaaaccctgcagtgatcccaatctgtctgtggctgaaaaaggtcattactccctacactttgacgccttccaccaccctctgggtgatacccccccagccctccctgcccggaccctgcgcaagtctcctctccaccctatcccagcctcccccacaagcccccagtcaggtctggacggcagcaactctacgctgtccggcagtgccagcagcggcgtgtcctccttgagtgagagtaactttgggcactcctcggaggccccacctcgcactgacaccatggactccatgccaagtcaggcctggaatgctgacgaagatcttgagccaccctacctccctgtccactacagcctctctgagtctgccgtcctggactccatcaaggcccagccatgccgaagccactcagccccagggtgcgtcatccctcaggaccccatggacccgcctgcgctgccgcccaagccctaccacccccgcctgccggccctggagcacgatgagggggtgctgctgcgtgaagagactgagaggcctcgaggcctgcaccgcaaggctccattgcctcctgggagcgctaaggaggagcaggcccgcatggcctgggagcacggccgaggggagcagtgaggggcaacgaggcggctgggatgccgccctcagtaagcagcttgccaatcactccaggtctgaaaagcaagtcccccagccccaccccagggagccagagaggcttgcactcaggagagaaccacccccaagtctccgttctactgccgtgaactcatgtgttgccatgtacagaggccacagcagcatgaagggttgtggcttccctttttatttttttacatttccatttctatgggttttcctttctttcctttatgcagtagatgctttcttcctcctgcagttctggaccatgtggagctacatggagaaattgcacagacagaatcactttgccacactgcagggcccaggagtgggagcccaggccctccctccagggtagagatgcaccgaatggaaattgcactaaggacctcttcctttgctgtatggacagaagagttcatggttgcattcagggattgcaaggaccatatagacatgtcacaggtggaaaaagggccacaagccgttttgcacaaatgcctgcccacctgcccctcttccatccaggagtgtgctactgaggggctggctggaccaacctgctggctcaggcatgtgactggcctaactgcatgcccagggcactgccagggttcaatgggccagccgtctcctactccaccttggatttttctctccatcacatcatttctgaccatttgctcccttccattcttgaaacacctcatgccccacaggagccccagtggtgactggatctgcaagggttatctcccgccctctggggtttgagtggaggtatggagccagagaggctatcctagctaccttcctcctagggggagctggtccccttcctatgtggtagagagactggtgtaagagtgtggggtgtggcaggcgccggaaatcctcaaagctttcagaagcatccagaatgcctaccatcagctcctgaatcagggattttcagcactacctctgagccatggggttggctgcccagccaggcttccaggccctgaggacatgtggtcaggttcagcaggctcctgggtaaagagggtgggagggggcttctccttttggaagcagatagccatgcaggtagaattgtcatctcccaagtggccacatacagcaacccactccaggccatggggaccaccactcagggttcggggctggcaggagggtagtttctccagtctccccagtctgttggtgtctttataggaaactataaagcagagcagtggtgtctttagaggaaactcattcaagtcagggcactgattttcctctcagtttattatttggggggatagggtcaggtgggtatagtagtactttaccagggtgcttttaagttactttaaaaaaagcctacaaaatattttttttcttttatttgctcgagttcacattaatgatggtcacaaggctgccttgttgggcaggcgtattgcccccagttcctcttctgctggcctgtatgacctccacagccaggccctgggcccaagccccttgtcccttctccactgcccctctttccagacagtaaaggccatggtcagtgtgtttttctcttgtaaacaaaccccagcttgtttaacagaaatgctaataacctactgggaaagatggaggtctaaattacctccagggtttttctgggggtttatcaccagtgtgggtcccttctgataccaccaggttcactccaggcagagtggggcggaaggctgctgaggatatgggtcagttacagcagccctcacctcaaagggctggcctgcttctcagcctacattcatttgcaagcttcaatctctggaccatctggtgttcacaggtgttagagggttaggggttaggggctagttttggatttgattcataggtaggagggcttagattttaaggcacttctgaaagtcaatccctggacaaggcagtcatcacataagaacagctaccttctccacttggtggcacaagaggtagggaggggagtatgggttcatttggcttcgcattatgcaaggtgaaaccgtttgttttccctctccattttccctaactaaatgaaaaggacacattctgaaatcccttttgttggagaataagtcagtctgaggggaaatgggaggccagagatgagaaccctttgaaaagattgtaaaatactgattttcattctttcaagcttatttgtaaatacctatttgaatgctgtgtatttgtacaggaatttgagcaaaaaatgtatagagtgtgatgtccaattggtattcagcactataaatgtgtttttaacctcccgcattctgtgcttatttaaaacaaggaaacttctaaccatttcttttgtgtattcatgtttaaagaaaaaaagtgatttaaaaatgatcttacctgtaccagaaaagcaaagttaaaggaaacaaaatttgtaccattgtcccaagaggtattttactgtatatattgtggtagcatgttcaaaatccaacaagtaatgtgaattttagatgtaaatatctgccacttgattttttttccccctttccccacttccttgactgctgtgatgtgaattaaagataaatacgtgatactga

SEQ ID NO: 151296 - protein, 840 aa, Artificial Sequence
  derived and/or modified sequence
MALASAAPGSIFCKQLLFSLLVLTLLCDACQKVYLRVPSHLQAETLVGKVNLEECLKSASLIRSSDPAFRILEDGSIYTTHDLILSSERKSFSIFLSDGQRREQQEIKVVLSARENKSPKKRHTKDTALKRSKRRWAPIPASLMENSLGPFPQHVQQIQSDAAQNYTIFYSISGPGVDKEPFNLFYIEKDTGDIFCTRSIDREKYEQFALYGYATTADGYAPEYPLPLIIKIEDDNDNAPYFEHRVTIFTVPENCRSGTSVGKVTATDLDEPDTLHTRLKYKILQQIPDHPKHFSIHPDTGVITTTTPFLDREKCDTYQLIMEVRDMGGQPFGLFNTGTITISLEDENDNPPSFTETSYVTEVEENRIDVEILRMKVQDQDLPNTPHSKAVYKILQGNENGNFIISTDPNTNEGVLCVVKPLNYEVNRQVILQVGVINEAQFSKAASSQTPTMCTTTVTVKIIDSDEGPECHPPVKVIQSQDGFPAGQELLGYKALDPEISSGEGLRYQKLGDEDNWFEINQHTGDLRTLKVLDRESKFVKNNQYNISVVAVDAVGRSCTGTLVVHLDDYNDHAPQIDKEVTICQNNEDFAVLKPVDPDGPENGPPFQFFLDNSASKNWNIEEKDGKTAILRQRQNLDYNYYSVPIQIKDRHGLVATHMLTVRVCDCSTPSECRMKDKSTRDVRPNVILGRWAILAMVLGSVLLLCILFTCFCVTAKRTVKKCFPEDIAQQNLIVSNTEGPGEEVTEANIRLPMQTSNICDTSMSVGTVGGQGIKTQQSFEMVKGGYTLDSNKGGGHQTLESVKGVGQGDTGRYAYTDWQSFTQPRLGEESIRGHTLIKN

SEQ ID NO: 151297 - DNA, 2523 bp, Artificial Sequence
  derived and/or modified sequence
atggctctggctagcgcagcccccgggtctattttctgcaagcaattactctttagcctccttgtgctgaccctcctgtgcgacgcctgccagaaggtatacctacgggtgccaagtcatctgcaggccgagaccctcgttggtaaggtgaacctcgaagaatgtttgaagtcagctagcctgattaggtcctccgaccccgccttccgtatcctggaagatggctctatctacactacgcacgatttgattctgagcagtgagagaaagtccttctcgatctttctctctgatggccagagacgcgaacaacaagagatcaaagtagtgctgagcgcccgagagaacaagagtcctaaaaagcgccacaccaaagatactgccttaaaacgctcaaagaggcgttgggccccgatacctgcctccctgatggagaacagcctgggaccattcccacagcatgtgcagcagattcagagtgatgctgcccaaaattataccattttctattccatctctggtcctggcgtcgataaagagccgttcaatctgttctacattgagaaggacacaggagatatattttgcacacggtccatagatcgcgagaaatatgagcaattcgcgctttacggatatgccaccaccgctgacggctacgccccggaatacccactgcccctgattattaaaattgaagacgacaacgacaatgccccttattttgaacatcgtgtgacgatctttactgttcccgagaactgccgctcagggacttcggtggggaaggtgacggctacagacctcgatgaaccggacactctccataccagactgaaatataagatattgcaacagatccctgatcacccgaagcacttctctattcacccagacacaggagtgatcacaaccacaaccccctttctagaccgtgaaaagtgtgacacgtaccaactcattatggaggtgcgggacatgggaggccaaccctttggtctcttcaacacaggcacgatcactatctccttggaggatgaaaacgacaacccaccctcctttacagagacttcctatgtaacggaggtggaagagaaccggatcgatgtggagatcttgcggatgaaggtgcaggaccaggatctgcctaacacgccgcatagcaaagcagtttataaaatcctacagggaaacgaaaacggaaacttcataatctccacagatccgaacactaacgagggcgtcctctgtgtggtgaagccgttaaactatgaagtaaaccgtcaggtcatactccaggtgggcgtgatcaatgaggcgcagttctcaaaagccgcatcctctcagaccccgacaatgtgcactacaactgtgacagtgaaaatcatcgatagtgacgaggggccagagtgtcaccctcccgtgaaggtgatacaatcacaggatgggtttcccgccggacaggagctgctgggatacaaggcactggaccccgagattagctccggagagggattacgctatcaaaagcttggggatgaggataactggttcgaaattaatcaacacaccggagatttaagaacactcaaggtccttgaccgagagtcgaagttcgtaaagaacaatcagtataacatttcagtggtagccgtagacgccgtgggcagaagttgcaccgggactctcgtcgtccatctggacgattacaacgatcatgctccacagatcgataaagaagtgacgatctgtcaaaataacgaagacttcgccgtcctaaagccggtcgatcctgatggcccagagaatggccccccgtttcagttctttctcgacaatagtgcatctaagaattggaacatcgaggagaaggatgggaagaccgccatattaagacagagacagaatctcgactataactattatagtgttccaattcagataaaggatagacacgggctggtggcaactcacatgttgacagtcagagtgtgtgactgctctacgccctccgaatgcaggatgaaggataaatccactagagacgtgcgcccaaatgttatattggggcggtgggccattctcgctatggtattaggaagcgtactgttgctgtgtattctcttcacctgcttttgcgtcactgccaaaagaaccgtgaaaaaatgttttcccgaggacatcgctcagcagaatctcattgtgagcaatacggagggacctggggaggaggttactgaggccaacatccggctccccatgcagacttccaatatctgcgatacttctatgagcgtgggcaccgtgggaggccaggggataaagacccagcagtcttttgagatggtgaaaggaggctatactctggattcaaacaaaggcggcggtcaccagacccttgagagcgtgaagggcgtgggccaaggggataccggacgatatgcctatacggattggcaatctttcacacagcctagactgggcgaggaatcaatccgtggccacacactgattaagaactag

SEQ ID NO: 151298 - DNA, 2523 bp, Artificial Sequence
  derived and/or modified sequence
atggccctggccagcgctgcccctggcagcatcttctgcaagcagctgctcttcagcctgctggtgctgaccctgctgtgtgatgcctgccagaaggtgtacctgcgggtgcccagccacctgcaggccgagaccctggtgggcaaggtgaacctggaggagtgcctgaagagcgccagcctcatccgcagcagtgaccctgccttccgcatcctggaggatggcagcatctacaccacccatgacctgatcctgagcagcgagaggaagagcttcagcatcttcctgagtgatggccagaggcgggagcagcaggagatcaaggtggtgctgagcgcccgggagaacaagagccccaagaagaggcacaccaaggacacagccctgaagaggagcaagaggcgctgggcccccatcccagccagcctgatggagaacagcctgggccccttcccccagcacgtgcagcagatccagagtgatgctgcccagaactacaccatcttctacagcatcagcggccctggggtggacaaggagcccttcaacctcttctacatcgagaaggacacaggagacatcttctgcaccaggagcattgaccgggagaagtatgagcagtttgccctgtatggctacgccaccacagcagatggctacgcccctgagtaccccctgcccctcatcatcaagattgaagatgacaatgacaatgccccctactttgagcaccgggtgaccatcttcaccgtgcctgagaactgccgcagcggcacctctgtgggcaaggtgacagccacagacctggatgagccagacaccctgcacacccggctgaagtacaagatcctgcagcagatcccagaccaccccaagcacttcagcatccacccagacaccggggtcatcaccaccaccacccccttcctggaccgggagaagtgtgacacctaccagctgatcatggaggtgcgggacatgggcggccagcccttcggcctcttcaacacaggcaccatcaccatcagcctggaggatgaaaatgacaaccccccatccttcacagagaccagctatgtgacagaggtggaggagaacagaattgatgtggagatcctgaggatgaaggtgcaggaccaggacctgcccaacaccccccacagcaaggctgtgtacaagatcctgcagggcaatgaaaatggaaacttcatcatcagcacagaccccaacaccaatgaaggagtgctgtgtgtggtgaagcccctgaactatgaggtgaaccggcaggtgatcctgcaggtgggcgtcatcaatgaggcccagttcagcaaggccgccagcagccagacccccaccatgtgcaccaccaccgtgacagtgaagatcatcgacagtgatgagggccctgagtgccacccccctgtgaaggtgatccagagccaggacggcttccctgctggccaggagctgctgggctacaaggccctggaccctgagatcagcagcggggagggcctgcgctaccagaagctgggagatgaggacaactggtttgagatcaaccagcacactggagacctgcggaccctgaaggtgctggaccgggagagcaagtttgtgaagaacaaccagtacaacatctctgtggtggccgtggatgctgtgggccgcagctgcaccggcaccctggtggtgcacctggatgactacaatgaccacgccccccagattgacaaggaggtgaccatctgccagaacaatgaagattttgctgtgctgaagcctgtggaccctgatggcccagaaaatggaccacccttccagttcttcctggacaacagcgccagcaagaactggaacatcgaggagaaggatggcaagacagccatcctgcggcagaggcagaacctggactacaactactacagcgtgcccatccagatcaaggacagacatggcctggtggccacccacatgctgactgtgcgggtgtgtgactgcagcaccccatctgagtgcaggatgaaggacaagagcaccagagatgtgcggcccaacgtcatcctgggccgctgggccatcctggccatggtgctgggctctgtgctgctgctgtgcatcctcttcacctgcttctgtgtgacagccaagaggacagtgaagaagtgcttccctgaggacatcgcccagcagaacctgattgtgagcaacacagagggccctggagaggaggtgacagaggccaacatccggctgcccatgcagaccagcaacatctgtgacacctccatgtctgtgggcaccgtgggcggccagggcatcaagacccagcagagctttgagatggtgaagggcggctacaccctggacagcaacaagggcggcggccaccagaccctggagagcgtgaagggcgtgggccagggcgacaccggccgctatgcctacacagactggcagagcttcacccagccccggctgggggaggagagcatccggggccacaccctcatcaagaactag

SEQ ID NO: 151299 - DNA, 2523 bp, Artificial Sequence
  derived and/or modified sequence
atggccctggccagcgccgcccccggcagcatcttctgcaagcagctcttgttctccctattggtcctgaccttactctgtgacgcttgtcagaaggtctatttacgggtaccttcgcacttacaggccgaaacattagtgggaaaagtcaatctggaagagtgtctgaagagtgcttccctaattcgttccagtgatcccgcattccgaatcctggaggacggctcaatctacactacacacgacctgatcctgagctctgagcgaaagtccttttccatcttcttatccgatggccaacgcagggagcagcaagaaatcaaggtggtactttccgctcgggagaacaagagcccaaagaagcggcacactaaggatacagcactgaaaaggagcaaacgccgctgggcccccatacccgccagtctgatggagaattctcttggacctttccctcagcacgttcagcaaattcaaagtgatgccgcacagaactatactatcttttactcaataagtggcccaggtgtggacaaggagcctttcaatctcttctatatcgagaaagataccggcgacatcttctgcacccggtctatagatcgggagaagtacgaacaatttgccctgtatggatacgccacaacagccgacggttatgcccccgagtatcctctgcccctgattatcaagattgaggatgacaatgacaatgcaccatactttgagcatcgggtgaccatctttactgtgcctgaaaattgtcgctcaggcacgtctgtgggaaaagtaaccgctaccgaccttgatgaaccagatacccttcacactcggcttaaatacaaaattctgcagcagattccagaccatcccaagcacttctccattcacccagataccggcgtgatcacaacaacaactccatttctcgatcgagagaagtgtgacacgtatcagctgatcatggaagtgcgggacatgggcggtcaacctttcgggttgttcaataccggaacaatcacgatcagccttgaagacgagaacgacaatccccccagttttacagagacatcgtacgttaccgaggttgaggagaaccgcatcgatgtggaaatccttcgcatgaaagtgcaggaccaggaccttcctaataccccccactccaaagcagtgtataaaatccttcaggggaacgaaaatggaaacttcatcatctccaccgatccaaacaccaatgagggggttctctgtgtggtcaagccgctgaactacgaggtgaaccgacaagttattctgcaagttggcgtgattaacgaggcccaattttccaaagctgcgtcgtcacagactcctacaatgtgcaccacaaccgtcactgttaagattatcgactcagatgaaggacctgaatgtcacccacctgtcaaggtcatccaatcacaggatggcttcccagcagggcaggagttactcggatataaggctctcgaccctgagataagtagcggagagggtctcaggtaccagaaactaggcgacgaggacaattggttcgagattaatcagcataccggagatctgcgaaccctgaaggtgttggatagagagtcaaaattcgtgaagaataaccaatataatatctctgtggtcgccgtagatgccgttggcaggagctgtacgggcacgctggttgtgcatttagatgactacaatgaccacgcaccccaaattgataaggaagtgaccatctgccagaacaacgaggattttgccgtgctgaaacccgtagacccggacggaccagagaatggcccaccattccagttttttctggacaactctgctagcaagaactggaatattgaggagaaggacggtaagaccgccatcttgcgacagcgccagaatctggactataattactacagtgtgccaatacaaatcaaagaccggcatggtcttgtggcgacccacatgctcaccgtgcgggtgtgcgactgcagcaccccaagtgagtgcaggatgaaggacaagtctacgagagacgtgagacccaacgtgattttggggcgctgggctattctcgccatggttttaggctccgtgctgttgctgtgtatactttttacatgcttttgcgtaacagctaaaagaaccgttaaaaaatgcttccctgaggacatcgcacagcagaatttgattgtctcgaacacggaaggacccggggaagaggtgactgaggcaaacattcgcctgcccatgcagacctcaaatatatgcgacacgtcgatgtcagtcgggacagtgggcggtcagggaattaagactcaacagtcgtttgaaatggtgaaaggaggttatacgctggactcaaataagggtggcggacatcagaccctggaatctgtgaagggagtcggacagggtgataccgggcggtacgcatatacggattggcagagctttactcagcctaggttgggggaagagtccattagaggccacacactgatcaagaattag

SEQ ID NO: 151300 - DNA, 2523 bp, Artificial Sequence
  derived and/or modified sequence
atggcgctggcctcggctgcccctggctctatattttgtaagcagctgcttttttcattgctggtattgacccttctatgtgacgcctgccagaaagtataccttagggtgcccagtcacctgcaggctgagactctggtcgggaaggtcaatttagaggagtgcctgaaaagcgcaagcttgattagaagctctgaccctgccttccgcattcttgaagatggatccatctatacgacccacgacttgattctgtcgtcagagcgcaagagcttcagcatttttctgagtgatggccagagaagggaacagcaggaaatcaaggtcgtactgagcgccagagagaataaatccccgaaaaagcgccatacaaaagatacagccctgaaacgaagcaagcggagatgggcaccaattcccgcaagcctcatggaaaactcactaggtccctttcctcagcacgtgcagcagatccagagcgatgccgctcaaaactataccatcttctactccatctccgggcctggagtggataaggaaccgttcaacctgttttacatagaaaaagataccggtgatatcttttgtacgaggagcatcgaccgagaaaagtatgagcagtttgccctctacggttatgcaactaccgcagacggttatgcgcctgaatatcccttaccgctaatcatcaagatcgaagatgataacgataatgctccctattttgaacatagggtgacaatttttacagtaccagaaaactgccgctccggtaccagcgtcggcaaggtcaccgctaccgatttagatgagcctgacactctgcatacccggctaaagtataaaattctgcaacagatcccagatcatcctaagcatttctccatccatcccgatacgggagtcatcactacaactacgccgtttttagaccgcgaaaagtgtgacacttaccagctgatcatggaggttcgcgacatgggagggcagccctttgggctgttcaatacgggaacaattacaattagtttggaggacgagaatgataaccctccttccttcaccgagacctcctatgtgactgaggtggaggaaaacaggatcgatgtggaaatattgcggatgaaggtgcaggatcaggatctgccaaacacacctcacagcaaagctgtatataaaattttacagggaaacgaaaacggtaatttcatcattagtaccgatcccaacaccaatgagggggtcctttgtgttgtaaagcctctcaactacgaggtcaataggcaggtgattctgcaagtaggtgtgattaacgaagcacagttctctaaagctgccagtagtcaaacaccaaccatgtgcacaacgactgtgactgtaaagattattgactctgacgagggccctgaatgtcacccacccgtgaaggtgattcaatcccaagacggcttccctgctggccaagaacttttagggtataaagctctcgaccccgagattagttcaggtgagggtctgaggtatcagaagctgggagacgaagataactggttcgagatcaatcagcataccggagatttgcgcacccttaaagttcttgaccgagagtctaagtttgtgaaaaacaaccaatataatatttcagtggtggctgtggatgctgttggtagatcctgtaccggcactctggtcgttcacctggatgattacaatgatcacgcccctcagattgacaaggaagtaaccatctgccaaaacaacgaggattttgccgtgctcaagcctgtcgatcccgatggccctgagaacgggcctccgttccaatttttcttggacaatagtgcctctaagaactggaatatagaggagaaggatggaaagactgctatcctgagacagaggcagaatttggattataattattacagtgtgccgatccagatcaaagatcgccacgggctcgttgccacacacatgcttactgtccgcgtctgcgactgtagcacgccatccgagtgtagaatgaaggataaatccacccgagatgtacggcctaatgtcattcttggaaggtgggccatattggctatggtcttagggtcggttctcctcctgtgtatcctgttcacgtgtttttgcgtcacagcaaagcgcacagtcaaaaaatgctttcctgaggacatcgctcaacagaacctgatcgtgagcaatactgaaggacccggagaggaagtcactgaggccaatataagactcccaatgcagactagtaacatatgtgatacctcgatgagcgttggcaccgttggcggtcagggcattaagactcaacaatccttcgagatggtgaagggcggttacacgctggactcaaacaagggagggggacatcagaccttggaatccgtgaagggtgtcgggcagggagataccggaagatatgcctatacggattggcagtcatttacccagcctcggttgggcgaggagtccattaggggccacacacttataaagaactag

SEQ ID NO: 151301 - DNA, 2523 bp, Artificial Sequence
  derived and/or modified sequence
atggccctggccagcgccgcccccggcagcatcttctgcaagcagctgctgttcagcctgctggtgctgaccctgctgtgcgacgcctgccagaaggtgtacctgagagtgcccagccacctgcaggccgagaccctggtgggcaaggtgaacctggaggagtgcctgaagagcgccagcctgatcagaagcagcgaccccgccttcagaatcctggaggacggcagcatctacaccacccacgacctgatcctgagcagcgagagaaagagcttcagcatcttcctgagcgacggccagagaagagagcagcaggagatcaaggtggtgctgagcgccagagagaacaagagccccaagaagagacacaccaaggacaccgccctgaagagaagcaagagaagatgggcccccatccccgccagcctgatggagaacagcctgggccccttcccccagcacgtgcagcagatccagagcgacgccgcccagaactacaccatcttctacagcatcagcggccccggcgtggacaaggagcccttcaacctgttctacatcgagaaggacaccggcgacatcttctgcaccagaagcatcgacagagagaagtacgagcagttcgccctgtacggctacgccaccaccgccgacggctacgcccccgagtaccccctgcccctgatcatcaagatcgaggacgacaacgacaacgccccctacttcgagcacagagtgaccatcttcaccgtgcccgagaactgcagaagcggcaccagcgtgggcaaggtgaccgccaccgacctggacgagcccgacaccctgcacaccagactgaagtacaagatcctgcagcagatccccgaccaccccaagcacttcagcatccaccccgacaccggcgtgatcaccaccaccacccccttcctggacagagagaagtgcgacacctaccagctgatcatggaggtgagagacatgggcggccagcccttcggcctgttcaacaccggcaccatcaccatcagcctggaggacgagaacgacaacccccccagcttcaccgagaccagctacgtgaccgaggtggaggagaacagaatcgacgtggagatcctgagaatgaaggtgcaggaccaggacctgcccaacaccccccacagcaaggccgtgtacaagatcctgcagggcaacgagaacggcaacttcatcatcagcaccgaccccaacaccaacgagggcgtgctgtgcgtggtgaagcccctgaactacgaggtgaacagacaggtgatcctgcaggtgggcgtgatcaacgaggcccagttcagcaaggccgccagcagccagacccccaccatgtgcaccaccaccgtgaccgtgaagatcatcgacagcgacgagggccccgagtgccacccccccgtgaaggtgatccagagccaggacggcttccccgccggccaggagctgctgggctacaaggccctggaccccgagatcagcagcggcgagggcctgagataccagaagctgggcgacgaggacaactggttcgagatcaaccagcacaccggcgacctgagaaccctgaaggtgctggacagagagagcaagttcgtgaagaacaaccagtacaacatcagcgtggtggccgtggacgccgtgggcagaagctgcaccggcaccctggtggtgcacctggacgactacaacgaccacgccccccagatcgacaaggaggtgaccatctgccagaacaacgaggacttcgccgtgctgaagcccgtggaccccgacggccccgagaacggcccccccttccagttcttcctggacaacagcgccagcaagaactggaacatcgaggagaaggacggcaagaccgccatcctgagacagagacagaacctggactacaactactacagcgtgcccatccagatcaaggacagacacggcctggtggccacccacatgctgaccgtgagagtgtgcgactgcagcacccccagcgagtgcagaatgaaggacaagagcaccagagacgtgagacccaacgtgatcctgggcagatgggccatcctggccatggtgctgggcagcgtgctgctgctgtgcatcctgttcacctgcttctgcgtgaccgccaagagaaccgtgaagaagtgcttccccgaggacatcgcccagcagaacctgatcgtgagcaacaccgagggccccggcgaggaggtgaccgaggccaacatcagactgcccatgcagaccagcaacatctgcgacaccagcatgagcgtgggcaccgtgggcggccagggcatcaagacccagcagagcttcgagatggtgaagggcggctacaccctggacagcaacaagggcggcggccaccagaccctggagagcgtgaagggcgtgggccagggcgacaccggcagatacgcctacaccgactggcagagcttcacccagcccagactgggcgaggagagcatcagaggccacaccctgatcaagaactag

SEQ ID NO: 151302 - DNA, 4271 bp, Artificial Sequence
  derived and/or modified sequence
acttgtaggaaagcctctttgcatttagacgtaattgaactggaaggaaggagactggccagggaatagggggaaagaaattctcccgttgctcctcctactgtttatcacttgcctccggactgtcttccaaaccaagctcagctgcatcaaggtggcagcagaataccctgtgcaagtgccagcgtcttcttagccgctctgtgcatcccaggctgccctgttatctggccaccgtccctggccattgggactgcttctgatggctctggcctctgctgccccagggagcatcttctgtaagcagctccttttctctctcctggttttaacattactttgcgatgcttgtcagaaagtttatcttcgagttccttctcatcttcaggctgaaacacttgtaggcaaagtgaatctggaggagtgtctcaagtcggccagcctaatccggtccagtgaccctgccttcagaattctagaagatggctcaatttacacaacacatgacctcattttgtcttctgaaaggaaaagtttttccattttcctttcagatggtcagagacgggaacaacaagagataaaagttgtactgtcagcaagagaaaacaagtctcctaagaagagacataccaaagacacagccctcaagcgcagcaagagacgatgggctcctattccagcttcattgatggagaactcgttgggtccatttccacaacacgttcagcagatccaatctgatgctgcacagaattacaccatcttttattccataagtgggccaggcgtggacaaagaacccttcaatttgttttacatagagaaagacactggggatatcttttgtacaaggagcattgaccgtgagaaatatgaacagtttgcgttatatggctatgcaacaactgcagatggctatgcaccagaatatccactccctttgatcatcaaaattgaagatgataatgataacgccccatattttgaacacagagtgactatctttactgtgcctgaaaattgccgatccggaacttcagtgggaaaagtgaccgccacagaccttgacgaacctgacactctccatactcgtctgaaatataaaatcttacaacaaatcccagatcatccaaagcatttctccatacacccagataccggtgtcatcaccacaactacaccttttctggatagagaaaaatgtgatacttaccagttaataatggaagtgcgagacatgggtggtcagcctttcggtttatttaatacaggaacaattactatttcacttgaggatgaaaatgacaatccaccatctttcacagaaacttcttatgttacagaagtagaagaaaacagaattgacgtggagattttacgaatgaaggtacaggatcaggatttgccaaacactcctcactcaaaggctgtatacaaaatcctacaaggaaatgaaaatggaaacttcataattagcacagatccaaatacaaatgaaggagtgctgtgtgttgtcaagccattgaactatgaagtcaatcgccaagttattttgcaagttggtgtcattaacgaggcacaattctctaaagcagcgagctcacaaactcctacaatgtgcactacaactgtcaccgttaaaattatagacagtgatgagggccctgaatgccaccctccagtgaaagttattcagagtcaagatggcttcccagctggccaagaactccttggatacaaagcactggacccggaaatatccagtggtgaaggcttaaggtatcagaagttaggggatgaagataactggtttgaaattaatcaacacactggcgacttgagaactctaaaagtactagatagagaatccaaatttgtaaaaaacaaccaatacaatatttcagttgttgcagtggatgcagttggccgatcttgcactggaacattagtagttcatttggatgattacaacgatcacgcacctcaaattgacaaagaagtgaccatttgtcagaataatgaggattttgctgttctgaaacctgtagatccagatggacctgaaaatggaccaccttttcaattctttctggataattctgccagtaaaaactggaacatagaagaaaaggatggtaaaactgccattcttcgtcaacggcaaaatcttgattataactattattctgtgcctattcaaataaaagacaggcatggtttagttgcaacacatatgttaacagtgagagtatgtgactgttcaactccatctgagtgtagaatgaaggataaaagtacaagagacgttagaccaaatgtaatacttggaagatgggctattcttgctatggtgttgggttctgtattgttattatgtattctgtttacatgtttctgtgtcactgctaagagaacagtcaagaaatgttttccagaagacatagcccagcaaaatttaattgtatcaaatactgaaggacctggagaagaagtaacggaagcaaatattagactccccatgcagacatccaacatttgtgacacaagcatgtctgttggtactgttggtggccagggaatcaaaacacagcaaagttttgagatggtcaaaggaggctacactttggattccaacaaaggaggtggacatcagaccttggagtccgtcaagggagtggggcagggagatactggcagatatgcgtacacggactggcagagtttcacccaacctcggcttggcgaagaatccattagaggacacactctgattaaaaattaaacagtaaaagaaggtgtatttgtgtggacaagatgaggagcataaacattgtgaagactacgtttgttcgtataactatgaaggcaaaggttctctggccggctcagtaggttgctgcagcgatcggcaggaagaagagggactggagtttctagatcacctggaacccaaatttaggacattagcaaagacatgcatcaagaaataaatgtgccttttaatagtgtaatatccacagatgcataagtaggaatttattacttgcagaatgttagcagcatctgctaatgtttttgtttatggaggtaaactttgtcatgtataggtaagggtactataaatatgagattcccctacattctccttgtctggtataacttccatgttctctagaaatcaaggttttgtttgttaattctcttttatatgcatgtatatattgcccttttcacgactgtactgtacaccttcttgcaccttttatttgcaaactgatgttactttttgtgctgtggaagagcatttgggaaagctgggtattatagaggccaatgaaagatgaatttgcattgtagatgtacgaattaaatatgttcttcaaaatcttggggagaattatgttcttagaacatagttggtgccagataattgcattctctccacctgagtggtttaaaaaggacttttaagtattcttcagtgcaatcttcagttttgtgattaagttcatttctcttttacacttttgtactcctcagagcagtgctcccagcattgttttctttcaggatccttcagagctcagtccctggacctctgcccatgtggatttgttgttaggtcactccaacttctagggttcttggaaagataaggaccagaacaagctcatagcaaattgaggggcagagattttatgaagattacatgagaagatttccatgaaagaattgcagccctgaggtccatgggttgacttatgctcacaaatatgtttcgtttgctcaacatggtttactactaacattttaaaaatataaatactttagcaaaaacattcactcttgagtttgacataggcctgccttatctgtggttgccacctgccatctccaagcatttggacaactagccctgatgcattaggctgcaactctgatatacagagactagcaccttgaatatgccagaaattgaattaccatctgtattagaacttaagactcagcctaaatttacagttactttaagaaaatgggcagtcagaattagggactagaatgtatatgagaaacccccactctactaaaaatataagaaattagccggacatggtggcgaatgactgtaatcccagctactcaggaggctgaggcaggagaatcgcttgaatccaggaggcggaggttgcagtgagccgagattgccactgcactccagcctgggcaacaagagcgaaactccgtctcaaaaaaaaaaaaaaaaa

SEQ ID NO: 151303 - protein, 847 aa, Artificial Sequence
  derived and/or modified sequence
MEAARPSGSWNGALCRLLLLTLAILIFASDACKNVTLHVPSKLDAEKLVGRVNLKECFTAANLIHSSDPDFQILEDGSVYTTNTILLSSEKRSFTILLSNTENQEKKKIFVFLEHQTKVLKKRHTKEKVLRRAKRRWAPIPCSMLENSLGPFPLFLQQVQSDTAQNYTIYYSIRGPGVDQEPRNLFYVERDTGNLYCTRPVDREQYESFEIIAFATTPDGYTPELPLPLIIKIEDENDNYPIFTEETYTFTIFENCRVGTTVGQVCATDKDEPDTMHTRLKYSIIGQVPPSPTLFSMHPTTGVITTTSSQLDRELIDKYQLKIKVQDMDGQYFGLQTTSTCIINIDDVNDHLPTFTRTSYVTSVEENTVDVEILRVTVEDKDLVNTANWRANYTILKGNENGNFKIVTDAKTNEGVLCVVKPLNYEEKQQMILQIGVVNEAPFSREASPRSAMSTATVTVNVEDQDEGPECNPPIQTVRMKENAEVGTTSNGYKAYDPETRSSSGIRYKKLTDPTGWVTIDENTGSIKVFRSLDREAETIKNGIYNITVLASDQGGRTCTGTLGIILQDVNDNSPFIPKKTVIICKPTMSSAEIVAVDPDEPIHGPPFDFSLESSTSEVQRMWRLKAINDTAARLSYQNDPPFGSYVVPITVRDRLGMSSVTSLDVTLCDCITENDCTHRVDPRIGGGGVQLGKWAILAILLGIALLFCILFTLVCGASGTSKQPKVIPDDLAQQNLIVSNTEAPGDDKVYSANGFTTQTVGASAQGVCGTVGSGIKNGGQETIEMVKGGHQTSESCRGAGHHHTLDSCRGGHTEVDNCRYTYSEWHSFTQPRLGEESIRGHTLIKN

SEQ ID NO: 151304 - DNA, 2544 bp, Artificial Sequence
  derived and/or modified sequence
atggaggccgccagacccagcggcagctggaacggcgccctgtgcagactgctgctgctgaccctggccatcctgatcttcgccagcgacgcctgcaagaacgtgaccctgcacgtgcccagcaagctggacgccgagaagctggtgggcagagtgaacctgaaggagtgcttcaccgccgccaacctgatccacagcagcgaccccgacttccagatcctggaggacggcagcgtgtacaccaccaacaccatcctgctgagcagcgagaagagaagcttcaccatcctgctgagcaacaccgagaaccaggagaagaagaagatcttcgtgttcctggagcaccagaccaaggtgctgaagaagagacacaccaaggagaaggtgctgagaagagccaagagaagatgggcccccatcccctgcagcatgctggagaacagcctgggccccttccccctgttcctgcagcaggtgcagagcgacaccgcccagaactacaccatctactacagcatcagaggccccggcgtggaccaggagcccagaaacctgttctacgtggagagagacaccggcaacctgtactgcaccagacccgtggacagagagcagtacgagagcttcgagatcatcgccttcgccaccacccccgacggctacacccccgagctgcccctgcccctgatcatcaagatcgaggacgagaacgacaactaccccatcttcaccgaggagacctacaccttcaccatcttcgagaactgcagagtgggcaccaccgtgggccaggtgtgcgccaccgacaaggacgagcccgacaccatgcacaccagactgaagtacagcatcatcggccaggtgccccccagccccaccctgttcagcatgcaccccaccaccggcgtgatcaccaccaccagcagccagctggacagagagctgatcgacaagtaccagctgaagatcaaggtgcaggacatggacggccagtacttcggcctgcagaccaccagcacctgcatcatcaacatcgacgacgtgaacgaccacctgcccaccttcaccagaaccagctacgtgaccagcgtggaggagaacaccgtggacgtggagatcctgagagtgaccgtggaggacaaggacctggtgaacaccgccaactggagagccaactacaccatcctgaagggcaacgagaacggcaacttcaagatcgtgaccgacgccaagaccaacgagggcgtgctgtgcgtggtgaagcccctgaactacgaggagaagcagcagatgatcctgcagatcggcgtggtgaacgaggcccccttcagcagagaggccagccccagaagcgccatgagcaccgccaccgtgaccgtgaacgtggaggaccaggacgagggccccgagtgcaacccccccatccagaccgtgagaatgaaggagaacgccgaggtgggcaccaccagcaacggctacaaggcctacgaccccgagaccagaagcagcagcggcatcagatacaagaagctgaccgaccccaccggctgggtgaccatcgacgagaacaccggcagcatcaaggtgttcagaagcctggacagagaggccgagaccatcaagaacggcatctacaacatcaccgtgctggccagcgaccagggcggcagaacctgcaccggcaccctgggcatcatcctgcaggacgtgaacgacaacagccccttcatccccaagaagaccgtgatcatctgcaagcccaccatgagcagcgccgagatcgtggccgtggaccccgacgagcccatccacggcccccccttcgacttcagcctggagagcagcaccagcgaggtgcagagaatgtggagactgaaggccatcaacgacaccgccgccagactgagctaccagaacgacccccccttcggcagctacgtggtgcccatcaccgtgagagacagactgggcatgagcagcgtgaccagcctggacgtgaccctgtgcgactgcatcaccgagaacgactgcacccacagagtggaccccagaatcggcggcggcggcgtgcagctgggcaagtgggccatcctggccatcctgctgggcatcgccctgctgttctgcatcctgttcaccctggtgtgcggcgccagcggcaccagcaagcagcccaaggtgatccccgacgacctggcccagcagaacctgatcgtgagcaacaccgaggcccccggcgacgacaaggtgtacagcgccaacggcttcaccacccagaccgtgggcgccagcgcccagggcgtgtgcggcaccgtgggcagcggcatcaagaacggcggccaggagaccatcgagatggtgaagggcggccaccagaccagcgagagctgcagaggcgccggccaccaccacaccctggacagctgcagaggcggccacaccgaggtggacaactgcagatacacctacagcgagtggcacagcttcacccagcccagactgggcgaggagagcatcagaggccacaccctgatcaagaactag

SEQ ID NO: 151305 - DNA, 4826 bp, Artificial Sequence
  derived and/or modified sequence
cgctcggcccgcgacctgccccgagccctctccatggaggcagcccgcccctccggctcctggaacggagccctctgccggctgctcctgctgaccctcgcgatcttaatatttgccagtgatgcctgcaaaaatgtgacattacatgttccctccaaactagatgccgagaaacttgttggtagagttaacctgaaagagtgctttacagctgcaaatctaattcattcaagtgatcctgacttccaaattttggaggatggttcagtctatacaacaaatactattctattgtcctcggagaagagaagttttaccatattactttccaacactgagaaccaagaaaagaagaaaatatttgtctttttggagcatcaaacaaaggtcctaaagaaaagacatactaaagaaaaagttctaaggcgcgccaagagaagatgggctccaattccttgttcgatgctagaaaactccttgggtccttttccacttttccttcaacaggttcaatctgacacggcccaaaactataccatatactattccataagaggtcctggagttgaccaagaacctcggaatttattttatgtggagagagacactggaaacttgtattgtactcgtcctgtagatcgtgagcagtatgaatcttttgagataattgcctttgcaacaactccagatgggtatactccagaacttccactgcccctaataatcaaaatagaggatgaaaatgataactacccaatttttacagaagaaacttatacttttacaatttttgaaaattgcagagtgggcactactgtgggacaagtgtgtgctactgacaaagatgagcctgacacgatgcacacacgcctgaagtactccatcattgggcaggtgccaccatcacccaccctattttctatgcatccaactacaggcgtgatcaccacaacatcatctcagctagacagagagttaattgacaagtaccagttgaaaataaaagtacaagacatggatggtcagtattttggtctacagacaacttcaacttgtatcattaacattgatgatgtaaatgaccacttgccaacatttactcgtacttcttatgtgacatcagtggaagaaaatacagttgatgtggaaatcttacgagttactgttgaggataaggacttagtgaatactgctaactggagagctaattataccattttaaagggcaatgaaaatggcaattttaaaattgtaacagatgccaaaaccaatgaaggagttctttgtgtagttaagcctttgaattatgaagaaaagcaacagatgatcttgcaaattggtgtagttaatgaagctccattttccagagaggctagtccaagatcagccatgagcacagcaacagttactgttaatgtagaagatcaggatgagggccctgagtgtaaccctccaatacagactgttcgcatgaaagaaaatgcagaagtgggaacaacaagcaatggatataaagcatatgacccagaaacaagaagtagcagtggcataaggtataagaaattaactgatccaacagggtgggtcaccattgatgaaaatacaggatcaatcaaagttttcagaagcctggatagagaggcagagaccatcaaaaatggcatatataatattacagtccttgcatcagaccaaggagggagaacatgtacggggacactgggcattatacttcaagacgtgaatgataacagcccattcatacctaaaaagacagtgatcatctgcaaacccaccatgtcatctgcggagattgttgcggttgatcctgatgagcctatccatggcccaccctttgactttagtctggagagttctacttcagaagtacagagaatgtggagactgaaagcaattaatgatacagcagcacgtctttcctatcagaatgatcctccatttggctcatatgtagtacctataacagtgagagatagacttggcatgtctagtgtcacttcattggatgttacactgtgtgactgcattaccgaaaatgactgcacacatcgtgtagatccaaggattggcggtggaggagtacaacttggaaagtgggccatccttgcaatattgttgggcatagcattgctcttttgcatcctgtttacgctggtctgtggggcttctgggacgtctaaacaaccaaaagtaattcctgatgatttagcccagcagaacctaattgtatcaaacacagaagctcctggagatgacaaagtgtattctgcgaatggcttcacaacccaaactgtgggcgcttctgctcagggagtttgtggcaccgtgggatcaggaatcaaaaacggaggtcaggagaccatcgaaatggtgaaaggaggacaccagacctcggaatcctgccggggggctggccaccatcacaccctggactcctgcaggggaggacacacggaggtggacaactgcagatacacttactcggagtggcacagttttactcagccccgtcttggtgaagaatccattagaggacacactctgattaaaaattaaacaatgaaagaaagtgtatctgtgtaatcaagatgaaaatcacaagcatgcccaagactatgtcctgacatataactatgaaggaagaggatcggtggctgggtctgtaggttgttgcagtgaacgacaagaagaagatgggcttgaatttttggataatttggagcccaaatttaggacactagcagaagcatgcatgaagagatgagtgtgttctaataagtctctgaaagccagtggctttatgacttttaaaaaaaattacaaaccaagaattttttaaagcagaagatgctatttgtgggggtttttctctcattatttggatggaatctctttggtcaaatgcacatttacagagagacactataaacaagtacacaaatttttcaatttttacatatttttaaattacttatcttctatccaaggaggtctacagagaaattaaagtctgccttatttgttacatttgggtataatgacaacagccaatttatagtgcaataaaatgtaattaattcaagtccttattatagactatttgaagcacaacctaatggaaaattgtagagaccttgctttaacattatctccagttaattaagtgttcatgtggtgcttggaaactgttgttttcctgaacatctaaagtgtgtagactgcattcttgctattattttattcttgtaatgtgaccttttcactgtgcaaagggagatttctagccaggcattgactattacaatttcattttggtggagtttagttttaggttttattgtatataaaatcctgcactgaatctgtgtctcctctgttacctacttttgccagtgaaatttaagttttaaaatactttcagaatgtatttttactactgcaagtttttggtctttaaaatgtcaagtagcatctctctctttctctctgtctctttctgtttctctctccagttttttttttttttttaatttccatatgggctaaagaatccaaatattttaaaaatctgtctctcttttcttctctcataaagtgaattattccttttttttgttttatgtaagtgtatatattcttagtttttcttgaaatcattgtaatgttaactttgttgtttcaaatatcttggtgattgcttcattatctcttcaacaaaaaaaacctttaattttgccattgaaactgtagaactatgccatgcttttattagaagcagtgctctgtgttaacaacaagaatggtgtaattagaattgggatgtggatatttactgtatgacaacacatttacagttctgtaatgcaaggatgcagtttaaaaatgtgaagtagtgatggtttttgaaataagctttaaaatatagggatcttgaaggctccctggggtaactattttataacttagataaaatggctagtcatatctgtgtgtttgtaaagttatttttttaatattttaagattacaattttaacaaatgtagaaatgagccaaactatttaaattttaaaacagtaaaacaaaatgaaacttaatagctcacaaaattccagtccatgtttcatgacttattttagtcaatgaattttctatttatactaaacatatggacattttaaatgtgtttctaatatttttgattatctataatgtgcctgtcttcaattcacaagattgggttataacaattatttgccagattaacactagggaattatttgataaccagcttatcttatcagtagttttattgctgatcaggcaaaaatagttttccaaagttatttttaataaagtatatacaaaattcttatatattactagtcatgataaagtaaattaagcagtttttaaaacttagtgtgagtttgttcatcacaggtctgatatgagtttaagggatttcgcactccctgaatcagagaagtaagaccccttccttagattcctgttatacattttttaaaatgtagagtttgttttggagacattttcagtgcattgttattgccatatttatataatatgactattctaaaggctgtgaggccatggggtattggttaagttgcttgcttttgctttgtccattttcatcattttaaaatgggggataataacagaacttgtttcctagggccattgtaagtcacttgaataaaaaatagttttgaagcatgagagtcatacagagcggtccacctaaaaggcactcctgataataataaatgattttaaacaagt

SEQ ID NO: 151306 - DNA, 2544 bp, Artificial Sequence
  derived and/or modified sequence
atggaagccgccaggccttccgggtcgtggaacggcgcgttgtgccgattgctcctgctgaccctcgcgattctaattttcgctagcgatgcttgcaaaaacgtgaccctgcacgtgcccagcaaattggatgcggagaagctcgtgggccgggtcaacttaaaggagtgctttactgcagctaatctaatccatagttcagaccccgactttcaaattctggaggatggtagtgtctatactactaacactattctgctgtccagtgagaaaaggtcgttcacaatactgctctctaacaccgagaatcaagaaaagaagaagatctttgtgttcttggagcatcagacgaaagtcctgaagaagaggcatacaaaagagaaggtcctgcgcagggctaagagacgctgggcccccatcccctgttctatgttggagaatagtctgggtcctttcccgctgttcctgcaacaagtgcagtctgacacagcccagaactatactatttactattccatccgcggcccaggggtagaccaagagcctcgcaacttgttttacgttgagcgggacaccggtaacctgtattgtacgagacctgttgaccgcgagcagtatgagagttttgagatcatcgcctttgctaccactcctgatggatatacacccgaactgccgctgcctttgataatcaagattgaagacgaaaacgataattatccaatattcaccgaggagacgtacacctttactatctttgaaaattgtcgcgtggggacaactgttggccaggtctgtgccaccgataaggatgaacccgacaccatgcacactagattgaagtacagcattattgggcaggtgcctccgagtccgacacttttcagcatgcacccaactaccggtgtcatcactactacttcatcacaattagacagggaactcattgataaataccagttgaaaatcaaggtccaagacatggatgggcagtatttcgggctccagaccacgagcacatgcatcatcaatatcgacgacgttaacgatcatctccccactttcaccaggacatcctacgtgaccagcgtcgaggagaacacagtagacgtagagattttacgagttacagtagaggacaaggacctggtgaacaccgcaaattggagggcaaactataccatccttaaaggcaatgagaacggcaacttcaagatcgtcaccgatgccaagactaatgaaggcgtgctctgtgtggtgaaacccttgaactacgaagagaagcagcaaatgatactgcagatcggggttgtgaacgaagccccattttcaagagaggcctctccccgctctgctatgagcactgcgaccgtcacagtaaatgtagaggaccaggacgaggggcccgagtgcaatccgcctatccagacagtgcggatgaaagaaaacgccgaagtgggaacgaccagcaatgggtacaaggcctatgaccctgaaacccgttcctcttctgggatccgatataagaaactgacagaccctacgggatgggtgacaattgatgagaacaccggaagcatcaaagtattccgttctctggaccgcgaagccgagacgatcaagaacggtatttacaatataactgtgctggcttccgatcagggaggacgcacctgtacagggacactgggcatcatcctgcaggatgtcaacgacaactctcctttcattcccaagaagacggtgatcatttgcaagccaactatgtctagtgctgagattgtcgctgttgacccagatgagccaattcatggaccacccttcgatttttccttagaatcttccacatcagaagtacagaggatgtggagactcaaagccatcaacgatactgcggcccgcttatcataccagaacgatcctccctttggcagttacgtggtccctataacagtgcgggatcgtttaggaatgtcctcagtgaccagcctcgacgttaccctgtgcgattgcatcactgaaaacgactgcactcacagagttgacccccggatcggaggaggaggcgtgcaactgggcaagtgggccatcctagctatcctgcttggtatcgccctccttttctgtatactcttcaccttggtgtgcggagccagtggtacatccaaacagcccaaagtgataccagacgacctggcccaacagaacttgatcgtgtcaaacacagaggcgcccggagacgataaggtctatagtgcaaatgggtttaccacacagacggtgggcgcgagcgcacagggcgtctgtgggaccgtcggcagtggcattaagaatggggggcaggagaccattgaaatggtgaaaggtggtcatcaaacatccgagtcatgcaggggcgccggccaccaccacacattggattcctgtcgtggcgggcacaccgaggtagataattgtaggtacacatacagcgagtggcactcctttacacaacctcggctgggcgaggagtccatacgcggtcacacgcttatcaaaaactag

SEQ ID NO: 151307 - DNA, 2544 bp, Artificial Sequence
  derived and/or modified sequence
atggaggccgcccggcccagcggctcctggaatggagccctgtgccgcctgctgctgctgaccctggccatcctgatctttgccagtgatgcctgcaagaatgtgaccctgcacgtgcccagcaagctggatgctgagaagctggtgggccgggtgaacctgaaggagtgcttcaccgctgccaacctgatccacagcagtgaccctgacttccagatcctggaggatggctctgtgtacaccaccaacaccatcctgctgagcagcgagaagaggagcttcaccatcctgctgagcaacacagagaaccaggagaagaagaagatctttgtgttcctggagcaccagaccaaggtgctgaagaagaggcacaccaaggagaaggtgctgcggcgggccaagaggcgctgggcccccatcccctgcagcatgctggagaacagcctgggccccttccccctcttcctgcagcaggtgcagagcgacacagcccagaactacaccatctactacagcatccggggccctggggtggaccaggagcccaggaacctcttctacgtggagcgggacaccggcaacctgtactgcaccaggcctgtggaccgggagcagtatgagagctttgagatcatcgcctttgccaccaccccagatggctacaccccagagctgcccctgcccctcatcatcaagattgaagatgaaaatgacaactaccccatcttcacagaggagacctacaccttcaccatctttgagaactgccgggtgggcaccaccgtgggccaggtgtgtgccacagacaaggatgagccagacaccatgcacacccggctgaagtacagcatcatcggccaggtgccccccagccccaccctcttctccatgcaccccaccactggagtcatcaccaccaccagcagccagctggaccgggagctgattgacaagtaccagctgaagatcaaggtgcaggacatggatggccagtacttcggcctgcagaccaccagcacctgcatcatcaacattgatgatgtgaatgaccacctgcccaccttcaccaggaccagctatgtgacctctgtggaggagaacacagtggatgtggagatcctgcgggtgacagtggaggacaaggacctggtgaacacagccaactggagggccaactacaccatcctgaagggaaatgaaaatggaaacttcaagatcgtgacagatgccaagaccaatgaaggagtgctgtgtgtggtgaagcccctgaactatgaggagaagcagcagatgatcctgcagattggagtggtgaatgaggcccccttcagccgggaggccagccccaggtctgccatgagcacagccaccgtgacagtgaatgtggaggaccaggatgagggccctgagtgcaacccccccatccagacagtgaggatgaaggaaaatgctgaggtgggcaccaccagcaatggctacaaggcctatgaccctgagaccaggagcagcagcggcatccgctacaagaagctgacagaccccaccggctgggtgaccattgatgagaacacaggcagcatcaaggtgttccgcagcctggaccgggaggccgagaccatcaagaatggcatctacaacatcaccgtgctggccagtgaccagggcggccgcacctgcaccggcaccctgggcatcatcctgcaggatgtgaatgacaacagccccttcatccccaagaagacagtcatcatctgcaagcccaccatgagcagcgctgagatcgtggccgtggaccctgatgagcccatccacggccccccatttgacttcagcctggagagcagcaccagcgaggtgcagaggatgtggaggctgaaggccatcaatgacacagctgcccggctgagctaccagaatgaccccccatttggcagctatgtggtgcccatcaccgtgcgggaccggctgggcatgagctctgtgaccagcctggatgtgaccctgtgtgactgcatcacagaaaatgactgcacccaccgggtggaccccagaattggaggcggcggcgtgcagctgggcaagtgggccatcctggccatcctgctgggcatcgccctgctcttctgcatcctcttcaccctggtgtgtggggccagcggcaccagcaagcagcccaaggtgatcccagatgacctggcccagcagaacctgattgtgagcaacacagaggcccctggagatgacaaggtgtacagcgccaacggcttcaccacccagacagtgggcgccagcgcccagggcgtgtgtggcaccgtgggcagcggcatcaagaatggaggccaggagaccatcgagatggtgaagggcggccaccagaccagcgagagctgccgcggggccggccaccaccacaccctggacagctgccggggcggccacacagaggtggacaactgccgctacacctacagcgagtggcacagcttcacccagccccggctgggggaggagagcatccggggccacaccctcatcaagaactag

SEQ ID NO: 151308 - DNA, 2544 bp, Artificial Sequence
  derived and/or modified sequence
atggaggccgcccggcccagcggcagctggaacggcgccctgtgccgcctcctgttacttaccttggcaattttgatattcgccagcgacgcctgcaaaaatgtgacactccacgtgccctcaaaactcgatgcagaaaagctagttggtcgcgttaatcttaaggagtgttttacagccgcaaatctcatccacagctccgacccagactttcagatacttgaggacggaagcgtgtacaccaccaatacgattctgctgagcagcgagaagagatccttcaccatcttgctcagtaacaccgagaaccaggagaaaaaaaagattttcgtcttcctcgagcaccaaaccaaggtactgaagaaacgccatacaaaagaaaaagtgttaagacgcgctaagcgcagatgggcacccatcccttgttcaatgctcgagaactctttaggccctttccccttatttttacagcaggttcagtccgataccgctcagaactataccatctactattccatccgcggtcccggggtggatcaggagccacggaaccttttctacgtggagcgggacaccggaaatctgtattgcaccagacctgtcgatcgcgaacaatacgaatcttttgagattatcgcctttgccactacgcctgacggatacactccggagctcccgctaccgttgataattaaaattgaagatgaaaacgataactacccaatctttacggaggaaacctatacttttacgatcttcgagaattgtcgggtgggcacgactgtcggccaagtgtgcgccacagataaagacgagccagacacgatgcacacaagactgaaatacagtatcatcggccaggtcccgccttcccctacgctgttctccatgcatccaaccactggggtcataaccacgacttctagtcagcttgaccgggagctgatagataagtaccagctcaaaataaaggttcaggatatggatggccaatattttgggctacagaccacttccacctgtatcatcaatatcgatgatgtgaacgaccatctccctacatttacgaggacaagctatgtgacctcagtcgaggaaaacactgttgacgttgagattcttagagtcaccgtcgaagataaggatcttgtaaataccgcaaactggcgagctaactataccattcttaagggaaatgaaaatggaaattttaagatcgttaccgatgccaaaactaatgaaggcgtgttgtgtgtcgtcaagcctttgaactacgaggaaaaacaacaaatgattcttcagataggagtggtgaatgaggcacctttcagccgcgaagcctcacctaggtccgcaatgagcacagctactgtcacagtcaacgtcgaggatcaggatgaaggacccgaatgtaatcctcccattcaaactgtgaggatgaaagaaaacgcagaagtggggaccacctccaacggctacaaagcctacgacccagaaactcggtcttcctctggcattagatataaaaaacttaccgatcccaccgggtgggtaaccattgacgagaatactggaagtatcaaagtgttcaggtctttggaccgcgaagcggagacaatcaaaaatgggatttacaatataacagtgctggctagcgaccaagggggtcgcacctgcaccggcaccctaggaatcatactgcaggacgtgaatgataatagcccattcatccctaaaaagaccgttatcatttgtaaacctactatgtcctccgctgaaattgttgcagtggaccctgatgagcccatacatgggccccccttcgatttcagccttgagtcatccaccagtgaagtgcagaggatgtggagactgaaggccattaacgataccgccgccagactgtcttatcaaaacgacccccccttcggatcttacgtagtgcccatcacagttcgtgatcgcctcggcatgtctagcgtgacctcactcgatgtcacactgtgtgattgcatcacagagaatgactgcacacatagggtggacccacggatcggagggggcggcgttcagttaggaaagtgggctattctcgcaattttactcggtatagcactactcttttgcatcttgtttaccttggtctgtggtgctagtggaacttcaaaacagccaaaggtgatcccagacgacttggcccagcagaacctgatcgtgtccaatactgaggccccaggtgacgataaggtctacagtgctaatgggttcacaactcaaacggtgggggccagtgcccagggtgtatgcggaaccgtgggctccggcatcaagaacggggggcaggaaacaattgaaatggtcaagggtggtcaccagacctctgagagctgccgcggggccggccaccatcacaccctagactcgtgcagaggagggcatactgaggtggataattgcaggtatacttattcagagtggcacagttttacccagccacggctgggggaggagtcaattcgcgggcacaccttaattaaaaactag

SEQ ID NO: 151309 - DNA, 2544 bp, Artificial Sequence
  derived and/or modified sequence
atggaagccgctcggccttctggatcatggaatggggctctgtgtagactgctcctcctcaccctcgctatcctcatcttcgcctccgatgcctgcaagaacgtgacccttcatgttccaagtaaattagatgctgagaaacttgtgggcagggtcaacctcaaagagtgttttactgcggctaacttgattcacagttccgatccagactttcagatactggaagatggatccgtgtacacaaccaacacaatacttctctccagtgagaaaagaagctttactatactgctgtctaatacagagaatcaggagaagaaaaagatctttgtgttcctcgagcaccaaactaaagtactcaagaaaagacacacaaaagaaaaagtgcttaggcgggctaaaagacgctgggccccaataccatgctccatgctcgagaacagccttggcccattccctctttttctccagcaggttcagtcagacaccgctcagaactacactatctactactccatccggggaccaggcgttgaccaggagccaaggaatctgttttacgtggaaagggacactgggaacctgtattgcaccagacccgtagatcgtgaacaatatgagagcttcgaaattatcgcctttgcaactacccctgacggctacacacccgagttgcctttacctctaatcataaaaatagaggacgagaacgataattaccctatatttaccgaagagacctataccttcaccatatttgagaactgtcgggtcggcactaccgtgggccaggtctgcgccacggataaggacgaaccagatacaatgcacacaagactcaaatatagtatcatcggccaggttcctcctagcccgacattgttttcaatgcatcctaccacaggcgtcatcacaacgactagcagccagctggacagggaactcatcgacaaataccagctgaaaattaaggtgcaggacatggatggccaatacttcgggctgcagacaacctctacatgcatcatcaatatcgacgacgttaatgaccatctgcctacttttactagaacctcctatgtgacctctgttgaggagaatactgtcgatgtagagattttacgggtgacagtggaggacaaggatttggtgaatactgccaactggcgcgctaattacacaatcctgaaggggaacgaaaacggtaactttaaaattgtgacagacgccaaaacgaacgagggcgtactctgcgtagtgaaacccctcaattacgaggagaagcagcagatgattctgcagataggagttgtaaacgaagccccattcagcagggaagcatccccacgttccgcgatgtctactgctacagtcaccgtcaacgtcgaagaccaggatgaaggccctgaatgcaaccctccaattcagaccgtacggatgaaagagaatgccgaggttggcaccacctccaatggctacaaggcctatgacccagagacccgcagttcgtcaggaatcaggtacaagaaattaacggatccgacaggatgggtcacaatcgacgaaaatactgggtctataaaagtctttcgcagcctggacagagaggcagaaacgataaagaacggtatttacaacatcactgttctggcgtcagaccagggcggtcggacatgtacagggacccttgggataattttgcaggacgtcaacgacaattctccatttataccaaaaaagaccgtgatcatatgcaaaccaactatgagctcagccgagatcgtggccgtcgaccccgatgagcccatccacggcccacctttcgactttagcctggagtcctcaactagcgaggtccagaggatgtggcggctcaaggcaatcaacgataccgccgcacggctgagctatcaaaatgaccctcctttcggttcatatgtggttcccatcaccgtgagggatcgattgggcatgtccagcgtgaccagtttggacgtgacactctgtgactgcatcaccgaaaatgactgcactcatagggtcgatccacgaattggaggaggcggtgtacagcttggcaagtgggctatccttgcaattctcttaggcatcgcccttctgttctgtatactgtttacactggtttgtggagcctcagggacatccaaacaacccaaagtgattcctgatgacttagcacagcagaatctgatagtctcaaacaccgaggcccctggggatgataaagtttatagtgcaaacgggtttaccacgcagaccgttggagcttccgcccagggggtctgtggaaccgttggaagtggcatcaaaaacgggggacaagagactatcgagatggtgaagggtggtcaccagacctcagaatcatgtagaggagccggacaccaccatacactggattcttgtcgcggaggccataccgaggtcgacaactgtaggtatacttacagtgagtggcactcattcacgcaacctagactaggcgaagagagtataagagggcatacactgattaagaattag

SEQ ID NO: 151310 - protein, 322 aa, Artificial Sequence
  derived and/or modified sequence
MKTLAGLVLGLVIFDAAVTAPTLESINYDSETYDATLEDLDNLYNYENIPVDKVEIEIATVMPSGNRELLTPPPQPEKAQEEEEEEESTPRLIDGSSPQEPEFTGVLGPHTNEDFPTCLLCTCISTTVYCDDHELDAIPPLPKNTAYFYSRFNRIKKINKNDFASLSDLKRIDLTSNLISEIDEDAFRKLPQLRELVLRDNKIRQLPELPTTLTFIDISNNRLGRKGIKQEAFKDMYDLHHLYLTDNNLDHIPLPLPENLRALHLQNNNILEMHEDTFCNVKNLTYIRKALEDIRLDGNPINLSKTPQAYMCLPRLPVGSLV

SEQ ID NO: 151311 - protein, 234 aa, Artificial Sequence
  derived and/or modified sequence
MKTLAGLVLGLVIFDAAVTAPTLESINYDSETYDATLEDLDNLYNYENIPVDKVEIEIATVMPSGNRELLTPPPQPEKAQEEEEEEESTPRLIDGSSPQEPEFTGVLGPHTNEDFPTCLLCTCISTTVYCDDHELDAIPPLPKNTAYFYSRFNRIKKINKNDFASLSDLKRIDLTSNLISEIDEDAFRKLPQLRELVLRDNKIRQLPELPTTLTFIDISNNRLGRKGIKQEAFK

SEQ ID NO: 151312 - DNA, 705 bp, Artificial Sequence
  derived and/or modified sequence
atgaagaccctggccggcctggtgctgggcctggtgatcttcgacgccgccgtcaccgctccgaccctggaatcaattaactacgatagcgagacctacgacgcgactctggaggacctggataatctgtataattacgaaaacatccccgtcgataaggtcgagattgagatcgcaactgttatgccatctgggaatcgcgagctcttgacccctccgccccagcccgaaaaagctcaggaggaggaggaggaggaagaaagcactccccgactcatcgatggcagtagcccgcaggaaccagaatttaccggtgtgttgggcccccacaccaacgaggattttcctacctgcttgctgtgtacatgcatttccaccacagtctactgtgatgaccatgaactagacgcaatccccccactgccgaagaatacagcctacttctactcacggttcaatcgaataaagaagattaacaaaaacgattttgccagcttgtctgacctgaaacggatcgacttgaccagcaacctgatcagcgagatcgacgaggacgctttccgtaaactgccacagctgcgggaattggttttaagagataataaaattcgccagctacctgagctgcccaccaccttaactttcattgacatttccaacaatcgcctgggccgcaagggtatcaaacaggaggccttcaagtag

SEQ ID NO: 151313 - DNA, 969 bp, Artificial Sequence
  derived and/or modified sequence
atgaaaaccctggcaggcctggtgctcggcctcgtgatctttgacgccgcagtaaccgcacctacattggaaagcattaactacgattccgagacatacgacgccaccctcgaagacctcgacaatctgtacaattacgagaacatcccagtcgacaaggtagagatcgagatcgctactgtgatgccatctggcaatagagagttgctcaccccaccaccccagcctgaaaaggctcaagaggaagaggaagaagaggagtcaacaccacgcctgatcgacgggagcagcccccaagaacccgaatttacaggcgtgcttggcccacacacgaatgaagatttcccaacctgcctgctctgcacatgtatttctaccaccgtttattgcgacgaccacgaattggatgctatccctccattgcccaagaataccgcatacttttactcccgcttcaaccgtattaaaaaaatcaataaaaatgatttcgcttcactatccgaccttaagcgtattgatctgacctctaatctgattagtgaaatcgatgaggatgccttcagaaagctgcctcaactgagggagctggtcctccgcgacaataaaatcaggcagctgcctgaattgccgacaactctgacatttattgatatcagcaacaaccggcttgggcgtaagggcatcaagcaggaagccttcaaggatatgtacgacctccaccacctgtaccttaccgacaacaatctggaccatattcctttacccctgccggagaacctacgggctctccatctgcaaaacaacaatatcttggagatgcacgaagataccttctgtaatgtgaaaaatctaacgtacatccggaaggctctcgaggatatccgactggatggcaacccaataaacttgtcaaagacaccccaggcgtacatgtgcctgcctcggctcccagtgggctccttggtgtag

SEQ ID NO: 151314 - DNA, 705 bp, Artificial Sequence
  derived and/or modified sequence
atgaaaaccctggccggactggtcttgggcctggtcatcttcgatgccgctgtcaccgctcctactctggagagtatcaactatgattctgagacttacgacgcaactctcgaagacttagataatttgtacaattacgaaaacatccctgtggacaaagtcgaaatcgaaatcgcaaccgtgatgcctagtggaaaccgcgagctgctcaccccaccaccccaacctgaaaaggctcaggaggaggaggaggaggaagaaagtacccctaggctgatcgacggaagctcgccgcaggaaccagagttcacgggcgtgttgggtccacacactaatgaagactttcctacctgcctgctgtgtacgtgtatttccaccaccgtgtactgtgatgatcatgagctggacgccatccctcctctccccaaaaacactgcttacttctattccagattcaaccgcattaaaaaaattaacaaaaacgattttgccagcctgagtgacctcaaaagaattgacctgaccagtaacctgatttcggagatagacgaagatgcatttagaaagctcccccagctgcgggagctggtgcttagggataataagattcgccagctgcctgagctgcctactaccctgacatttattgatatcagtaacaatcgcctgggcaggaagggtattaaacaggaggcctttaaatag

SEQ ID NO: 151315 - DNA, 969 bp, Artificial Sequence
  derived and/or modified sequence
atgaagaccctagctggactcgtgttgggcttggttatattcgacgccgccgtgacagcgcccaccctcgagtctattaactacgacagtgagacctacgatgctactctagaggacttggacaacctgtataactatgagaacatccctgtggacaaagtcgagatcgaaatagccacagtgatgccgtccggcaatcgcgagctgctgacaccacctccacagccagagaaagctcaagaggaagaggaagaagaagaatccacgccgcgcttgattgacggcagcagcccccaagagcccgaatttacaggcgtgctcggccctcacacaaacgaagacttccccacctgtctgctgtgtacctgtatatctacaactgtgtactgtgatgatcatgaactcgacgccattcctcccttgcccaaaaatactgcctacttttacagtcggttcaaccgaatcaagaagataaataaaaacgactttgcatccttaagcgatctcaagaggatcgacctgacctccaacctgatctcagaaattgatgaggatgccttcaggaaactcccacaactgcgcgaattagtactccgggataataaaatcaggcaattaccagaactgcccaccaccctgacattcattgatatttccaataatcgcttgggcagaaagggcatcaagcaggaagccttcaaagacatgtacgaccttcaccacctttacctgactgacaataacctggatcatatcccactgcccctgcccgaaaacctccgggcactccacctgcagaacaacaacatacttgaaatgcatgaggatactttctgcaatgtcaagaatctgacttacattcgtaaggcactggaagatatccgcctcgatggcaaccctataaacctctccaaaacccctcaagcctatatgtgtctccctcgccttcccgttggatcattagtctag

SEQ ID NO: 151316 - DNA, 705 bp, Artificial Sequence
  derived and/or modified sequence
atgaagacgctggccggccttgtgctaggcctggttattttcgatgccgccgtcactgctcctacactcgagtccattaactacgattcagaaacatatgatgcaacattggaagacttggacaatctgtacaattacgaaaacatcccggtcgacaaagttgagatagagatcgccaccgtgatgccttcaggaaatagagagctgctcacaccgccaccccagccagaaaaagcccaagaggaagaagaggaagaggaatctacaccacgacttatcgatggatcctcaccccaagagccagaattcaccggggttctagggccccatactaacgaagattttcccacctgtcttctctgtacttgcatatctactaccgtttactgcgacgaccacgaactggatgctattccgccgctgcccaagaataccgcttatttctacagtcgctttaatcggataaagaagatcaacaaaaacgatttcgctagtttaagtgacctgaagcgtattgacctgactagtaaccttattagcgagatcgacgaggacgcctttcggaagctaccacagcttcgcgagctcgtgctgcgagataataaaatccgccaactcccagaattgcccaccactctgaccttcatagacatctctaataatcgcctaggtcgaaaaggcatcaagcaggaagccttcaagtag

SEQ ID NO: 151317 - DNA, 969 bp, Artificial Sequence
  derived and/or modified sequence
atgaagacgctggccggtcttgttttgggacttgtgatcttcgatgctgccgtcactgcacccacactcgagagtattaactacgactccgaaacctacgatgcgaccctggaagatctggacaatctctataattatgaaaatatccccgtcgataaggtcgaaatcgaaatcgcaacggtaatgccatccggaaatagagaactgctcaccccaccaccacaacccgagaaagcacaggaggaagaggaggaggaggaatctactcctagactgatagatggatcatcaccacaggaacctgagtttacaggtgtcctgggacctcacacaaacgaggattttcccacctgcctgctctgcacatgcattagcaccaccgtgtattgtgacgaccatgaactcgacgccattccccctcttcccaaaaacacagcctatttttactcccgatttaatagaattaaaaagatcaataagaacgatttcgcatcactttccgatcttaagagaattgacctgacgtccaacctaatttcagaaatcgatgaagatgcattccgcaaactgccacagctgagagaacttgtgcttagagataataagattagacaactccctgagttacctactacattgacctttatcgacatatccaataaccgcctgggtagaaaaggcataaagcaggaggctttcaaagacatgtatgaccttcatcacctttatctcaccgacaataatttggatcatatccctctccctctacctgagaacctccgagccttacacctacagaacaacaacatcttggagatgcatgaggatactttttgcaacgtaaagaatctgacctacatccgtaaggccctggaagacatcagactggacggcaaccccataaacctctccaaaacccctcaagcctatatgtgtctccctcgccttcccgttggatcattagtctag

SEQ ID NO: 151318 - DNA, 705 bp, Artificial Sequence
  derived and/or modified sequence
atgaagacgctggccggccttgtgctaggcctggttattttcgatgccgccgtcactgctcctacactcgagtccattaactacgattcagaaacatatgatgcaacattggaagacttggacaatctgtacaattacgaaaacatcccggtcgacaaagttgagatagagatcgccaccgtgatgccttcaggaaatagagagctgctcacaccgccaccccagccagaaaaagcccaagaggaagaagaggaagaggaatctacaccacgacttatcgatggatcctcaccccaagagcccgaatttaccggagttctcgggcctcacaccaatgaagacttccctacttgtctgctgtgtacttgcatatcaactacagtctactgcgacgaccatgaactggatgccatcccccctcttccgaagaacactgcttatttttactcacgcttcaatcgcatcaagaagattaataaaaatgatttcgcatctctttctgatctaaaaaggattgacttgacttctaatctgatctcagagatagacgaagatgcatttagaaaactgccccagcttcgcgagttggttctacgagacaataagattagacagctccctgaactaccaacaacacttactttcattgatatcagcaacaatagacttggacggaagggtattaagcaagaggccttcaagtag

SEQ ID NO: 151319 - DNA, 790 bp, Artificial Sequence
  derived and/or modified sequence
acagccattggtcaggggcaaataccactagctctgcatcctcagtcactttgtgccatttcatcaggtcagagccaaagcttgaaaaatgaagacattagcaggacttgttctgggacttgtcatctttgatgctgctgtgactgccccaactctagagtccatcaactatgactcagaaacctatgatgccaccttagaagacctggataatttgtacaactatgaaaacatacctgttgataaagttgagattgaaatagccacagtgatgccttcagggaacagagagctcctcactccacccccacagcctgagaaggcccaggaagaggaagaggaggaggaatctactcccaggctgattgatggctcttctccccaggagcctgaattcacaggggttctggggccacacacaaatgaagactttccaacctgtcttttgtgtacttgtataagtaccaccgtgtactgtgatgaccatgaacttgatgctattcctccgctgccaaagaacaccgcttatttctattcccgctttaacagaattaaaaagatcaacaaaaatgactttgcaagcctaagtgatttaaaaaggattgatctgacatcaaatttaatatctgagattgatgaagatgcattccgaaaactgcctcaacttcgagagcttgtcctgcgtgacaacaaaataaggcagctcccagaattgccaaccactttgacatttattgatattagcaacaatagacttggaaggaaagggataaagcaagaagcatttaaa

SEQ ID NO: 151320 - DNA, 1539 bp, Artificial Sequence
  derived and/or modified sequence
acagccattggtcaggggcaaataccactagctctgcatcctcagtcactttgtgccatttcatcaggtcagagccaaaggaaagcttgaaaaatgaagacattagcaggacttgttctgggacttgtcatctttgatgctgctgtgactgccccaactctagagtccatcaactatgactcagaaacctatgatgccaccttagaagacctggataatttgtacaactatgaaaacatacctgttgataaagttgagattgaaatagccacagtgatgccttcagggaacagagagctcctcactccacccccacagcctgagaaggcccaggaagaggaagaggaggaggaatctactcccaggctgattgatggctcttctccccaggagcctgaattcacaggggttctggggccacacacaaatgaagactttccaacctgtcttttgtgtacttgtataagtaccaccgtgtactgtgatgaccatgaacttgatgctattcctccgctgccaaagaacaccgcttatttctattcccgctttaacagaattaaaaagatcaacaaaaatgactttgcaagcctaagtgatttaaaaaggattgatctgacatcaaatttaatatctgagattgatgaagatgcattccgaaaactgcctcaacttcgagagcttgtcctgcgtgacaacaaaataaggcagctcccagaattgccaaccactttgacatttattgatattagcaacaatagacttggaaggaaagggataaagcaagaagcatttaaagacatgtatgatctccatcatctgtacctcactgataacaacttggaccacatccctctgccactcccagaaaatctacgagcccttcacctccagaataacaacattctggaaatgcacgaagatacgttctgcaatgttaaaaatttgacttatattcgtaaggcactagaggacattcgattggatggaaaccctattaatctcagcaaaactcctcaagcatacatgtgtctacctcgtctgcctgttgggagccttgtctaatttcagataatggttagcattacgatggctactataaataaaccattcttactgctctcttccaaaacaaaactcagcatgatactttgagattgtgttctgagagatgatatgactacataaaatacaattaaaaatgttataatgaaaatgtagtaatttaagaaaacaccagatgagttaggaataaacctataacatttacaaaaagagcaaaactaagtgatagaaaatatttcacacatgttcttatagatcatgtatcacttgcaagttttaggagttcatatcctatatcatttcaaattaagtacataataaagtaaaattttgaaatgaacactttaggtatttttgccaagatttagatgtttttaattaaacttttctcttcctttttttttcactaaagcatgtttattcccctaatccattaaagagcatgaaaaaaagaataaatgtatttgaaaattataa

SEQ ID NO: 151321 - DNA, 969 bp, Artificial Sequence
  derived and/or modified sequence
atgaagaccctggccggcctggtgctgggcctggtgatcttcgacgccgccgtgaccgcccccaccctggagagcatcaactacgacagcgagacctacgacgccaccctggaggacctggacaacctgtacaactacgagaacatccccgtggacaaggtggagatcgagatcgccaccgtgatgcccagcggcaacagagagctgctgaccccccccccccagcccgagaaggcccaggaggaggaggaggaggaggagagcacccccagactgatcgacggcagcagcccccaggagcccgagttcaccggcgtgctgggcccccacaccaacgaggacttccccacctgcctgctgtgcacctgcatcagcaccaccgtgtactgcgacgaccacgagctggacgccatcccccccctgcccaagaacaccgcctacttctacagcagattcaacagaatcaagaagatcaacaagaacgacttcgccagcctgagcgacctgaagagaatcgacctgaccagcaacctgatcagcgagatcgacgaggacgccttcagaaagctgccccagctgagagagctggtgctgagagacaacaagatcagacagctgcccgagctgcccaccaccctgaccttcatcgacatcagcaacaacagactgggcagaaagggcatcaagcaggaggccttcaaggacatgtacgacctgcaccacctgtacctgaccgacaacaacctggaccacatccccctgcccctgcccgagaacctgagagccctgcacctgcagaacaacaacatcctggagatgcacgaggacaccttctgcaacgtgaagaacctgacctacatcagaaaggccctggaggacatcagactggacggcaaccccatcaacctgagcaagaccccccaggcctacatgtgcctgcccagactgcccgtgggcagcctggtgtag

SEQ ID NO: 151322 - DNA, 705 bp, Artificial Sequence
  derived and/or modified sequence
atgaagaccctggccggcctggtgctgggcctggtgatcttcgacgccgccgtgaccgcccccaccctggagagcatcaactacgacagcgagacctacgacgccaccctggaggacctggacaacctgtacaactacgagaacatccccgtggacaaggtggagatcgagatcgccaccgtgatgcccagcggcaacagagagctgctgaccccccccccccagcccgagaaggcccaggaggaggaggaggaggaggagagcacccccagactgatcgacggcagcagcccccaggagcccgagttcaccggcgtgctgggcccccacaccaacgaggacttccccacctgcctgctgtgcacctgcatcagcaccaccgtgtactgcgacgaccacgagctggacgccatcccccccctgcccaagaacaccgcctacttctacagcagattcaacagaatcaagaagatcaacaagaacgacttcgccagcctgagcgacctgaagagaatcgacctgaccagcaacctgatcagcgagatcgacgaggacgccttcagaaagctgccccagctgagagagctggtgctgagagacaacaagatcagacagctgcccgagctgcccaccaccctgaccttcatcgacatcagcaacaacagactgggcagaaagggcatcaagcaggaggccttcaagtag

SEQ ID NO: 151323 - DNA, 969 bp, Artificial Sequence
  derived and/or modified sequence
atgaaaacactggctggattagtcctgggactcgtcatctttgatgccgcagttacagcacccactctggagtctattaactatgactcagagacttacgatgcgacccttgaggacctggacaacttgtacaactacgagaatattcccgttgataaagtagaaatcgagatcgccaccgtgatgcccagtggtaatcgagaactgctcacacctccgccgcagcccgagaaagcgcaggaagaggaggaggaagaggaatccaccccacggctgattgatggctctagtcctcaggagcctgagtttacaggggttctggggccacacaccaatgaggatttccccacttgcctactatgcacctgcatcagcactacagtgtattgtgacgaccacgaactggacgccattcctcccttacccaaaaataccgcttatttttactcacgatttaacagaatcaagaagattaataaaaatgacttcgcctcattgagcgatctgaaaagaatagacctaacctccaatttgatttccgagattgacgaggacgcattcaggaaacttccacagctgcgcgagctggttctgagggataataaaatacgacagctgccagagcttcccaccacattgacattcatcgatatcagtaacaatcgcctgggacgaaagggcatcaagcaggaggcattcaaagatatgtacgacttgcatcacctttacctgacagacaacaatctcgatcacatccccttgcctcttcctgagaatctccgggccctgcacctacagaataataacatcctggagatgcatgaggacactttctgcaacgtgaaaaacctgacttacatcagaaaggccctggaggatatccgtctggatggcaacccgatcaatctttcgaagacacctcaggcttacatgtgtttgcctcggttacctgtgggaagcctggtgtag

SEQ ID NO: 151324 - DNA, 705 bp, Artificial Sequence
  derived and/or modified sequence
atgaagaccctcgctgggcttgtcctgggacttgtcatattcgatgcggctgtaacagctcctacacttgaatccataaattacgattccgagacctacgacgccacactagaggatctcgataacctatacaactatgaaaacattcccgtggataaggttgagattgagattgcaactgtcatgccttccggaaatcgggaactgctgacacccccccctcagccagaaaaggcacaggaggaagaagaggaggaggagagcacacctagactgatcgatggcagctcccctcaggaacccgagttcacaggcgtgttgggaccacatacaaacgaagattttcccacatgccttttgtgcacatgcatcagcaccacagtgtactgcgatgatcacgaactcgatgccatcccaccactccccaagaacaccgcatacttttattcacggtttaaccgcataaaaaaaattaataaaaacgactttgcctcactgtccgacctcaagcgaatcgatctgacaagtaacctcatcagtgaaattgatgaagacgcatttagaaaattaccacagctccgggagttggtcctgagagataataagatcaggcagctccccgagctgccgaccaccttaactttcatcgacattagtaacaatcggctgggacggaagggcatcaagcaggaggcctttaaatag

SEQ ID NO: 151325 - DNA, 969 bp, Artificial Sequence
  derived and/or modified sequence
atgaagaccctggccggcctggtgctgggcctggtgatctttgatgctgctgtgacagcccccaccctggagagcatcaactatgacagcgagacctatgatgccaccctggaggacctggacaacctgtacaactatgagaacatccctgtggacaaggtggagattgagatcgccaccgtgatgcccagcggcaaccgggagctgctgaccccaccaccccagcctgagaaggcccaggaggaggaggaggaggaggagagcaccccccggctgattgatggcagcagcccccaggagcctgagttcaccggggtgctgggcccccacaccaatgaagacttccccacctgcctgctgtgcacctgcatcagcaccaccgtgtactgtgatgaccacgagctggatgccatcccccccctgcccaagaacacagcctacttctacagccgcttcaaccgcatcaagaagatcaacaagaatgactttgccagcctgagtgacctgaagagaattgacctgaccagcaacctgatcagcgagattgatgaagatgccttcaggaagctgccccagctgcgggagctggtgctgcgggacaacaagatccggcagctgcctgagctgcccaccaccctgaccttcatcgacatcagcaacaaccggctgggcaggaagggcatcaagcaggaggccttcaaggacatgtatgacctgcaccacctgtacctgacagacaacaacctggaccacatccccctgcccctgcctgagaacctgcgggccctgcacctgcagaacaacaacatcctggagatgcatgaggacaccttctgcaatgtgaagaacctgacctacatcaggaaggccctggaggacatccggctggatggcaaccccatcaacctgagcaagaccccccaggcctacatgtgcctgccccggctgcctgtgggcagcctggtgtag

SEQ ID NO: 151326 - DNA, 705 bp, Artificial Sequence
  derived and/or modified sequence
atgaagaccctggccggcctggtgctgggcctggtgatctttgatgctgctgtgacagcccccaccctggagagcatcaactatgacagcgagacctatgatgccaccctggaggacctggacaacctgtacaactatgagaacatccctgtggacaaggtggagattgagatcgccaccgtgatgcccagcggcaaccgggagctgctgaccccaccaccccagcctgagaaggcccaggaggaggaggaggaggaggagagcaccccccggctgattgatggcagcagcccccaggagcctgagttcaccggggtgctgggcccccacaccaatgaagacttccccacctgcctgctgtgcacctgcatcagcaccaccgtgtactgtgatgaccacgagctggatgccatcccccccctgcccaagaacacagcctacttctacagccgcttcaaccgcatcaagaagatcaacaagaatgactttgccagcctgagtgacctgaagagaattgacctgaccagcaacctgatcagcgagattgatgaagatgccttcaggaagctgccccagctgcgggagctggtgctgcgggacaacaagatccggcagctgcctgagctgcccaccaccctgaccttcatcgacatcagcaacaaccggctgggcaggaagggcatcaagcaggaggccttcaagtag

SEQ ID NO: 151327 - DNA, 969 bp, Artificial Sequence
  derived and/or modified sequence
atgaagaccctggccggcctggtgctgggcctggtgatcttcgacgcggcagtgacagccccaactctagagtctattaactacgattctgagacttacgacgcaactctcgaagacctggataatctgtacaattatgagaacatcccagtcgacaaggtcgagattgagatcgctacagttatgccatccgggaatagggagctcctgactccccctccccaacccgagaaagcgcaggaggaggaagaggaggaggaaagcacacctcgattgatagatggatccagcccacaggaaccagaattcaccggagtcctcgggcctcatacaaacgaggacttccccacctgcctcctatgcacatgcatctccaccaccgtctattgcgacgatcacgagctggacgccatacctcctctgcccaaaaacactgcctatttctactccagatttaaccgaataaaaaaaataaataagaacgattttgccagccttagtgacctcaaaaggattgatctaacttctaatttaatcagcgagattgacgaagacgcatttcgcaagttgcctcagctgcgggagctagtgctgagagataacaaaattaggcagctgcctgagctacccacaacactgacattcattgacatatctaataatcggttggggcgtaaaggtatcaaacaggaggcgtttaaggatatgtacgacctccaccatctctatctaacagacaacaacttggatcatattccactaccactgcctgaaaatctcagagccctgcaccttcagaataacaatattcttgagatgcatgaagatacgttttgcaatgtgaagaatctgacctatatcaggaaggccctcgaggatattagattggatggcaacccaattaacctttcgaagacaccgcaagcgtacatgtgtcttcctagactgcctgtcggaagcctagtgtag

SEQ ID NO: 151328 - RNA, 969 nt, Artificial Sequence
  derived and/or modified sequence
augaagacccuagcuggacucguguugggcuugguuauauucgacgccgccgugacagcgcccacccucgagucuauuaacuacgacagugagaccuacgaugcuacucuagaggacuuggacaaccuguauaacuaugagaacaucccuguggacaaagucgagaucgaaauagccacagugaugccguccggcaaucgcgagcugcugacaccaccuccacagccagagaaagcucaagaggaagaggaagaagaagaauccacgccgcgcuugauugacggcagcagcccccaagagcccgaauuuacaggcgugcucggcccucacacaaacgaagacuuccccaccugucugcuguguaccuguauaucuacaacuguguacugugaugaucaugaacucgacgccauuccucccuugcccaaaaauacugccuacuuuuacagucgguucaaccgaaucaagaagauaaauaaaaacgacuuugcauccuuaagcgaucucaagaggaucgaccugaccuccaaccugaucucagaaauugaugaggaugccuucaggaaacucccacaacugcgcgaauuaguacuccgggauaauaaaaucaggcaauuaccagaacugcccaccacccugacauucauugauauuuccaauaaucgcuugggcagaaagggcaucaagcaggaagccuucaaagacauguacgaccuucaccaccuuuaccugacugacaauaaccuggaucauaucccacugccccugcccgaaaaccuccgggcacuccaccugcagaacaacaacauacuugaaaugcaugaggauacuuucugcaaugucaagaaucugacuuacauucguaaggcacuggaagauauccgccucgauggcaacccuauaaaccucuccaaaaccccucaagccuauaugugucucccucgccuucccguuggaucauuagucuag

SEQ ID NO: 151329 - RNA, 705 nt, Artificial Sequence
  derived and/or modified sequence
augaagacgcuggccggccuugugcuaggccugguuauuuucgaugccgccgucacugcuccuacacucgaguccauuaacuacgauucagaaacauaugaugcaacauuggaagacuuggacaaucuguacaauuacgaaaacaucccggucgacaaaguugagauagagaucgccaccgugaugccuucaggaaauagagagcugcucacaccgccaccccagccagaaaaagcccaagaggaagaagaggaagaggaaucuacaccacgacuuaucgauggauccucaccccaagagccagaauucaccgggguucuagggccccauacuaacgaagauuuucccaccugucuucucuguacuugcauaucuacuaccguuuacugcgacgaccacgaacuggaugcuauuccgccgcugcccaagaauaccgcuuauuucuacagucgcuuuaaucggauaaagaagaucaacaaaaacgauuucgcuaguuuaagugaccugaagcguauugaccugacuaguaaccuuauuagcgagaucgacgaggacgccuuucggaagcuaccacagcuucgcgagcucgugcugcgagauaauaaaauccgccaacucccagaauugcccaccacucugaccuucauagacaucucuaauaaucgccuaggucgaaaaggcaucaagcaggaagccuucaaguag

SEQ ID NO: 151330 - RNA, 969 nt, Artificial Sequence
  derived and/or modified sequence
augaagacgcuggccggucuuguuuugggacuugugaucuucgaugcugccgucacugcacccacacucgagaguauuaacuacgacuccgaaaccuacgaugcgacccuggaagaucuggacaaucucuauaauuaugaaaauauccccgucgauaaggucgaaaucgaaaucgcaacgguaaugccauccggaaauagagaacugcucaccccaccaccacaacccgagaaagcacaggaggaagaggaggaggaggaaucuacuccuagacugauagauggaucaucaccacaggaaccugaguuuacagguguccugggaccucacacaaacgaggauuuucccaccugccugcucugcacaugcauuagcaccaccguguauugugacgaccaugaacucgacgccauucccccucuucccaaaaacacagccuauuuuuacucccgauuuaauagaauuaaaaagaucaauaagaacgauuucgcaucacuuuccgaucuuaagagaauugaccugacguccaaccuaauuucagaaaucgaugaagaugcauuccgcaaacugccacagcugagagaacuugugcuuagagauaauaagauuagacaacucccugaguuaccuacuacauugaccuuuaucgacauauccaauaaccgccuggguagaaaaggcauaaagcaggaggcuuucaaagacauguaugaccuucaucaccuuuaucucaccgacaauaauuuggaucauaucccucucccucuaccugagaaccuccgagccuuacaccuacagaacaacaacaucuuggagaugcaugaggauacuuuuugcaacguaaagaaucugaccuacauccguaaggcccuggaagacaucagacuggacggcaaccccauaaaccucuccaaaaccccucaagccuauaugugucucccucgccuucccguuggaucauuagucuag

SEQ ID NO: 151331 - RNA, 705 nt, Artificial Sequence
  derived and/or modified sequence
augaagacgcuggccggccuugugcuaggccugguuauuuucgaugccgccgucacugcuccuacacucgaguccauuaacuacgauucagaaacauaugaugcaacauuggaagacuuggacaaucuguacaauuacgaaaacaucccggucgacaaaguugagauagagaucgccaccgugaugccuucaggaaauagagagcugcucacaccgccaccccagccagaaaaagcccaagaggaagaagaggaagaggaaucuacaccacgacuuaucgauggauccucaccccaagagcccgaauuuaccggaguucucgggccucacaccaaugaagacuucccuacuugucugcuguguacuugcauaucaacuacagucuacugcgacgaccaugaacuggaugccauccccccucuuccgaagaacacugcuuauuuuuacucacgcuucaaucgcaucaagaagauuaauaaaaaugauuucgcaucucuuucugaucuaaaaaggauugacuugacuucuaaucugaucucagagauagacgaagaugcauuuagaaaacugccccagcuucgcgaguugguucuacgagacaauaagauuagacagcucccugaacuaccaacaacacuuacuuucauugauaucagcaacaauagacuuggacggaaggguauuaagcaagaggccuucaaguag

SEQ ID NO: 151332 - protein, 361 aa, Artificial Sequence [sequence omitted]

SEQ ID NO: 151333 - DNA, 1700 bp, Artificial Sequence
  derived and/or modified sequence
aaacttacttcagtttggacaactactcacagctactacacagagacccgaacgagtcactgatatacacctggaccaccaccaatggatatacaaatggcaaacaattttactccgccctctgcaactcctcagggaaatgactgtgacctctatgcacatcacagcacggccaggatagtaatgcctctgcattacagcctcgtcttcatcattgggctcgtgggaaacttactagccttggtcgtcattgttcaaaacaggaaaaaaatcaactctaccaccctctattcaacaaatttggtgatttctgatatactttttaccaccgctttgcctacacgaatagcctactatgcaatgggctttgactggagaatcggagatgccttgtgtaggataactgcgctagtgttttacatcaacacatatgcaggtgtgaactttatgacctgcctgagtattgaccgcttcattgctgtggtgcaccctctacgctacaacaagataaaaaggattgaacatgcaaaaggcgtgtgcatatttgtctggattctagtatttgctcagacactcccactcctcatcaaccctatgtcaaagcaggaggctgaaaggattacatgcatggagtatccaaactttgaagaaactaaatctcttccctggattctgcttggggcatgtttcataggatatgtacttccacttataatcattctcatctgctattctcagatctgctgcaaactcttcagaactgccaaacaaaacccactcactgagaaatctggtgtaaacaaaaaggctctcaacacaattattcttattattgttgtgtttgttctctgtttcacaccttaccatgttgcaattattcaacatatgattaagaagcttcgtttctctaatttcctggaatgtagccaaagacattcgttccagatttctctgcactttacagtatgcctgatgaacttcaattgctgcatggacccttttatctacttctttgcatgtaaagggtataagagaaaggttatgaggatgctgaaacggcaagtcagtgtatcgatttctagtgctgtgaagtcagcccctgaagaaaattcacgtgaaatgacagaaacgcagatgatgatacattccaagtcttcaaatggaaagtgaaatggattgtattttggtttatagtgacgtaaactgtatgacaaactttgcaggacttcccttataaagcaaaataattgttcagcttccaattagtattcttttatatttctttcattgggcactttcccatctccaactcggaagtaagcccaagagaacaacataaagcaaacaacataaagcacaataaaaatgcaaataaatatttcatttttatttgtaaacgaatacaccaaaaggaggcgctcttaataactcccaatgtaaaaagttttgttttaataaaaaatttaattattatttcttgccaacaaatggctagaaaggactgaatagattatatattgccagatgttaatactgtaacatactttttaaataacatatttcttaaatccaaatttctctcaatgttagatttaattccctcaataacaccaatgttttgttttgtttcgttctgggtcataaaactttgttaaggaactcttttggaataaagagcaggatgctgcaaagttatgagt

SEQ ID NO: 151334 - DNA, 1086 bp, Artificial Sequence
  derived and/or modified sequence
atggacattcagatggcaaacaactttaccccgcccagtgccactccgcaggggaatgactgcgatttgtatgcgcaccattctaccgcccggattgtcatgccccttcattattcactcgtattcattatagggcttgttggcaacctgttagccctcgtggtcatcgtgcagaaccggaagaaaatcaacagtacgactctgtactccaccaacctcgtaattagtgatatcctgttcacaaccgccctgcccactcgtattgcttattacgccatgggcttcgattggcgcataggcgacgccttatgccggatcaccgcccttgtcttttatatcaacacctacgcgggggttaactttatgacatgtctctcaattgacaggtttattgctgtggttcaccccctgcgatataataagatcaagcggattgagcatgcgaagggcgtctgcatcttcgtctggatcctcgtctttgcccagacgctgcccctgttgatcaatcccatgagcaaacaggaagccgagcggattacgtgcatggaatacccaaattttgaggagaccaaaagccttccgtggatactcctcggcgcctgtttcatcggctacgtgctaccgctgatcataattctgatttgttacagtcagatctgctgcaagcttttcaggacagctaaacaaaaccctttgacagagaagtccggtgtgaacaagaaagctctgaacaccataatcttaattatcgtggttttcgtgctgtgctttacgccctaccatgtggcaatcattcaacatatgatcaagaaacttagattcagcaacttcttggaatgtagtcagcggcacagcttccaaatttcacttcacttcacagtttgtttgatgaacttcaactgttgcatggatccttttatttacttctttgcttgtaaaggttataagaggaaggtgatgcgaatgctcaaacgacaggtgtcagtttctatcagctccgctgttaaatcggccccggaggagaacagtcgcgaaatgactgagacgcaaatgatgatccattcaaagtcatctaacgggaagtag

SEQ ID NO: 151335 - DNA, 1086 bp, Artificial Sequence
  derived and/or modified sequence
atggacatccagatggccaacaacttcaccccaccttctgccaccccccagggcaatgactgtgacctgtatgcccaccacagcacagcccgcatcgtgatgcccctgcactacagcctggtgttcatcatcggcctggtgggcaacctgctggccctggtggtgattgtgcagaacaggaagaagatcaacagcaccaccctgtacagcaccaacctggtgatcagtgacatcctcttcaccacagccctgcccacccgcatcgcctactatgccatgggctttgactggagaattggagatgccctgtgccgcatcacagccctggtgttctacatcaacacctacgccggcgtgaacttcatgacctgcctgagcattgaccgcttcatcgctgtggtgcaccccctgcgctacaacaagatcaagagaattgaacatgccaagggcgtgtgcatctttgtgtggatcctggtgtttgcccagaccctgcccctgctgatcaaccccatgagcaagcaggaggccgagcgcatcacctgcatggagtaccccaactttgaggagaccaagagcctgccctggatcctgctgggcgcctgcttcatcggctacgtgctgcccctcatcatcatcctgatctgctacagccagatctgctgcaagctgttcagaacagccaagcagaaccccctgacagagaagagcggcgtgaacaagaaggccctgaacaccatcatcctgatcatcgtggtgtttgtgctgtgcttcaccccctaccacgtggccatcatccagcacatgatcaagaagctgcgcttcagcaacttcctggagtgcagccagaggcacagcttccagatcagcctgcacttcaccgtgtgcctgatgaacttcaactgctgcatggaccccttcatctacttctttgcctgcaagggctacaagaggaaggtgatgaggatgctgaagaggcaggtgtctgtgtccatcagcagcgctgtgaagagcgcccctgaggagaacagccgggagatgacagagacccagatgatgatccacagcaagagcagcaatggcaagtag

SEQ ID NO: 151336 - DNA, 1086 bp, Artificial Sequence
  derived and/or modified sequence
atggacatccagatggccaacaacttcaccccccccagcgccacccctcagggaaacgattgcgatctttacgcacaccatagcaccgcaaggatcgttatgccactgcactatagcctggtctttataattgggctagtcggcaatctgttagcactggttgtcatagtacaaaacaggaagaaaatcaacagcacaacactgtatagtaccaatctcgttatttctgatattttgttcactaccgcactgccaactcgcatcgcctattatgctatgggattcgactggcgcataggtgacgccctgtgcagaatcactgccttagtgttttacataaacacctacgcaggcgttaactttatgacatgcttgtccattgaccgctttatcgctgtcgtccacccattacggtacaacaaaatcaaacgcatcgaacacgccaaaggcgtttgcatatttgtgtggattttggtgttcgcacaaactctccctctgctcattaatcctatgtcaaaacaggaggcagagcgcatcacctgcatggagtaccctaattttgaggagaccaaatccctcccatggatccttctgggagcttgtttcatcggttatgtcctccctctgatcattattctgatatgttatagccaaatttgctgtaaactcttccgaactgccaagcagaaccctctgactgaaaagtctggggtgaataaaaaggccctcaacacaatcatccttatcatcgtagtgtttgtgctgtgtttcacaccttatcacgtggcaatcattcaacacatgatcaagaaactgcggtttagtaacttcctggaatgcagtcagagacacagctttcagatctctctccacttcaccgtgtgtttgatgaacttcaactgttgtatggatcctttcatctacttttttgcttgcaagggctacaaaaggaaggtcatgcgaatgttaaagcggcaggtctcagtctctatctcatctgccgtcaaatctgctcctgaggagaactccagagagatgacagaaactcagatgatgatccactcaaagagctcaaatggcaagtag

SEQ ID NO: 151337 - DNA, 1086 bp, Artificial Sequence
  derived and/or modified sequence
atggacattcagatggccaacaacttcacaccaccttcagcaaccccacaaggtaacgactgcgatttgtacgcacatcattccaccgctcgcatcgtcatgccgctccactactctctggtgtttataattgggctggtgggcaacctcctggctttagtcgtgatcgtccagaatagaaaaaaaattaatagcaccacactgtattctacgaacctcgtgatctctgacatcctgttcactaccgcactgcccacaaggatcgcttactacgcaatggggtttgactggcggatcggcgatgccctgtgccgcatcactgcattagtgttctatataaatacttacgcaggagtgaattttatgacatgcttaagtatcgataggtttatcgcggtcgtccaccccctgagatacaataagatcaagagaatcgagcatgcaaagggagtctgtatcttcgtgtggatcctggtgtttgctcagacgctaccattactgatcaaccctatgtccaaacaggaagccgaacgcattacctgcatggagtaccctaactttgaggagactaagagcctaccttggatcttgctgggcgcttgttttataggatatgtgctgccactgattattattttaatctgttatagtcagatctgctgtaagcttttcaggactgccaagcaaaacccacttacagagaagtccggtgtgaacaagaaggcactaaataccatcatcctgatcatagtagtgtttgtgctgtgtttcaccccttatcatgtggctattatccagcacatgataaaaaagttgaggttctccaacttcctagaatgtagccagcgccatagtttccaaatttctttgcatttcactgtctgcctgatgaatttcaactgctgcatggatccctttatctatttttttgcttgtaagggctataagcggaaagtgatgaggatgctcaaacgccaggtcagcgtgtccataagctctgctgtcaaatccgcccctgaggaaaattcaagggaaatgacagaaacgcagatgatgatccacagcaagtcttccaacggtaagtag

SEQ ID NO: 151338 - DNA, 1086 bp, Artificial Sequence
  derived and/or modified sequence
atggacatccagatggccaacaacttcaccccccccagcgccaccccccagggcaacgactgcgacctgtacgcccaccacagcaccgccagaatcgtgatgcccctgcactacagcctggtgttcatcatcggcctggtgggcaacctgctggccctggtggtgatcgtgcagaacagaaagaagatcaacagcaccaccctgtacagcaccaacctggtgatcagcgacatcctgttcaccaccgccctgcccaccagaatcgcctactacgccatgggcttcgactggagaatcggcgacgccctgtgcagaatcaccgccctggtgttctacatcaacacctacgccggcgtgaacttcatgacctgcctgagcatcgacagattcatcgccgtggtgcaccccctgagatacaacaagatcaagagaatcgagcacgccaagggcgtgtgcatcttcgtgtggatcctggtgttcgcccagaccctgcccctgctgatcaaccccatgagcaagcaggaggccgagagaatcacctgcatggagtaccccaacttcgaggagaccaagagcctgccctggatcctgctgggcgcctgcttcatcggctacgtgctgcccctgatcatcatcctgatctgctacagccagatctgctgcaagctgttcagaaccgccaagcagaaccccctgaccgagaagagcggcgtgaacaagaaggccctgaacaccatcatcctgatcatcgtggtgttcgtgctgtgcttcaccccctaccacgtggccatcatccagcacatgatcaagaagctgagattcagcaacttcctggagtgcagccagagacacagcttccagatcagcctgcacttcaccgtgtgcctgatgaacttcaactgctgcatggaccccttcatctacttcttcgcctgcaagggctacaagagaaaggtgatgagaatgctgaagagacaggtgagcgtgagcatcagcagcgccgtgaagagcgcccccgaggagaacagcagagagatgaccgagacccagatgatgatccacagcaagagcagcaacggcaagtag

SEQ ID NO: 151339 - protein, 233 aa, Artificial Sequence
  derived and/or modified sequence
MRLLPLLRTVLWAAFLGSPLRGGSSLRHVVYWNSSNPSLRREGYTVQVNVNDYLDIYCPHYNSSGVGPGAGPGPGGGAEQYVLYMVSRNGYRTCNASQGFKRWECNRPHAPHSPIKFSEKFQRYSAFSLGYEFHAGHEYYYISTPTHNLHWKCLRMKVFVCCASTSHSGEKPVPTLPQFTMGPNVKINVLEDFEGENPQVPKLEKSISGTSPKREHLPLAVGIAFFLMTFLAS

SEQ ID NO: 151340 - protein, 238 aa, Artificial Sequence
  derived and/or modified sequence
MAAAPLLLLLLLVPVPLLPLLAQGPGGALGNRHAVYWNSSNQHLRREGYTVQVNVNDYLDIYCPHYNSSGVGPGAGPGPGGGAEQYVLYMVSRNGYRTCNASQGFKRWECNRPHAPHSPIKFSEKFQRYSAFSLGYEFHAGHEYYYISTPTHNLHWKCLRMKVFVCCASTSHSGEKPVPTLPQFTMGPNVKINVLEDFEGENPQVPKLEKSISGTSPKREHLPLAVGIAFFLMTFLAS

SEQ ID NO: 151341 - protein, 212 aa, Artificial Sequence
  derived and/or modified sequence
MAAAPLLLLLLLVPVPLLPLLAQGPGGALGNRHAVYWNSSNQHLRREGYTVQVNVNDYLDIYCPHYNSSGVGPGAGPGPGGGAEQYVLYMVSRNGYRTCNASQGFKRWECNRPHAPHSPIKFSEKFQRYSAFSLGYEFHAGHEYYYISTPTHNLHWKCLRMKVFVCCASKDFEGENPQVPKLEKSISGTSPKREHLPLAVGIAFFLMTFLAS

SEQ ID NO: 151342 - DNA, 702 bp, Artificial Sequence
  derived and/or modified sequence
atgagactgctgcccctgctgagaaccgtgctgtgggccgccttcctgggcagccccctgagaggcggcagcagcctgagacacgtggtgtactggaacagcagcaaccccagcctgagaagagagggctacaccgtgcaggtgaacgtgaacgactacctggacatctactgcccccactacaacagcagcggcgtgggccccggcgccggccccggccccggcggcggcgccgagcagtacgtgctgtacatggtgagcagaaacggctacagaacctgcaacgccagccagggcttcaagagatgggagtgcaacagaccccacgccccccacagccccatcaagttcagcgagaagttccagagatacagcgccttcagcctgggctacgagttccacgccggccacgagtactactacatcagcacccccacccacaacctgcactggaagtgcctgagaatgaaggtgttcgtgtgctgcgccagcaccagccacagcggcgagaagcccgtgcccaccctgccccagttcaccatgggccccaacgtgaagatcaacgtgctggaggacttcgagggcgagaacccccaggtgcccaagctggagaagagcatcagcggcaccagccccaagagagagcacctgcccctggccgtgggcatcgccttcttcctgatgaccttcctggccagctag

SEQ ID NO: 151343 - DNA, 702 bp, Artificial Sequence
  derived and/or modified sequence
atgcgccttcttcccctgctgaggactgtactctgggcagcatttctaggttcaccgctgcgaggaggctcaagcttaaggcacgtggtgtactggaattcgtcgaatccaagtctgcgtagagaggggtataccgtgcaagtgaacgtcaatgactatttggacatctattgcccccattacaacagttctggagttgggccaggagctggtcccggacctggggggggggcagagcaatatgtgctatacatggtaagccgaaacggatacaggacctgcaatgcatcacaagggttcaaaaggtgggaatgcaacagaccccacgcaccacattccccaatcaagttcagcgagaaattccagcgctatagcgccttctccctgggctatgaattccacgctgggcacgagtattactatatttccacaccaacacacaacctccactggaaatgcctacggatgaaggtgttcgtgtgctgcgcctccacatcccatagtggagagaaaccagtccctaccttaccccaattcactatggggcctaatgtgaagatcaatgtgctggaagactttgagggggagaacccccaggtgcctaagttggagaagtcaatatctggtacatctccaaagcgggagcatctcccacttgccgtgggcatcgccttttttttgatgacttttttggcctcttag

SEQ ID NO: 151344 - DNA, 702 bp, Artificial Sequence
  derived and/or modified sequence
atgaggctgctgcccctgctgaggacagtgctgtgggccgccttcctgggcagccccctgcggggcggcagcagcctgcggcacgtggtgtactggaacagcagcaaccccagcctgcggcgggagggctacacagtgcaggtgaatgtgaatgactacctggacatctactgcccccactacaacagcagcggcgtgggccctggggccggccctggccctgggggcggcgctgagcagtatgtgctgtacatggtgtccagaaatggctaccgcacctgcaatgccagccagggcttcaagcgctgggagtgcaaccggccccacgccccccacagccccatcaagttcagcgagaagttccagcgctacagcgccttcagcctgggctatgagttccacgccggccacgagtactactacatcagcacccccacccacaacctgcactggaagtgcctgaggatgaaggtgtttgtgtgctgtgccagcaccagccacagcggggagaagcctgtgcccaccctgccccagttcaccatgggccccaacgtgaagatcaacgtgctggaggactttgaaggagagaacccccaggtgcccaagctggagaagagcatcagcggcaccagccccaagcgggagcacctgcccctggccgtgggcatcgccttcttcctgatgaccttcctggccagctag

SEQ ID NO: 151345 - DNA, 702 bp, Artificial Sequence
  derived and/or modified sequence
atgcggctgctgcccctgctgcggaccgtgctgtgggccgccttcctaggctcccctctgagaggaggctcgagccttcggcacgtggtctattggaacagcagtaatccaagtttgcggagggagggctatacagtgcaagtgaacgtgaatgattacttggatatttactgcccccactacaacagctcaggtgtcgggcctggcgctggtcctggcccagggggcggcgccgaacagtatgtactgtatatggtgtctaggaatggttaccgtacctgcaatgctagtcagggcttcaaaagatgggaatgtaatcgtcctcatgcgccccattctcctatcaagttctcagaaaaatttcagaggtattcagcgttcagcctgggctatgagttccatgcagggcacgaatattactatatctccacacccacccacaatctgcattggaagtgtctgaggatgaaggtgttcgtttgttgcgcttctacaagtcattctggcgagaagcctgtccctactttaccacagttcactatgggaccaaacgtgaagattaatgtgctcgaggattttgagggagaaaaccctcaggtacctaaactcgaaaagagcatttccgggaccagcccaaagagagagcacctgcctctggctgtaggaatcgcttttttcctcatgacattcctggccagttag

SEQ ID NO: 151346 - DNA, 702 bp, Artificial Sequence
  derived and/or modified sequence
atgaggctcctgccactgctccgaactgtactatgggccgctttcttaggaagtccactcaggggcggttcgtctcttagacatgttgtgtattggaacagcagcaacccttccttacggcgtgagggatacaccgtgcaggttaacgtcaacgattatcttgatatctattgtccccactacaactctagtggagtgggcccaggcgctggaccgggtccaggagggggagctgagcagtatgttctgtatatggtgtctagaaacgggtaccgaacgtgtaatgcgagccagggattcaaacgttgggagtgcaatcgccctcacgcgcctcactccccgatcaagttctctgagaagtttcagcgttatagtgcctttagtctcggctatgagtttcatgcagggcacgagtactattatatttcaacaccaacccacaacttgcattggaagtgtctccgaatgaaggtcttcgtctgttgtgcttccactagccactctggcgaaaaaccagtccccacattacctcaattcacaatgggtcccaacgtgaagatcaatgtgctggaggactttgaaggcgagaacccacaggtgcccaaactggagaagagtatcagcgggacaagccctaagagggagcacctgccccttgcggtgggaattgcgttcttcctgatgacatttttggccagctag

SEQ ID NO: 151347 - DNA, 1042 bp, Artificial Sequence
  derived and/or modified sequence
actttgtacctttctctcctcgactgtgaagcgggccgggacctgccaggccagaccaaaccggacctcgggggcgatgcggctgctgcccctgctgcggactgtcctctgggccgcgttcctcggctcccctctgcgcgggggctccagcctccgccacgtagtctactggaactccagtaaccccagcctgcggcgagagggctacaccgtgcaggtgaacgtgaacgactatctggatatttactgcccgcactacaacagctcgggggtgggccccggggcgggaccggggcccggaggcggggcagagcagtacgtgctgtacatggtgagccgcaacggctaccgcacctgcaacgccagccagggcttcaagcgctgggagtgcaaccggccgcacgccccgcacagccccatcaagttctcggagaagttccagcgctacagcgccttctctctgggctacgagttccacgccggccacgagtactactacatctccacgcccactcacaacctgcactggaagtgtctgaggatgaaggtgttcgtctgctgcgcctccacatcgcactccggggagaagccggtccccactctcccccagttcaccatgggccccaatgtgaagatcaacgtgctggaagactttgagggagagaaccctcaggtgcccaagcttgagaagagcatcagcgggaccagccccaaacgggaacacctgcccctggccgtgggcatcgccttcttcctcatgacgttcttggcctcctagctctgccccctcccctggggggggagagatggggcggggcttggaaggagcagggagcctttggcctctccaagggaagcctagtgggcctagacccctcctcccatggctagaagtggggcctgcaccatacatctgtgtccgccccctctaccccttccccccacgtagggcactgtagtggaccaagcacggggacagccatgggtcccgggcggccttgtggctctggtaatgtttggtaccaaacttgggggccaaaaa

SEQ ID NO: 151348 - DNA, 717 bp, Artificial Sequence
  derived and/or modified sequence
atggctgcggcaccattgctcctcctgctcctgctcgttccagtacctctgctacctctgctggcacagggtccaggcggagcattgggaaaccggcacgccgtctactggaattcatccaatcagcacctgcgaagagagggttacaccgtgcaggtgaacgtgaacgattacctggacatttattgtccgcactacaattcttcaggcgtggggcctggggcaggtccaggccccggcgggggcgccgaacagtacgtgttatatatggtatcccgcaacggttatcggacttgcaacgctagtcagggattcaagcggtgggagtgtaataggccccatgcgcctcactccccaatcaagttctcggaaaagttccagagatactctgctttctccctcgggtacgagtttcatgcaggccacgaatattattacatcagtacacctacccacaatcttcattggaagtgcctgcgaatgaaggtgtttgtctgctgcgcgagcacaagtcattcaggtgagaagcccgtgccaactttaccccagttcaccatgggtccgaacgtaaaaatcaatgtgcttgaggattttgagggcgaaaatccacaggtgccgaaactcgaaaaatcgatatccggaacttctcccaagagggaacacctgcccctggcggttggcatagctttcttcttaatgacgttcctggctagttag

SEQ ID NO: 151349 - DNA, 639 bp, Artificial Sequence
  derived and/or modified sequence
atggccgctgctcctctgctgctcctgcttttactagtgcccgtgcccctccttccgcttctcgcacaggggcctggcggggctctcgggaacagacacgccgtgtactggaactcctccaatcagcatctcaggcgggagggttatactgtgcaggtgaacgtgaatgattatttggacatctattgccctcattacaatagctcaggcgttggcccaggggcagggcctggccccggcggaggcgctgagcaatacgtcctctatatggtgtctcggaacggatacagaacatgcaacgccagtcagggctttaagcgttgggaatgtaacaggcctcacgccccccactcccctatcaaattttctgagaaattccagagatattcagcatttagtttgggatatgaatttcacgccggccacgagtactattacatttcaacaccaacacacaacctgcattggaaatgcttacgaatgaaagttttcgtgtgttgtgcttccaaagattttgagggagagaatcctcaggttccaaaactggagaagtcgataagtgggacgagccccaagagagagcatctcccactagcagtgggcattgcattcttcctgatgacatttctggcatcttag

SEQ ID NO: 151350 - DNA, 702 bp, Artificial Sequence
  derived and/or modified sequence
atgaggttgctgcccctcctgcgtacggtgctgtgggctgcctttctgggatcgccactgcgtggcgggagcagccttaggcatgtggtctattggaattccagcaacccgtccctgcgcagggagggatacaccgtgcaggttaacgtcaacgactaccttgatatttactgcccgcactataattcaagcggcgttggccccggagccgggcctgggcctggcgggggcgccgagcaatatgtcctgtatatggtctcacgaaacggctatcgaacgtgcaatgcaagtcaaggcttcaagaggtgggagtgtaatcggcctcacgctccccactctcccatcaaattttctgagaaattccaaagatattctgcatttagcctaggttatgagttccacgctggacacgagtattattacatatccactccaactcataacttgcactggaagtgcttgcgcatgaaggtcttcgtttgttgtgcctcaacaagccatagcggggagaagcccgttcctacccttccgcagtttactatgggccctaatgtgaaaatcaacgtactggaggatttcgaaggagagaacccccaggtaccaaaactggagaaatctatctcaggcactagccctaaacgagagcatttacccctggccgtcggaattgccttcttcttaatgactttccttgctagttag

SEQ ID NO: 151351 - DNA, 717 bp, Artificial Sequence
  derived and/or modified sequence
atggctgctgcccccctgctgctgctgctgctgctggtgcctgtgcccctgctgcccctgctggcccagggccctggaggagccctgggcaacagacatgctgtgtactggaacagcagcaaccagcacctgcggcgggagggctacacagtgcaggtgaatgtgaatgactacctggacatctactgcccccactacaacagcagtggagtgggccctggagctggccctggccctgggggcggcgctgagcagtatgtgctgtacatggtgtccagaaatggctaccgcacctgcaatgccagccagggcttcaagcgctgggagtgcaaccggccccacgccccccacagccccatcaagttcagcgagaagttccagcgctacagcgccttcagcctgggctatgagttccacgccggccacgagtactactacatcagcacccccacccacaacctgcactggaagtgcctgaggatgaaggtgtttgtgtgctgtgccagcaccagccacagcggggagaagcctgtgcccaccctgccccagttcaccatgggccccaacgtgaagatcaacgtgctggaggactttgaaggagagaacccccaggtgcccaagctggagaagagcatcagcggcaccagccccaagcgggagcacctgcccctggccgtgggcatcgccttcttcctgatgaccttcctggccagctag

SEQ ID NO: 151352 - DNA, 639 bp, Artificial Sequence
  derived and/or modified sequence
atggctgctgcccccctgctgctgctgctgctgctggtgcctgtgcccctgctgcccctgctggcccagggccctggaggagccctgggcaacagacatgctgtgtactggaacagcagcaaccagcacctgcggcgggagggctacacagtgcaggtgaatgtgaatgactacctggacatctactgcccccactacaacagcagtggagtgggccctggagctggccctggccctgggggcggcgctgagcagtatgtgctgtacatggtgtccagaaatggctaccgcacctgcaatgccagccagggcttcaagcgctgggagtgcaaccggccccacgccccccacagccccatcaagttcagcgagaagttccagcgctacagcgccttcagcctgggctatgagttccacgccggccacgagtactactacatcagcacccccacccacaacctgcactggaagtgcctgaggatgaaggtgtttgtgtgctgtgccagcaaggactttgaaggagagaacccccaggtgcccaagctggagaagagcatcagcggcaccagccccaagcgggagcacctgcccctggccgtgggcatcgccttcttcctgatgaccttcctggccagctag

SEQ ID NO: 151353 - DNA, 717 bp, Artificial Sequence
  derived and/or modified sequence
atggccgccgcccccctgctgctgctgctgctgctggtgcccgtgcctctgctgcctctgttggcacagggacccggaggagccctgggaaacaggcatgcagtctactggaatagctcgaaccagcacctccgccgagagggctatacggtgcaggtgaatgtaaacgactatctggacatctactgcccccattacaacagtagcggcgtgggccccggggcgggcccaggacctggcggtggagccgagcagtacgtgttatatatggttagtcgaaacggctacagaacgtgtaacgcttctcaggggttcaaacggtgggagtgtaatcggccccacgcaccccattcccctatcaagttcagtgaaaagttccagagatattcagcctttagcctaggctatgaattccatgccggtcacgagtattattacatctcaacccccacccacaatctccactggaagtgcctgaggatgaaagtgtttgtctgctgtgcgtcaacgagtcacagtggggagaagcctgtgccaaccctccctcagttcacgatgggccccaacgttaagattaacgtcctagaggacttcgagggggagaatccccaggtccccaagctagagaaatccattagcggaacttcacccaaacgcgagcatctgccgctggcagtgggtatcgcgttctttctgatgacattcctagcgtcctag

SEQ ID NO: 151354 - DNA, 639 bp, Artificial Sequence
  derived and/or modified sequence
atggccgccgcccccctgctgctgctgctgctgctggtgcccgtgccactgctgccactcctggcccagggaccaggcggagccctgggaaacaggcacgctgtttactggaattccagcaaccaacatcttaggcgggagggctacaccgtgcaagtgaacgtgaacgattaccttgatatctactgtcctcactacaactcttctggtgtgggcccaggcgccggaccaggacccggaggcggagcagaacagtacgttctgtacatggtatctcggaatgggtacaggacttgtaatgcctcacagggatttaagaggtgggagtgcaatcggccccacgccccccattcgcccatcaaatttagcgaaaagtttcagcgctacagcgcattcagtctgggatatgagttccacgcaggtcatgagtactattacatctccacgccaacccacaacctccattggaagtgcctgcgaatgaaggtcttcgtttgctgcgcatcgaaagattttgagggcgagaatcctcaggtgcctaaactagaaaaatcaatcagtgggaccagccctaaaagagagcacctgccgttggccgtgggcatagcattcttcttaatgacttttctggcctcatag

SEQ ID NO: 151355 - DNA, 702 bp, Artificial Sequence
  derived and/or modified sequence
atgcggctgctgcccctgctgcggaccgtgctgtgggccgccttcctgggctctcctttgcggggaggttccagcctgcgtcacgttgtgtactggaacagcagtaacccatccctcaggagagagggttataccgtacaggttaatgttaatgactacttagatatctattgcccgcattataacagcagcggagtggggcccggagcgggcccaggccccggaggtggcgccgaacagtacgtgttgtacatggtgtcccgcaacggctaccgcacttgtaatgccagccaggggtttaaaagatgggagtgtaataggcctcatgcacctcattctcctatcaaattttccgaaaagttccagaggtactccgccttttccttgggatacgaatttcacgctgggcatgaatattactatataagcactcccacacataatttacactggaagtgcttacggatgaaagtattcgtgtgctgtgcctcaacctcacactccggcgaaaaaccagtacccaccctgccccagtttacaatggggcctaacgttaaaattaacgtgctcgaggacttcgagggtgagaacccacaggtccctaagctagagaaaagcatttctggcaccagtccaaagcgggaacacctgcctctcgctgtaggaatcgcctttttcttgatgacttttcttgcctcctag

SEQ ID NO: 151356 - DNA, 717 bp, Artificial Sequence
  derived and/or modified sequence
atggctgccgcacccttacttctgctgctgctcctcgttccagtgccattactgccccttctcgctcagggccctggaggagcgctgggcaaccgtcacgcagtgtactggaattcaagtaaccagcacctgcggagagaaggctacaccgtgcaagttaatgttaacgactatttagatatctactgtccccactataactcatcgggcgtgggcccaggtgctgggccaggacccggaggtggcgctgagcaatatgttttgtatatggtgagcagaaacgggtacagaacttgcaacgctagtcaaggatttaagaggtgggaatgtaacaggccacatgccccacattctccaattaaatttagcgaaaaatttcagaggtattcagccttctcgctggggtatgagttccatgcgggtcatgaatattattatattagtacaccgacccataatctgcattggaaatgtctccgcatgaaggtgtttgtttgctgcgccagcacatcccatagtggagagaagcccgtcccaaccctaccacagtttacgatgggacccaacgtgaagataaatgtgctggaggacttcgaaggggagaacccacaagtcccaaagctggagaagtcaatctcggggaccagccctaaaagggaacatttacctcttgctgtggggattgcttttttcctgatgacattcctcgctagttag

SEQ ID NO: 151357 - DNA, 639 bp, Artificial Sequence
  derived and/or modified sequence
atggcggcagctcctcttctgctcctcctcttgctcgtccctgtgcctctcctgccactgttggctcaggggccagggggtgctttgggaaaccgccatgcagtttattggaacagtagtaaccagcacctcaggagggagggatatacggtacaagtgaacgtgaatgactacctggatatttactgcccccactacaactccagtggagtcgggccaggggcagggccaggtcccggtggaggcgcagagcaatatgtcctttacatggtgtccaggaacggctaccgcacatgcaatgcgagtcagggatttaaacgctgggagtgcaacagaccacatgcaccccatagccctataaagttctcggaaaagttccaacgctattccgcattctcgctgggttatgagttccatgccggtcatgaatactattacatttctacacctacccacaacctgcactggaagtgcctgcgaatgaaagttttcgtctgttgcgcctccaaagacttcgagggggagaacccacaggtccccaaactagagaaaagcatttcaggaacctcccccaagcgcgaacacctgcccctagccgtggggatagccttcttccttatgaccttcctagcatcctag

SEQ ID NO: 151358 - DNA, 702 bp, Artificial Sequence
  derived and/or modified sequence
atgcggctcttacctttacttcgcaccgtgttgtgggccgcattcctgggctcgcctctgcgcggaggttcgtctctgcgtcatgtggtatactggaattcttccaatcccagcctgaggcgcgaaggctacacggtccaggtgaatgtcaacgactacctggacatttactgtcctcattataatagcagtggtgtgggacccggtgcaggcccagggcctgggggtggagctgagcaatacgtcctgtacatggtgagccgtaacgggtatcgaacctgcaacgctagtcaagggttcaagcggtgggagtgtaacagaccgcacgctccccactctcctattaagttcagcgagaaatttcagcggtactctgccttttctctgggctatgagttccacgcagggcatgagtactattacatttccaccccaacccacaacctccactggaagtgtttgcgaatgaaggtctttgtgtgctgtgccagcacaagtcattctggagaaaaaccggttccgactttacctcaattcactatgggtcctaatgttaagattaatgtactagaggacttcgaaggggaaaatccacaagtgcccaagctggaaaaatcaatctctggaacgagccccaaacgcgaacaccttcccctggctgtcgggatcgcattttttctcatgacatttctggctagttag

SEQ ID NO: 151359 - DNA, 717 bp, Artificial Sequence
  derived and/or modified sequence
atggccgccgcccccctgctgctgctgctgctgctggtgcccgtgcccctgctgcccctgctggcccagggccccggcggcgccctgggcaacagacacgccgtgtactggaacagcagcaaccagcacctgagaagagagggctacaccgtgcaggtgaacgtgaacgactacctggacatctactgcccccactacaacagcagcggcgtgggccccggcgccggccccggccccggcggcggcgccgagcagtacgtgctgtacatggtgagcagaaacggctacagaacctgcaacgccagccagggcttcaagagatgggagtgcaacagaccccacgccccccacagccccatcaagttcagcgagaagttccagagatacagcgccttcagcctgggctacgagttccacgccggccacgagtactactacatcagcacccccacccacaacctgcactggaagtgcctgagaatgaaggtgttcgtgtgctgcgccagcaccagccacagcggcgagaagcccgtgcccaccctgccccagttcaccatgggccccaacgtgaagatcaacgtgctggaggacttcgagggcgagaacccccaggtgcccaagctggagaagagcatcagcggcaccagccccaagagagagcacctgcccctggccgtgggcatcgccttcttcctgatgaccttcctggccagctag

SEQ ID NO: 151360 - DNA, 639 bp, Artificial Sequence
  derived and/or modified sequence
atggccgccgcccccctgctgctgctgctgctgctggtgcccgtgcccctgctgcccctgctggcccagggccccggcggcgccctgggcaacagacacgccgtgtactggaacagcagcaaccagcacctgagaagagagggctacaccgtgcaggtgaacgtgaacgactacctggacatctactgcccccactacaacagcagcggcgtgggccccggcgccggccccggccccggcggcggcgccgagcagtacgtgctgtacatggtgagcagaaacggctacagaacctgcaacgccagccagggcttcaagagatgggagtgcaacagaccccacgccccccacagccccatcaagttcagcgagaagttccagagatacagcgccttcagcctgggctacgagttccacgccggccacgagtactactacatcagcacccccacccacaacctgcactggaagtgcctgagaatgaaggtgttcgtgtgctgcgccagcaaggacttcgagggcgagaacccccaggtgcccaagctggagaagagcatcagcggcaccagccccaagagagagcacctgcccctggccgtgggcatcgccttcttcctgatgaccttcctggccagctag

SEQ ID NO: 151361 - DNA, 1782 bp, Artificial Sequence
  derived and/or modified sequence
ggagctgggaagcggagaagccgggagcgcggggctcagtcggggggcggcggcggcggcggctccggggatggcggcggctccgctgctgctgctgctgctgctcgtgcccgtgccgctgctgccgctgctggcccaagggcccggaggggcgctgggaaaccggcatgcggtgtactggaacagctccaaccagcacctgcggcgagagggctacaccgtgcaggtgaacgtgaacgactatctggatatttactgcccgcactacaacagctcgggggtgggccccggggcgggaccggggcccggaggcggggcagagcagtacgtgctgtacatggtgagccgcaacggctaccgcacctgcaacgccagccagggcttcaagcgctgggagtgcaaccggccgcacgccccgcacagccccatcaagttctcggagaagttccagcgctacagcgccttctctctgggctacgagttccacgccggccacgagtactactacatctccacgcccactcacaacctgcactggaagtgtctgaggatgaaggtgttcgtctgctgcgcctccacatcgcactccggggagaagccggtccccactctcccccagttcaccatgggccccaatgtgaagatcaacgtgctggaagactttgagggagagaaccctcaggtgcccaagcttgagaagagcatcagcgggaccagccccaaacgggaacacctgcccctggccgtgggcatcgccttcttcctcatgacgttcttggcctcctagctctgccccctcccctggggggggagagatggggcggggcttggaaggagcagggagcctttggcctctccaagggaagcctagtgggcctagacccctcctcccatggctagaagtggggcctgcaccatacatctgtgtccgccccctctaccccttccccccacgtagggcactgtagtggaccaagcacggggacagccatgggtcccgggcggccttgtggctctggtaatgtttggtaccaaacttgggggccaaaaagggcagtgctcaggactccctggcccctggtacctttccctgactcctggtgccctctccctttgtccccccagagagacatatgcccccagagagagcaaatcgaagcgtgggaggcacccccattgctctcctccaggggcagaacatggggaggggactagatgggcaaggggcagcactgcctgctgcttccttcccctgtttacagcaataagcacgtcctcctcccccactcccacttccaggattgtggtttggattgaaaccaagtttacaagtagacacccctgggggggcgggcagtggacaaggatggcaaggggtgggcattggggtgccaggcaggcatgtacagactctatatctctatatataatgtacagacagacagagtcccttccctctttaaccccctgacctttcttgacttccccttcagcttcagaccccttccccaccaggctaggccccccacacctgggggaccccctggcccctcttttgtcttctgtgaagacaggacctatgcaacgcacagacacttttggagaccgtaaaacaacaacgccccctcccttccagccctgagccgggaaccatctcccaggaccttgccctgctcaccctatgtggtcccacctatcctcctgggcctttttcaagtgctttggctgtgactttcatactctgctcttagtctaaaaaaaataaactggagataaaaataa

SEQ ID NO: 151362 - DNA, 1035 bp, Artificial Sequence
  derived and/or modified sequence
agtcggggggcggcggcggcggcggctccggggatggcggcggctccgctgctgctgctgctgctgctcgtgcccgtgccgctgctgccgctgctggcccaagggcccggaggggcgctgggaaaccggcatgcggtgtactggaacagctccaaccagcacctgcggcgagagggctacaccgtgcaggtgaacgtgaacgactatctggatatttactgcccgcactacaacagctcgggggtgggccccggggcgggaccggggcccggaggcggggcagagcagtacgtgctgtacatggtgagccgcaacggctaccgcacctgcaacgccagccagggcttcaagcgctgggagtgcaaccggccgcacgccccgcacagccccatcaagttctcggagaagttccagcgctacagcgccttctctctgggctacgagttccacgccggccacgagtactactacatctccacgcccactcacaacctgcactggaagtgtctgaggatgaaggtgttcgtctgctgcgcctccaaagactttgagggagagaaccctcaggtgcccaagcttgagaagagcatcagcgggaccagccccaaacgggaacacctgcccctggccgtgggcatcgccttcttcctcatgacgttcttggcctcctagctctgccccctcccctggggggggagagatggggcggggcttggaaggagcagggagcctttggcctctccaagggaagcctagtgggcctagacccctcctcccatggctagaagtggggcctgcaccatacatctgtgtccgccccctctaccccttccccccacgtagggcactgtagtggaccaagcacggggacagccatgggtcccgggcggccttgtggctctggtaatgtttggtaccaaacttgggggccaaaaagggcagtgctcaggactccctggcccctggtacctttccctgactcctggtgccctctccctttgtccccccagagagacatatgcccccagagagagc

SEQ ID NO: 151363 - DNA, 1037 bp, Artificial Sequence
  derived and/or modified sequence
actttgtacctttctctcctcgactgtgaagcgggccgggacctgccaggccagaccaaaccggacctcgggggcgatgcggctgctgcccctgctgcggactgtcctctgggccgcgttcctcggctcccctctgcgcgggggctccagcctccgccacgtagtctactggaactccagtaaccccagcctgcggcgagagggctacaccgtgcaggtgaacgtgaacgactatctggatatttactgcccgcactacaacagctcgggggtgggccccggggcgggaccggggcccggaggcggggcagagcagtacgtgctgtacatggtgagccgcaacggctaccgcacctgcaacgccagccagggcttcaagcgctgggagtgcaaccggccgcacgccccgcacagccccatcaagttctcggagaagttccagcgctacagcgccttctctctgggctacgagttccacgccggccacgagtactactacatctccacgcccactcacaacctgcactggaagtgtctgaggatgaaggtgttcgtctgctgcgcctccacatcgcactccggggagaagccggtccccactctcccccagttcaccatgggccccaatgtgaagatcaacgtgctggaagactttgagggagagaaccctcaggtgcccaagcttgagaagagcatcagcgggaccagccccaaacgggaacacctgcccctggccgtgggcatcgccttcttcctcatgacgttcttggcctcctagctctgccccctcccctggggggggagagatggggcggggcttggaaggagcagggagcctttggcctctccaagggaagcctagtgggcctagacccctcctcccatggctagaagtggggcctgcaccatacatctgtgtccgccccctctaccccttccccccacgtagggcactgtagtggaccaagcacggggacagccatgggtcccgggcggccttgtggctctggtaatgtttggtaccaaacttgggggcc

SEQ ID NO: 151364 - protein, 163 aa, Artificial Sequence
  derived and/or modified sequence
MSGARTASTPTPPQTGGGLEPQANGETPQVAVIVRPDDRSQGAIIADRPGLPGPEHSPSESQPSSPSPTPSPSPVLEPGSEPNLAVLSIPGDTMTTIQMSVEESTPISRETGEPYRLSPEPTPLAEPILEVEVTLSKPVPESEFSSSPLQAPTPLASHTVEIH

SEQ ID NO: 151365 - protein, 143 aa, Artificial Sequence
  derived and/or modified sequence
MSGARTASTPTPPQTGGGLEPQANGETPQVAVIVRPDDRSQGAIIADRPGLPGPEHSPSESQPSSPSPTPSPSPVLEPGSEPNLAVLSIPGDTMTTIQMSVEESTPISRETGEPYRLSPEPTPLAEPILEVEVTLSKPVPESE

SEQ ID NO: 151366 - protein, 127 aa, Artificial Sequence
  derived and/or modified sequence
MSGARTASTPTPPQTGGGLEPQANGETPQVAVIVRPDDRSQGAIIADRPGLPGPEHSPSESQPSSPSPTPSPSPVLEPGSEPNLAVLSIPGDTMTTIQMSVEESTPISRETGEPYRLSPEPTPLAEP

SEQ ID NO: 151367 - DNA, 492 bp, Artificial Sequence
  derived and/or modified sequence
atgagcggcgccagaaccgccagcacccccacccccccccagaccggcggcggcctggagccccaggccaacggcgagaccccccaggtggccgtgatcgtgagacccgacgacagaagccagggcgccatcatcgccgacagacccggcctgcccggccccgagcacagccccagcgagagccagcccagcagccccagccccacccccagccccagccccgtgctggagcccggcagcgagcccaacctggccgtgctgagcatccccggcgacaccatgaccaccatccagatgagcgtggaggagagcacccccatcagcagagagaccggcgagccctacagactgagccccgagcccacccccctggccgagcccatcctggaggtggaggtgaccctgagcaagcccgtgcccgagagcgagttcagcagcagccccctgcaggcccccacccccctggccagccacaccgtggagatccactag

SEQ ID NO: 151368 - DNA, 4215 bp, Artificial Sequence
  derived and/or modified sequence
atgagcggcgccagaaccgccagcacccccacccccccccagaccggcggcggcctggagccccaggccaacggcgagaccccccaggtggccgtgatcgtgagacccgacgacagaagccagggcgccatcatcgccgacagacccggcctgcccggccccgagcacagccccagcgagagccagcccagcagccccagccccacccccagccccagccccgtgctggagcccggcagcgagcccaacctggccgtgctgagcatccccggcgacaccatgaccaccatccagatgagcgtggaggagagcacccccatcagcagagagaccggcgagccctacagactgagccccgagcccacccccctggccgagcccatcctggaggtggaggtgaccctgagcaagcccgtgcccgagagcgagttcagcagcagccccctgcaggcccccacccccctggccagccacaccgtggagatccacgagcccaacggcatggtgcccagcgaggacctggagcccgaggtggagagcagccccgagctggcccccccccccgcctgccccagcgagagccccgtgcccatcgcccccaccgcccagcccgaggagctgctgaacggcgcccccagcccccccgccgtggacctgagccccgtgagcgagcccgaggagcaggccaaggaggtgaccgccagcatggccccccccaccatccccagcgccacccccgccaccgcccccagcgccaccagccccgcccaggaggaggagatggaggaggaggaggaggaggaggagggcgaggccggcgaggccggcgaggccgagagcgagaagggcggcgaggagctgctgccccccgagagcacccccatccccgccaacctgagccagaacctggaggccgccgccgccacccaggtggccgtgagcgtgcccaagagaagaagaaagatcaaggagctgaacaagaaggaggccgtgggcgacctgctggacgccttcaaggaggccaaccccgccgtgcccgaggtggagaaccagccccccgccggcagcaaccccggccccgagagcgagggcagcggcgtgccccccagacccgaggaggccgacgagacctgggacagcaaggaggacaagatccacaacgccgagaacatccagcccggcgagcagaagtacgagtacaagagcgaccagtggaagcccctgaacctggaggagaagaagagatacgacagagagttcctgctgggcttccagttcatcttcgccagcatgcagaagcccgagggcctgccccacatcagcgacgtggtgctggacaaggccaacaagacccccctgagacccctggaccccaccagactgcagggcatcaactgcggccccgacttcacccccagcttcgccaacctgggcagaaccaccctgagcaccagaggcccccccagaggcggccccggcggcgagctgcccagaggcccccaggccggcctgggccccagaagaagccagcagggccccagaaaggagcccagaaagatcatcgccaccgtgctgatgaccgaggacatcaagctgaacaaggccgagaaggcctggaagcccagcagcaagagaaccgccgccgacaaggacagaggcgaggaggacgccgacggcagcaagacccaggacctgttcagaagagtgagaagcatcctgaacaagctgaccccccagatgttccagcagctgatgaagcaggtgacccagctggccatcgacaccgaggagagactgaagggcgtgatcgacctgatcttcgagaaggccatcagcgagcccaacttcagcgtggcctacgccaacatgtgcagatgcctgatggccctgaaggtgcccaccaccgagaagcccaccgtgaccgtgaacttcagaaagctgctgctgaacagatgccagaaggagttcgagaaggacaaggacgacgacgaggtgttcgagaagaagcagaaggagatggacgaggccgccaccgccgaggagagaggcagactgaaggaggagctggaggaggccagagacatcgccagaagaagaagcctgggcaacatcaagttcatcggcgagctgttcaagctgaagatgctgaccgaggccatcatgcacgactgcgtggtgaagctgctgaagaaccacgacgaggagagcctggagtgcctgtgcagactgctgaccaccatcggcaaggacctggacttcgagaaggccaagcccagaatggaccagtacttcaaccagatggagaagatcatcaaggagaagaagaccagcagcagaatcagattcatgctgcaggacgtgctggacctgagaggcagcaactgggtgcccagaagaggcgaccagggccccaagaccatcgaccagatccacaaggaggccgagatggaggagcacagagagcacatcaaggtgcagcagctgatggccaagggcagcgacaagagaagaggcggcccccccggcccccccatcagcagaggcctgcccctggtggacgacggcggctggaacaccgtgcccatcagcaagggcagcagacccatcgacaccagcagactgaccaagatcaccaagcccggcagcatcgacagcaacaaccagctgttcgcccccggcggcagactgagctggggcaagggcagcagcggcggcagcggcgccaagcccagcgacgccgccagcgaggccgccagacccgccaccagcaccctgaacagattcagcgccctgcagcaggccgtgcccaccgagagcaccgacaacagaagagtggtgcagagaagcagcctgagcagagagagaggcgagaaggccggcgacagaggcgacagactggagagaagcgagagaggcggcgacagaggcgacagactggacagagccagaacccccgccaccaagagaagcttcagcaaggaggtggaggagagaagcagagagagacccagccagcccgagggcctgagaaaggccgccagcctgaccgaggacagagacagaggcagagacgccgtgaagagagaggccgccctgccccccgtgagccccctgaaggccgccctgagcgaggaggagctggagaagaagagcaaggccatcatcgaggagtacctgcacctgaacgacatgaaggaggccgtgcagtgcgtgcaggagctggccagccccagcctgctgttcatcttcgtgagacacggcgtggagagcaccctggagagaagcgccatcgccagagagcacatgggccagctgctgcaccagctgctgtgcgccggccacctgagcaccgcccagtactaccagggcctgtacgagatcctggagctggccgaggacatggagatcgacatcccccacgtgtggctgtacctggccgagctggtgacccccatcctgcaggagggcggcgtgcccatgggcgagctgttcagagagatcaccaagcccctgagacccctgggcaaggccgccagcctgctgctggagatcctgggcctgctgtgcaagagcatgggccccaagaaggtgggcaccctgtggagagaggccggcctgagctggaaggagttcctgcccgagggccaggacatcggcgccttcgtggccgagcagaaggtggagtacaccctgggcgaggagagcgaggcccccggccagagagccctgcccagcgaggagctgaacagacagctggagaagctgctgaaggagggcagcagcaaccagagagtgttcgactggatcgaggccaacctgagcgagcagcagatcgtgagcaacaccctggtgagagccctgatgaccgccgtgtgctacagcgccatcatcttcgagacccccctgagagtggacgtggccgtgctgaaggccagagccaagctgctgcagaagtacctgtgcgacgagcagaaggagctgcaggccctgtacgccctgcaggccctggtggtgaccctggagcagccccccaacctgctgagaatgttcttcgacgccctgtacgacgaggacgtggtgaaggaggacgccttctacagctgggagagcagcaaggaccccgccgagcagcagggcaagggcgtggccctgaagagcgtgaccgccttcttcaagtggctgagagaggccgaggaggagagcgaccacaactag

SEQ ID NO: 151369 - DNA, 858 bp, Artificial Sequence
  derived and/or modified sequence
atgagcggcgccagaaccgccagcacccccacccccccccagaccggcggcggcctggagccccaggccaacggcgagaccccccaggtggccgtgatcgtgagacccgacgacagaagccagggcgccatcatcgccgacagacccggcctgcccggccccgagcacagccccagcgagagccagcccagcagccccagccccacccccagccccagccccgtgctggagcccggcagcgagcccaacctggccgtgctgagcatccccggcgacaccatgaccaccatccagatgagcgtggaggagagcacccccatcagcagagagaccggcgagccctacagactgagccccgagcccacccccctggccgagcccatcctggaggtggaggtgaccctgagcaagcccgtgcccgagagcgagttcagcagcagccccctgcaggcccccacccccctggccagccacaccgtggagatccacgagcccaacggcatggtgcccagcgaggacctggagcccgaggtggagagcagccccgagctggcccccccccccgcctgccccagcgagagccccgtgcccatcgcccccaccgcccagcccgaggagctgctgaacggcgcccccagcccccccgccgtggacctgagccccgtgagcgagcccgaggagcaggccaaggaggtgaccgccagcatggccccccccaccatccccagcgccacccccgccaccgcccccagcgccaccagccccgcccaggaggaggagatggaggaggaggaggaggaggaggagggcgaggccggcgaggccggcgaggccgagagcgagaagggcggcgagtag

SEQ ID NO: 151370 - DNA, 492 bp, Artificial Sequence
  derived and/or modified sequence
atgtccggagcaaggactgcatccacacccacgccaccccagacaggcggaggccttgaaccacaggctaacggcgagaccccgcaggtggcggtcattgtccgcccagatgaccgcagccagggtgcgattatcgctgaccgacctggactgcctggccccgagcactccccatcagagtcacagccttccagtccatcaccgacgcctagtccgagtcccgtgctggaaccaggcagtgagccgaacctcgcagttcttagtattcctggtgacacaatgaccacaattcaaatgtcagtcgaagaaagtacccccatctcccgtgaaacaggggaaccttatcgcttgagcccagagccaaccccactcgctgaaccaatactcgaagtggaggtgactctcagtaagccagtgccagagtccgaattttcctcttcacctttacaagccccaactcccctcgccagtcacaccgttgagatccactag

SEQ ID NO: 151371 - DNA, 4215 bp, Artificial Sequence
  derived and/or modified sequence
atgtcgggtgccagaaccgcttctactcccactcctcctcagaccggtggagggctggagccccaggcaaacggggagacaccccaggttgctgtaatcgtgcgaccggatgaccgttctcagggcgctatcattgccgacaggcctggactccccggacctgagcactcgccctccgaatcacagccctcctccccgagcccaacaccatcacccagccccgtgctggagccgggatccgaaccgaacctagcagtgctgtccatccctggcgacaccatgactaccatccagatgtctgtagaggagtccacccctatctctagagagacaggcgagccgtacaggctgtcgcccgagccaacacctttggcggaaccaattctggaagtagaagtcacactcagcaaacctgtgcccgagagcgagttctcatcatcccctcttcaggcccccacccccttagcatctcatacagtggagatacacgagccaaatgggatggtgccctcagaggatctcgaaccggaagtcgaatccagccctgagctcgccccaccccctgcctgcccttcagaatcccccgtgcctattgcccctacggcccagcctgaggagctcctgaatggcgcgccctctccaccagctgttgacctgagccccgtcagcgagcccgaagagcaggccaaagaagttaccgccagtatggcccctcccactataccctcagccaccccagcaactgcaccctctgcaactagtccagctcaagaggaagaaatggaggaagaggaggaagaggaagaaggtgaggctggagaagcaggcgaggctgagagcgagaagggaggcgaagagttgctgccaccagagtccacacccattccggctaacctgtcacagaacctagaagcagcagcggccacacaggttgcagtttccgtgccaaagcgtagacgcaaaatcaaggagctcaacaagaaggaggctgtcggcgaccttttagatgcttttaaagaggcgaatcccgctgtgccagaggtcgagaatcaacccccagcgggatctaaccctgggcccgaatccgagggatcaggagtccccccccggcctgaggaggccgatgagacctgggactcaaaagaagacaagatccacaatgccgagaacatccaacctggggagcaaaagtacgaatataaatccgatcagtggaagcctctcaacctcgaagagaagaagcggtacgaccgtgaattcctcctcggtttccaatttatttttgccagtatgcagaagcccgagggcctgcctcatatttcggatgtagtgctggataaggccaacaaaacgccactgcgaccactggatccaactaggctgcaggggataaactgtgggccggattttacacctagcttcgctaacctgggcaggacaactctgtccaccaggggccccccgaggggcggtcctggtggagaattgccaagagggccacaggcaggcttgggaccccggcgcagtcagcagggcccacgtaaggaacccagaaagataattgccacggtgttgatgactgaagacatcaagctgaacaaggccgaaaaagcttggaagccgagctcgaaacgcactgctgccgacaaggatagaggtgaggaggacgcggacggcagcaaaacgcaggacctttttcggcgcgtccgaagcattttgaataaattgacaccccaaatgttccagcagttgatgaagcaggtcacacagctggcaattgacactgaggaacggcttaaaggagttattgacttgatctttgaaaaagccataagcgaacccaatttttctgttgcatacgccaatatgtgtcgatgcctcatggcattaaaagtacccacaaccgagaaacccacagtaaccgtcaatttcagaaaacttctactgaacagatgccagaaggagttcgaaaaagataaggatgatgacgaagtatttgaaaaaaagcagaaggagatggacgaggcggctaccgccgaagagaggggtagactcaaggaggagctggaggaggcgcgggacatcgctaggcggagaagcctcggtaatataaaatttattggtgaactgttcaagttgaagatgcttacggaggcaattatgcatgattgcgttgtcaaattgctgaagaaccacgacgaggaatcactcgagtgcctctgtcgcctcctgaccaccattggaaaggacctggatttcgaaaaggcaaagccacgcatggaccagtattttaaccagatggaaaagataattaaagaaaaaaaaacctcctccaggataagatttatgctgcaggatgtcttggacctgcgaggatcgaattgggtccccaggcggggagatcaagggccaaaaaccattgaccagatccacaaggaagctgagatggaggaacaccgggaacatattaaagtgcagcaacttatggccaaggggtccgacaaacgccgtggggggcccccgggccccccaatctccagagggctgccactcgtggatgacggcgggtggaacaccgtgccaatctcaaaaggcagccgccctatagacacctcccgcctcaccaaaattaccaaacccggcagcattgattctaataatcagctctttgcccccggcggacgattgagttggggtaaaggctcatcggggggctcaggcgcgaaaccgtctgacgccgcatcagaagctgctcgacccgctacttccaccttgaaccgattttcagccctgcagcaggccgtgccaactgaaagtactgataacagaagagtggtgcagcgatcttccctgtcccgggaacgcggcgaaaaggcaggcgaccgaggagatcgtcttgaaagatctgagagaggaggagataggggtgatcgccttgacagggctaggacaccagccaccaagaggagtttcagcaaggaggttgaggagcgctctcgcgaaaggcccagccaacctgaagggctcagaaaagccgcaagtctcaccgaggacagggataggggcagagatgctgtcaaacgtgaggccgcactgcctccagtaagtcccttgaaggcagctctttctgaggaagaacttgaaaagaagagtaaagctattattgaagagtatttgcacctgaatgatatgaaggaagccgtgcaatgcgtccaggagcttgcatcaccttctctcctattcatctttgtgcggcatggagtcgaatctacgcttgaacggagcgccatcgccagggaacacatggggcagctgctacaccagctgctttgtgccgggcacctcagcacagcccaatattatcagggactttacgaaattctcgaactggcagaagacatggagattgacattccccatgtttggctctatctggccgagctcgtgaccccaatcctgcaagagggcggcgtccctatgggcgaactttttcgggaaattaccaaacccctccgccctcttggcaaggccgccagcctgttgctggagatcttggggcttctatgtaagtccatgggaccaaagaaggtgggtacattgtggcgcgaagcaggtctctcttggaaggaattcttacccgaaggccaggatataggggccttcgtggccgagcagaaagtcgagtacacattaggtgaggagtcggaagccccaggacaaagggcactgccatccgaggagctcaataggcagttagaaaagttattaaaggagggatcctctaatcagagagtgttcgactggatagaggctaatctgtccgaacaacaaatcgtctcgaacaccctggtacgggctctgatgactgctgtgtgctattccgctatcatcttcgaaacacctcttcgagtcgacgtggccgtcctcaaggcccgtgccaagctccttcagaagtacctgtgtgacgagcaaaaagaattgcaggccctatacgctttgcaggccctggtcgtgactctggaacagccacctaacttgttgaggatgttttttgatgcactgtatgatgaggacgttgtaaaagaggacgcattttactcatgggaatcgtcaaaggaccctgccgaacagcagggaaagggcgttgcactgaagagcgtgacagcattctttaagtggcttcgtgaagctgaggaagagtcagaccataattag

SEQ ID NO: 151372 - DNA, 858 bp, Artificial Sequence
  derived and/or modified sequence
atgagcggggctagaactgccagcacacccaccccaccccagaccgggggaggtctagagccccaggccaatggtgaaactccgcaagttgctgtgattgtgcggccagacgaccgatctcagggggcgatcatagcggatcggcccggactcccaggcccagaacacagccccagtgaaagtcaaccatccagcccctcgcccactccgtctcctagcccagtccttgaacctggctccgaaccgaatctggcagttctctcaattcccggcgatactatgacaacaatacaaatgtcggtggaagagtccactcctatttctcgagagactggtgaaccttaccgactgtcccccgagccaactccattggcggaaccaatccttgaagtagaagtcactctatccaagcctgtgccagagtctgagtttagtagctctcctcttcaagctcccacgccgttggcctcacacactgtggagatccatgaacccaacgggatggtcccctccgaagatctcgagccggaggtcgagagctcacccgaattagctccccctcctgcatgtcctagtgagagccctgttccaatcgcacccactgcacagcctgaggagttgctgaatggcgctccatccccccctgcagttgatctgtcccccgtctcggaacccgaggaacaggctaaagaggtcaccgctagcatggcgccacccactattccctccgccaccccagccaccgcaccctctgccacttcaccagcacaggaggaagagatggaggaggaagaagaagaagaggaaggagaggccggagaggctggagaggccgagtctgagaagggtggcgagtag

SEQ ID NO: 151373 - DNA, 492 bp, Artificial Sequence
  derived and/or modified sequence
atgtctggggccaggacagccagcacccccaccccaccccagacaggaggcggcctggagccccaggccaacggggagaccccccaggtggccgtgattgtgcggccagatgacaggagccagggcgccatcatcgctgacaggcctggcctgcccggccctgagcacagccccagcgagagccagcccagcagccccagccccacccccagccccagccctgtgctggagcccggcagcgagcccaacctggccgtgctgagcatccctggggacaccatgaccaccatccagatgtctgtggaggagagcacccccatcagccgggagactggagagccctaccgcctgagccctgagcccacccccctggccgagcccatcctggaggtggaggtgaccctgagcaagcctgtgcctgagagcgagttcagcagcagccccctgcaggcccccacccccctggccagccacacagtggagatccactag

SEQ ID NO: 151374 - DNA, 4215 bp, Artificial Sequence
  derived and/or modified sequence
atgtctggggccaggacagccagcacccccaccccaccccagacaggaggcggcctggagccccaggccaacggggagaccccccaggtggccgtgattgtgcggccagatgacaggagccagggcgccatcatcgctgacaggcctggcctgcccggccctgagcacagccccagcgagagccagcccagcagccccagccccacccccagccccagccctgtgctggagcccggcagcgagcccaacctggccgtgctgagcatccctggggacaccatgaccaccatccagatgtctgtggaggagagcacccccatcagccgggagactggagagccctaccgcctgagccctgagcccacccccctggccgagcccatcctggaggtggaggtgaccctgagcaagcctgtgcctgagagcgagttcagcagcagccccctgcaggcccccacccccctggccagccacacagtggagatccacgagcccaacggcatggtgcccagcgaggacctggagcctgaggtggagagcagccctgagctggcccctcctccagcctgccccagcgagagccctgtgcccatcgcccccacagcccagcctgaggagctgctgaatggagcccccagccccccagctgtggacctgagccctgtgtctgagcctgaggagcaggccaaggaggtgacagcctccatggccccacccaccatccccagcgccaccccagccacagcccccagcgccaccagccctgcccaggaggaggagatggaggaggaggaggaggaggaggagggggaggccggggaggccggggaggccgagagcgagaagggcggggaggagctgctgcccccagagagcacccccatcccagccaacctgagccagaacctggaggccgctgctgccacccaggtggccgtgtctgtgcccaagagaagaaggaagatcaaggagctgaacaagaaggaggccgtgggggacctgctggatgccttcaaggaggccaacccagctgtgcctgaggtggagaaccagcccccagctggcagcaaccctggccctgagagcgagggcagcggcgtgccccccaggcctgaggaggctgatgagacctgggacagcaaggaggacaagatccacaatgctgagaacatccagcctggagagcagaagtatgagtacaagagtgaccagtggaagcccctgaacctggaggagaagaagagatatgaccgggagttcctgctgggcttccagttcatctttgcctccatgcagaagccagagggcctgccccacatcagtgatgtggtgctggacaaggccaacaagacccccctgcggcccctggaccccacccggctgcagggcatcaactgtggccctgacttcacccccagctttgccaacctgggccgcaccaccctgagcacccggggccccccccggggcggccctggaggagagctgccccggggcccccaggccggcctgggccccaggaggagccagcagggccccaggaaggagcccaggaagatcatcgccaccgtgctgatgacagaggacatcaagctgaacaaggccgagaaggcctggaagcccagcagcaagaggacagctgctgacaaggacagaggagaagaagatgctgatggcagcaagacccaggacctcttcagaagagtgcgcagcatcctgaacaagctgaccccccagatgttccagcagctgatgaagcaggtgacccagctggccatcgacacagaggagcggctgaagggcgtgattgacctgatctttgagaaggccatcagcgagcccaacttctctgtggcctatgccaacatgtgccgctgcctgatggccctgaaggtgcccaccacagagaagcccaccgtgacagtgaacttcaggaagctgctgctgaaccgctgccagaaggagtttgagaaggacaaggatgatgatgaggtgtttgagaagaagcagaaggagatggatgaggccgccacagctgaggagcggggccgcctgaaggaggagctggaggaggcccgggacatcgcccggcggcgcagcctgggcaacatcaagttcatcggggagctgttcaagctgaagatgctgacagaggccatcatgcatgactgtgtggtgaagctgctgaagaaccatgatgaggagagcctggagtgcctgtgccgcctgctgaccaccatcggcaaggacctggactttgagaaggccaagcccaggatggaccagtacttcaaccagatggagaagatcatcaaggagaagaagaccagcagccgcatccgcttcatgctgcaggatgtgctggacctgcggggcagcaactgggtgccccggcggggggaccagggccccaagaccatcgaccagatccacaaggaggccgagatggaggagcaccgggagcacatcaaggtgcagcagctgatggccaagggcagtgacaagaggcggggcggccccccaggcccccccatcagccggggcctgcccctggtggatgatggcggctggaacacagtgcccatcagcaagggcagccggcccatcgacaccagccggctgaccaagatcaccaagccaggcagcattgacagcaacaaccagctgtttgcccctgggggccgcctgtcctggggcaagggcagcagcggcggcagcggggccaagcccagtgatgctgccagcgaggccgcccggcctgccaccagcaccctgaaccgcttcagcgccctgcagcaggccgtgcccacagagagcacagacaacagaagagtggtgcagaggagcagcctgagccgggagcggggggagaaggccggggacagaggagaccggctggagaggtctgagcggggcggggacagaggagaccggctggaccgggcccggaccccagccaccaagaggagcttcagcaaggaggtggaggagaggagccgggagcggcccagccagcctgagggcctgaggaaggccgccagcctgacagaagatcgggaccggggcagagatgctgtgaagcgggaggccgccctgccccctgtgagccccctgaaggccgccctgtctgaggaggagctggagaagaagagcaaggccatcatcgaggagtacctgcacctgaatgacatgaaggaggccgtgcagtgtgtgcaggagctggccagccccagcctgctcttcatctttgtgagacatggagtggagagcaccctggagaggtctgccatcgcccgggagcacatgggccagctgctgcaccagctgctgtgtgccggccacctgagcacagcccagtactaccagggcctgtatgagatcctggagctggccgaggacatggagattgacatcccccacgtgtggctgtacctggccgagctggtgacccccatcctgcaggagggcggcgtgcccatgggagagctgttccgggagatcaccaagcccctgcggcccctgggcaaggccgccagcctgctgctggagatcctgggcctgctgtgcaagtccatgggccccaagaaggtgggcaccctgtggagggaggccggcctgtcctggaaggagttcctgcctgagggccaggacatcggggcctttgtggccgagcagaaggtggagtacaccctgggggaggagagcgaggcccctggccagagggccctgcccagcgaggagctgaaccggcagctggagaagctgctgaaggagggcagcagcaaccagagggtgtttgactggattgaggccaacctgtctgagcagcagatcgtgagcaacaccctggtgcgggccctgatgacagctgtgtgctacagcgccatcatctttgagacccccctgcgggtggatgtggccgtgctgaaggcccgggccaagctgctgcagaagtacctgtgtgatgagcagaaggagctgcaggccctgtatgccctgcaggccctggtggtgaccctggagcagccccccaacctgctgaggatgttctttgatgccctgtatgatgaagatgtggtgaaggaggatgccttctacagctgggagagcagcaaggaccctgctgagcagcagggcaagggcgtggccctgaagtctgtgacagccttcttcaagtggctgcgggaggccgaggaggagagtgaccacaactag

SEQ ID NO: 151375 - DNA, 858 bp, Artificial Sequence
  derived and/or modified sequence
atgtctggggccaggacagccagcacccccaccccaccccagacaggaggcggcctggagccccaggccaacggggagaccccccaggtggccgtgattgtgcggccagatgacaggagccagggcgccatcatcgctgacaggcctggcctgcccggccctgagcacagccccagcgagagccagcccagcagccccagccccacccccagccccagccctgtgctggagcccggcagcgagcccaacctggccgtgctgagcatccctggggacaccatgaccaccatccagatgtctgtggaggagagcacccccatcagccgggagactggagagccctaccgcctgagccctgagcccacccccctggccgagcccatcctggaggtggaggtgaccctgagcaagcctgtgcctgagagcgagttcagcagcagccccctgcaggcccccacccccctggccagccacacagtggagatccacgagcccaacggcatggtgcccagcgaggacctggagcctgaggtggagagcagccctgagctggcccctcctccagcctgccccagcgagagccctgtgcccatcgcccccacagcccagcctgaggagctgctgaatggagcccccagccccccagctgtggacctgagccctgtgtctgagcctgaggagcaggccaaggaggtgacagcctccatggccccacccaccatccccagcgccaccccagccacagcccccagcgccaccagccctgcccaggaggaggagatggaggaggaggaggaggaggaggagggggaggccggggaggccggggaggccgagagcgagaagggcggggagtag

SEQ ID NO: 151376 - DNA, 492 bp, Artificial Sequence
  derived and/or modified sequence
atgagcggcgcccggaccgccagcacccccacccccccccagaccggaggcggcttggaaccacaggccaatggcgaaactccgcaggtggcggtcattgtccggccggacgatcgctcccagggagccataatcgccgatagacccgggctcccagggcccgagcactccccttcagagagtcaaccgtcctctccatccccaacacctagtcccagtcccgttttggagcctggctctgaacctaacctcgccgtgctctccatcccaggagataccatgaccaccattcaaatgtctgtcgaggaatccacacccatatcacgggagactggggaaccctaccgcctgagcccggagcccacccccctggcggaaccgattctagaggtggaagtaacgctctctaagccggtgccggagtctgagttctcctcatctccactgcaggcaccaaccccactcgcatcccatacagtcgagatacactag

SEQ ID NO: 151377 - DNA, 4215 bp, Artificial Sequence
  derived and/or modified sequence
atgagcggcgcccggaccgccagcacccccacccccccccagaccggcgggggactggaacctcaagccaatggggaaactccccaagtggctgttatagtgaggcccgacgaccgttcccagggcgcaatcatagccgacaggcccggactcccaggccccgaacactctcccagtgagagccagccatcttcccccagccctacgccttccccctctcctgtgctcgagcctgggagtgaaccaaatctcgcagttttgtcaattcctggcgataccatgacaaccatccagatgtctgtcgaagagagcacaccaatctcacgggaaaccggcgaaccctatcgcctttcacccgaacccacaccgctggcggaacccatcctcgaggtggaggtgaccctgtcaaagccagtaccggagagcgaattctctagttcgccactgcaggctcccacccccctggccagccataccgtcgaaattcacgagccaaacggtatggttccctccgaggacttggaaccagaagtagaatcttctcccgagcttgccccccctccggcatgccccagcgaaagccctgtacctatcgcaccaactgcccaacccgaagagttgctcaacggcgcaccatctccacccgcagtagatctctcgcccgtctcagaacccgaagagcaggcaaaggaagtgacagctagtatggcccctcctaccattcctagcgctactcctgcaaccgccccttctgccacttcacctgctcaagaggaggagatggaggaggaagaagaagaagaagagggcgaagccggggaggccggcgaagctgagtctgaaaaaggaggggaagagctgctcccgccagagtccacccccatacctgcgaacctaagccaaaacttagaggctgccgctgcaacacaggtggcagttagtgtccctaagcgacgccgcaagatcaaagaattaaacaagaaggaagccgtgggggatctgctggatgctttcaaggaggccaatccagccgtgccagaggttgagaatcaaccaccagcagggagtaatcccggtcccgaatctgaaggcagtggggttccaccacgccccgaggaggctgatgaaacatgggacagcaaggaagataaaattcacaacgccgaaaacattcaacccggtgagcagaagtacgaatataaaagcgaccaatggaagcctctgaatctggaggaaaagaaacgctacgatagagagtttcttctgggatttcagttcatctttgcctcaatgcaaaagccagaaggcctgcctcacatctccgacgtcgttttagacaaagccaacaagacgccccttagacccctggatcctactcgccttcaagggatcaattgcggccctgacttcactccatccttcgccaacctgggcaggacaacactttctacccgcggccctcccagagggggtcccggtggtgagctgccacgcggaccacaagcgggccttggacccagacgaagccaacaaggtcctagaaaagagccgaggaaaattatcgccaccgtgttgatgactgaggacattaagctgaataaggccgaaaaagcctggaaacctagttcgaaacgcacggcagctgataaagatcgcggagaagaggatgccgacggcagcaagacccaggacctttttagaagggtacggtcaatcctgaataagctaaccccacagatgttccagcagctcatgaagcaggtcacccagttagcaatcgatacagaggagcggctcaaaggggtaatcgacctgatcttcgaaaaagcgatctctgagccgaacttttctgtggcctacgcaaacatgtgtcgctgtctaatggccctgaaagttcctaccactgaaaagcccacagtgacagttaacttcagaaagctgttactaaatcgttgtcagaaggagttcgagaaagataaagatgacgatgaggtttttgaaaaaaaacaaaaggagatggatgaggcagctacagcggaggaaagggggaggctcaaagaggagctggaggaggcacgggacattgctcgaagacgctccctcggcaatataaagtttattggcgagctgtttaaactcaaaatgttgacagaggccatcatgcacgactgcgtggtaaagctgctgaagaaccatgatgaagaatctctggaatgtttgtgtaggctgttaacaacgattggcaaagatttagacttcgagaaggcaaaacctcggatggatcagtactttaatcaaatggaaaaaattattaaggagaagaagacatccagcagaatcagatttatgctccaggatgttctggacctgcgggggagcaactgggtgccccgaaggggcgaccagggcccaaagacaattgatcagatccataaagaagccgaaatggaggaacatcgcgagcacatcaaagtgcagcagctgatggcgaagggcagtgataagaggagaggcgggccacccggacctcccatttcaaggggacttcccttggtcgatgacggcggctggaacacggttccgatcagcaaggggtcacgacccatcgacactagccggttgactaagatcacaaagcctgggagcattgatagtaacaaccaactgttcgcccccggcgggaggttaagctgggggaaaggctctagtggtgggtccggtgcgaagccctctgatgccgcttcggaggccgccaggcccgccacatccacactaaatcggtttagcgcactacaacaggccgtccctacggagtccaccgacaaccgtcgcgtggtgcagcgtagctccttatctagagagcgcggtgagaaagccggggacaggggtgaccggcttgagcggtctgaaagagggggagacagaggcgacagactggatagagctaggacacctgccacaaaaaggagcttttccaaggaggtggaagagagatctcgcgagaggcccagccagcccgagggcttgcgaaaggcggcttccctcaccgaggaccgtgaccgcggcagagacgcggtaaagagagaagctgcactcccacccgtgtcgccactgaaggcggctttgtctgaggaagagcttgaaaagaaatcaaaggccatcatcgaagaatacctgcatctgaatgatatgaaagaggctgttcaatgtgttcaggagctggcttcgccgagcctactttttatcttcgtgcgtcatggagtcgaatccaccctggaacgcagcgccattgctagggagcacatggggcagctactgcatcaactcctgtgcgcgggtcacctgtcaaccgcccaatattatcagggcttatacgagattttggaacttgccgaagatatggaaatagacatacctcatgtgtggctttacttggctgagctggttacgcctattctccaagaaggcggtgtgcctatgggtgagctgttcagggagatcacaaaacccctgagacccctgggaaaagcagcctccctactgcttgagatattggggttgctgtgcaaatcaatgggcccaaaaaaggtcggtaccctctggcgcgaggccggcctgtcctggaaggaatttctgccagagggccaggacatcggcgcattcgtggctgagcagaaggtggaatacacgcttggggaagagagcgaggctcctggccagcgggcgctcccgagtgaagaactgaatcgtcaactggagaagctattgaaagaaggctcttctaatcagcgcgttttcgattggatcgaagcaaatctctccgagcagcagattgtcagtaacacactcgtccgagccttaatgacagcagtttgttacagcgccataattttcgagacccccctgcgcgtggatgtcgccgtcctcaaggcaagagctaagctgcttcaaaagtatctgtgtgacgagcagaaggagcttcaggcgctctatgccctgcaggcactggtcgtgactttagagcagcctcccaacttgctcagaatgttctttgacgcactgtacgatgaggacgtggtgaaagaagatgccttttactcctgggagtctagtaaagacccagcggaacaacagggcaagggggtggcactgaagtctgtgacagcgttttttaagtggttgcgggaagcggaagaggagagtgaccacaactag

SEQ ID NO: 151378 - DNA, 858 bp, Artificial Sequence
  derived and/or modified sequence
atgagcggcgcccggaccgccagcacccccacccccccccagaccgggggcggcttggaaccacaggctaacggtgagactccccaggtggctgtcatcgttcgccccgatgacagatcccaaggcgccatcattgcagacagacccggactgccgggccccgagcacagtcctagcgagtcccagccatcttctccgagccccacccccagtccttcacccgtacttgaaccagggtccgaaccaaacctagctgtcctttccatccccggggatacgatgacaactatacagatgagcgtagaggagagcacacccatcagtagggaaacaggagaaccttatcgtctgagccccgagccgacccccctggccgaaccgatcttagaagttgaggtcactctgtccaagccagttcccgaatccgaattcagctcctcacccttgcaggccccaacacctctggcatctcatactgtggaaatccacgagccaaacggcatggtgccaagtgaggacctcgagcctgaagtggaaagcagtcccgaattggcacccccccccgcttgtccaagtgagtctcctgttccaattgcaccaaccgcccagcccgaggagctcctgaacggcgctccaagtccgccggctgtcgatctttcacccgtaagcgagccggaggaacaggctaaggaggtgacagcctctatggcgcctccaacaatcccttctgccacgccggctaccgccccaagtgcgaccagcccggcacaggaagaggaaatggaagaggaagaagaggaagaggaaggcgaagcgggcgaagcgggcgaggctgaatctgaaaaaggcggcgaatag

SEQ ID NO: 151379 - DNA, 492 bp, Artificial Sequence
  derived and/or modified sequence
atgagcggagctcgcaccgcctcgaccccaacacctccgcagacaggcggagggttggaaccgcaagctaacggagaaacccctcaagttgctgttatagtacggcctgatgacaggtcacagggcgcaatcatcgcagatagaccaggattgcccggacccgagcacagcccatctgaatctcaacctagttcaccatcccccactccgtctccttctccagtactggagcctgggtcagagccgaatctcgcggtcctgtctatcccaggtgatacgatgaccactattcagatgtctgtggaagagtcaacacctatatcccgtgagactggcgagccttacaggctgtcccctgaacctactcccctggccgagcccattctggaagtggaggtcacacttagtaaaccagtgcccgagtccgagttcagctcttcgcctctccaagcccctacaccactggcctcccacacagtagaaatccattag

SEQ ID NO: 151380 - DNA, 4215 bp, Artificial Sequence
  derived and/or modified sequence
atgtccggtgctaggaccgcgagcacaccaacgccaccccagaccggcggtgggttagagccccaggcgaacggagagaccccccaggtggctgttatcgtaaggcccgatgaccgctctcagggcgctataatcgccgatagacccggattacctggtcccgagcacagtccgagtgagtcccagcctagttcccctagccctaccccatctccatcaccggttctggagcctggtagcgaacccaacctggccgtgttgtccatccctggggatacaatgaccaccatccaaatgagtgtggaggagtcaacacctattagccgcgagactggagaaccatatagactttctccagagcccacccctcttgcagagcccatcctggaggtcgaggtgacactctcaaagccagtcccagaatctgagttctccagcagtcctctccaggccccaacacctctcgcttcacacacagtagagattcatgaacccaatggaatggtgccatctgaagatctggagccagaagtcgaatcgtcacccgagctggccccaccacccgcatgcccaagtgaatctccagtgccaattgccccaaccgcacaacccgaggagctcctcaacggcgcaccttctccacctgctgtcgatctttcccccgtgtccgagccagaggaacaagcaaaagaggtgactgcctcaatggcccctccaactattccctcagcaacacctgcaacagcaccttccgctacatccccagcacaagaggaggagatggaagaagaagaggaggaggaggagggggaagcgggtgaagctggggaagcagaaagtgaaaagggaggagaagaattactgcctccggagagcacccctatacccgctaacctgtctcagaacctggaggccgcagcggcaacgcaagttgcggtatctgtacccaaaagacgacggaaaatcaaggaattaaacaagaaggaggctgtaggcgatctgcttgatgcctttaaagaagctaacccagccgttcctgaggtggagaaccagccacccgctgggtcaaaccctggccctgaaagcgaaggctcgggcgtgccaccaagaccagaggaggccgatgagacgtgggacagcaaggaagacaaaattcacaacgccgagaacatccaaccaggagaacagaaatacgaatacaagagcgaccagtggaagcctctcaacctcgaggagaagaagcggtacgacagggaattcctccttggcttccagttcatctttgcaagcatgcaaaagccagagggactcccacacataagcgatgttgtcttggacaaagcaaacaagactcctcttaggcccctggatcccacaagactccaaggtataaattgtggtccagattttacaccgagtttcgctaacctgggaagaacaaccctgagcacccgtggaccaccgagaggcggacctggaggtgaactgcccaggggcccacaggccggtttgggaccacgcagaagccagcaaggacccaggaaggagcccaggaaaatcatcgcaactgtgctgatgacggaggatattaaactgaacaaggctgaaaaggcatggaagccttctagtaaacgaacagcagctgataaggatagaggggaagaggacgcagacggcagcaagacacaggacttatttcgacgcgtgcgcagcattctgaataaactaacaccacaaatgtttcagcagctaatgaagcaggttacccagctggcaatcgacactgaggaaaggcttaagggagtgatagatttgatttttgagaaggctatctcggaaccaaactttagcgtcgcttacgccaacatgtgccgatgcttaatggctttgaaagtgccgacgacggaaaagcctactgttacggtaaacttcaggaaacttctgctcaaccgatgtcaaaaagaattcgaaaaagacaaagacgacgacgaggtgttcgagaaaaaacagaaagaaatggacgaggccgcaaccgccgaagagcgcggaagattgaaagaagagctagaagaggcccgtgatatcgctagacgacggagtctcggtaatatcaagttcataggggagctgttcaagttaaaaatgctcaccgaagcgataatgcatgactgcgtggtaaagctcttgaagaaccatgatgaagagagtctggagtgcctgtgccgtctgctgacaaccatcggtaaagacctcgactttgagaaggccaagccccgtatggatcaatattttaatcaaatggagaagatcattaaagaaaagaagacttcttcccgcatccgattcatgcttcaggacgtgctggaccttcgcggaagtaactgggtgcccagacggggagatcagggcccaaagacaatcgaccagatccataaggaggcagagatggaagagcaccgggagcatatcaaggtgcagcaattgatggctaaggggagtgacaaacgtcggggagggcctccgggtccgcctatttcccggggtttacccctggttgacgacggaggctggaacaccgtcccaatctccaaggggagcagacctattgatacttcgcggctgaccaagattaccaaacctggttcaattgactcgaataaccaacttttcgctcctgggggtcggttaagctggggaaagggctctagtgggggaagcggcgcaaaaccgtccgacgcagcctcagaggccgcacgccctgcaacctccactttgaatcgctttagcgccttacagcaggctgtaccaactgaaagtactgacaatcgcagggttgttcagcgttcctcactgtctcgcgaaagaggtgagaaagccggagacagaggggatcgactggagcgatccgaacgagggggagatagaggtgatcgcctggacagagctaggacacccgctacaaaacggtccttcagtaaggaggttgaagagcggtctcgggagcgtccatcccagcctgaggggctccgcaaagctgcatctctcaccgaggaccgggatcgcggacgagacgcagtgaagcgagaggcagcactaccccctgtttctccactgaaggcggctttgtcagaggaggaactggagaaaaaatcaaaagcaatcatagaagagtatttgcacctgaacgatatgaaggaagctgtgcaatgcgtacaggagttggcttctccaagcttgcttttcattttcgtcaggcacggcgtggagtcgacacttgagagaagcgctattgccagggagcatatgggccagctgctgcatcaactgctctgcgcagggcatttgagcaccgctcagtactatcagggcctttatgagatcttggagctggcggaggacatggagatcgacattcctcatgtctggctataccttgcagaacttgttacccccattcttcaggagggtggggtgccaatgggagaactcttccgtgagattacaaaacccctgaggcctctggggaaggcagcctctcttctattagagatccttggcctcctgtgcaagtcgatggggcctaagaaggtcggtacactctggagggaagctggattatcttggaaggagtttctcccagaggggcaggacatcggtgcttttgtcgccgagcaaaaggttgagtacactttgggtgaagagagtgaggcgccaggtcagagagctcttccaagcgaggaactgaaccggcagctcgagaagctacttaaggagggttcctcgaaccaaagggtttttgactggatagaggctaatctctctgagcagcagattgtctcaaacactttagttagggcattaatgacagctgtttgttacagcgcaatcatctttgaaactccattaagggttgatgtcgcagttctcaaggccagagcaaagctcttgcagaaatacctgtgcgacgagcagaaagaacttcaagcactctatgctctgcaggccctagtagttacgttggaacagcccccaaacctgctgaggatgttctttgacgcactgtacgacgaagatgtagtcaaggaagacgctttctattcctgggagtcaagcaaagaccctgccgaacagcaaggtaaaggtgtcgcccttaaatctgtgacagcattcttcaagtggctgcgcgaagctgaagaggaatccgaccacaattag

SEQ ID NO: 151381 - DNA, 858 bp, Artificial Sequence
  derived and/or modified sequence
atgagtggcgcacggaccgcgtctacccctaccccgccacagactggtggaggtttggaaccgcaagcaaacggcgagacaccacaagtggccgtcatcgtcagacccgacgatagatctcaaggcgcaattatcgccgacaggccaggcctgcccggtcctgagcattctcctagtgagtcacaacccagctctccgagtccaacaccctcgccctcccccgtgttggagccaggcagcgaaccaaacttggccgtgctctctattcctggagataccatgacaactattcagatgagcgtggaagagtctacccccatctcaagggaaacgggagaaccttacagactctcccctgagccaacccccttggccgagccaattctggaggttgaagtcaccctgagtaaacctgttccagaaagcgaattctcgtccagcccgctccaagcaccaaccccgctggccagtcacacagtcgagatccacgaaccaaacggcatggttccaagtgaagatctggaaccagaagtcgagtcttcacctgaactagctccaccacccgcttgtcctagcgagagtcccgtccctattgccccaacagctcagcctgaggagcttctgaacggtgcaccttctccacccgcagtagacctttctcctgtctctgagccagaagagcaggctaaagaggttacagccagcatggctcctcccaccattccgagcgctaccccagcaacagctccatcggctacctcacccgctcaggaggaggagatggaggaggaagaggaggaggaagagggagaagcaggcgaggcgggagaagccgaaagtgagaagggcggagaatag

SEQ ID NO: 151382 - protein, 691 aa, Artificial Sequence
  derived and/or modified sequence
MIRGRNSATSADEQPHIGNYRLLKTIGKGNFAKVKLARHILTGKEVAVKIIDKTQLNSSSLQKLFREVRIMKVLNHPNIVKLFEVIETEKTLYLVMEYASGGEVFDYLVAHGRMKEKEARAKFRQIVSAVQYCHQKFIVHRDLKAENLLLDADMNIKIADFGFSNEFTFGNKLDTFCGSPPYAAPELFQGKKYDGPEVDVWSLGVILYTLVSGSLPFDGQNLKELRERVLRGKYRIPFYMSTDCENLLKKFLILNPSKRGTLEQIMKDRWMNVGHEDDELKPYVEPLPDYKDPRRTELMVSMGYTREEIQDSLVGQRYNEVMATYLLLGYKSSELEGDTITLKPRPSADLTNSSAPSPSHKVQRSVSANPKQRRFSDQAGPAIPTSNSYSKKTQSNNAENKRPEEDRESGRKASSTAKVPASPLPGLERKKTTPTPSTNSVLSTSTNRSRNSPLLERASLGQASIQNGKDSTAPQRVPVASPSAHNISSSGGAPDRTNFPRGVSSRSTFHAGQLRQVRDQQNLPYGVTPASPSGHSQGRRGASGSIFSKFTSKFVRRNLNEPESKDRVETLRPHVVGSGGNDKEKEEFREAKPRSLRFTWSMKTTSSMEPNEMMREIRKVLDANSCQSELHEKYMLLCMHGTPGHEDFVQWEMEVCKLPRLSLNGVRFKRISGTSMAFKNIASKIANELKL

SEQ ID NO: 151383 - protein, 734 aa, Artificial Sequence
  derived and/or modified sequence
MSSARTPLPTLNERDTEQPTLGHLDSKPSSKSNMIRGRNSATSADEQPHIGNYRLLKTIGKGNFAKVKLARHILTGKEVAVKIIDKTQLNSSSLQKLFREVRIMKVLNHPNIVKLFEVIETEKTLYLVMEYASGGEVFDYLVAHGRMKEKEARAKFRQIVSAVQYCHQKFIVHRDLKAENLLLDADMNIKIADFGFSNEFTFGNKLDTFCGSPPYAAPELFQGKKYDGPEVDVWSLGVILYTLVSGSLPFDGQNLKELRERVLRGKYRIPFYMSTDCENLLKKFLILNPSKRGTLEQIMKDRWMNVGHEDDELKPYVEPLPDYKDPRRTELMVSMGYTREEIQDSLVGQRYNEVMATYLLLGYKSSELEGDTITLKPRPSADLTNSSAPSPSHKVQRSVSANPKQRRFSDQAAGPAIPTSNSYSKKTQSNNAENKRPEEDRESGRKASSTAKVPASPLPGLERKKTTPTPSTNSVLSTSTNRSRNSPLLERASLGQASIQNGKDSTAPQRVPVASPSAHNISSSGGAPDRTNFPRGVSSRSTFHAGQLRQVRDQQNLPYGVTPASPSGHSQGRRGASGSIFSKFTSKFVRRNLSFRFARRNLNEPESKDRVETLRPHVVGSGGNDKEKEEFREAKPRSLRFTWSMKTTSSMEPNEMMREIRKVLDANSCQSELHEKYMLLCMHGTPGHEDFVQWEMEVCKLPRLSLNGVRFKRISGTSMAFKNIASKIANELKL

SEQ ID NO: 151384 - protein, 724 aa, Artificial Sequence
  derived and/or modified sequence
MSSARTPLPTLNERDTEQPTLGHLDSKPSSKSNMIRGRNSATSADEQPHIGNYRLLKTIGKGNFAKVKLARHILTGKEVAVKIIDKTQLNSSSLQKLFREVRIMKVLNHPNIVKLFEVIETEKTLYLVMEYASGGEVFDYLVAHGRMKEKEARAKFRQIVSAVQYCHQKFIVHRDLKAENLLLDADMNIKIADFGFSNEFTFGNKLDTFCGSPPYAAPELFQGKKYDGPEVDVWSLGVILYTLVSGSLPFDGQNLKELRERVLRGKYRIPFYMSTDCENLLKKFLILNPSKRGTLEQIMKDRWMNVGHEDDELKPYVEPLPDYKDPRRTELMVSMGYTREEIQDSLVGQRYNEVMATYLLLGYKSSELEGDTITLKPRPSADLTNSSAPSPSHKVQRSVSANPKQRRFSDQAGPAIPTSNSYSKKTQSNNAENKRPEEDRESGRKASSTAKVPASPLPGLERKKTTPTPSTNSVLSTSTNRSRNSPLLERASLGQASIQNGKDSTAPQRVPVASPSAHNISSSGGAPDRTNFPRGVSSRSTFHAGQLRQVRDQQNLPYGVTPASPSGHSQGRRGASGSIFSKFTSKFVRRNLNEPESKDRVETLRPHVVGSGGNDKEKEEFREAKPRSLRFTWSMKTTSSMEPNEMMREIRKVLDANSCQSELHEKYMLLCMHGTPGHEDFVQWEMEVCKLPRLSLNGVRFKRISGTSMAFKNIASKIANELKL

SEQ ID NO: 151385 - DNA, 2205 bp, Artificial Sequence
  derived and/or modified sequence
atgagctctgctaggaccccactgcccacccttaacgagagggacaccgagcagccaactctggggcacctggattccaagcctagctccaagtccaatatgattcgaggccgaaattccgcaacctctgccgacgaacagccccacataggcaactacagactcctcaagaccatcggcaaagggaattttgccaaggttaagctggcgcgccacattcttacaggcaaggaggtggctgtgaaaatcattgacaaaacacagctcaatagcagcagcctgcaaaaactgtttagggaagtaaggatcatgaaagtccttaatcaccctaacatcgtgaaactgtttgaagtgatcgaaactgagaagacactataccttgttatggagtacgcatccggtggcgaggtgttcgattatttagtggcccacggccgcatgaaggagaaggaggcgagagccaaatttcggcaaattgtgagcgcagttcagtattgtcatcagaaattcattgttcatcgcgatttaaaagccgagaacctactccttgacgccgatatgaacattaagattgccgactttgggttcagcaacgaatttacattcggaaacaagttagataccttctgtgggagccccccctacgctgctccggaactttttcaggggaaaaaatatgatgggcctgaggttgacgtgtggagcctaggcgttatcctgtacaccctggtgagtggctcattgccatttgatggccagaacctcaaagaattgcgggagagggtgctacgcggcaaataccgaattccgttctacatgtccactgattgcgagaacttgctcaagaagttcctgattctcaatcccagcaagaggggaaccctcgaacagatcatgaaagaccgctggatgaatgtagggcacgaggacgatgagctcaagccatacgttgagcccctgcccgactataaagacccgcgaagaaccgagctgatggtgtcaatgggatacacacgagaagagatccaagacagccttgtggggcagagatacaatgaggttatggccacctaccttctgcttgggtacaaatcgtcggagctggagggcgacacgatcacacttaaaccccgtccatccgctgatctcacgaattcatcagcgccctcacctagccataaggttcagaggtctgtgtctgctaacccaaagcagagacggtttagcgaccaagccgccgggcccgctattccaacttctaactcatattccaaaaagacgcagagcaacaatgccgagaacaagcggcctgaggaagaccgcgaatctgggcgcaaggccagctcaacagccaaagtgccagccagccccttgcccggtttagagcgaaagaagaccacgcccaccccgagcacgaatagcgtcctgtccaccagtactaatcgctcgcggaacagcccattgctggaacgagcttccctgggacaggcatctatccagaacggaaaagactccaccgccccacagcgagtccccgtggcttccccttccgcccacaacatcagcagctccgggggggctccggaccgcacaaacttccccagaggtgtgtcctctagatccacatttcacgccggccagctgaggcaggtgcgagatcaacagaacctcccttacggggtgacaccagccagccctagcggacactcccaggggaggcggggagccagtggatcgattttctccaaattcacatcgaaatttgttagacggaacctgtcatttcggttcgcgcgccgcaacctaaatgaaccagaatccaaagaccgggtcgaaactttgcgaccccacgtggttgggagcgggggaaatgacaaagagaaagaagagttccgagaggctaagcccagaagtctgagatttacgtggtcaatgaaaacaacatctagcatggagcccaacgagatgatgagagaaatccggaaggtcttggacgcaaatagctgtcagtcagagttgcatgagaagtatatgctgctctgcatgcacggcacccctgggcatgaagatttcgtccaatgggaaatggaggtatgcaaactgcccaggttgtcattgaatggtgtgcggttcaaaaggatctcgggcacgagcatggcgttcaaaaacattgcttcaaaaatcgcaaacgagctgaagctctag

SEQ ID NO: 151386 - DNA, 2175 bp, Artificial Sequence
  derived and/or modified sequence
atgtcctccgcccgcactccactcccaacacttaacgagcgcgatacagagcaaccaacccttgggcatctggatagcaagccttccagtaaatccaacatgataaggggaaggaacagtgctacttctgccgacgagcaacctcatattggtaactacaggctgttaaagaccattggcaagggtaattttgcaaaggtcaagctggcaaggcacatactgaccggcaaagaggtcgcagtaaagatcatcgataaaacacagcttaactcttcatcactccagaagctgtttagggaagtgcggatcatgaaggtgctcaatcaccccaacatagtaaagctctttgaggttattgaaactgagaaaacgttatacctggtgatggagtatgcctctggcggcgaggtgttcgattacctggtggcacatggccgaatgaaggaaaaggaggccagagcaaaatttagacagattgtgtcagcggtgcagtactgtcaccagaaatttatcgtacaccgggatctcaaggccgagaacctgcttctcgatgctgacatgaatattaagattgccgactttggcttctctaacgagtttacattcggcaataaactcgacacattctgcggatcccccccctacgcagcgcccgagctctttcaggggaaaaagtacgacgggccggaagtggacgtgtggagtctaggggtgatcctgtataccttggtttccgggtctctgcctttcgatggccaaaacctcaaagagctgcgggagagggtccttcggggtaagtatcgaattcctttctacatgagcacggactgtgagaatctactcaaaaaatttttgatcctgaacccatccaaaagaggtactctggagcagataatgaaggatcgatggatgaatgtcgggcatgaagatgacgaactgaaaccttacgtggaacccctccccgattataaggacccaaggaggacagagctcatggtatctatgggttacacccgggaggagatccaagattctctcgtaggccagcgatacaatgaggtcatggccacatatctgcttctggggtacaagagcagtgagttagagggtgatacaattactttgaaacctagaccctctgccgatctcaccaactccagcgccccatcccctagtcacaaagtccagagatcagtgagtgctaaccccaagcaacgaaggttctcggatcaggcagggcccgcgatcccaacatctaactcatattccaagaaaactcagtcaaataacgctgaaaataagagacccgaggaagatcgggagtccggccggaaggcaagctccaccgctaaagttcctgcatcacccttgcccggattggagcgcaaaaagacgactcccacaccatctacaaattctgtgctctcaacttctaccaaccgttcccggaattcacccctgctcgagagagcctccttgggccaggcctccattcaaaatggtaaggactcaacagctccacagagagtcccagtcgcttcaccctcggcacacaacatctcaagcagcggtggggcccctgaccggactaacttcccacgcggtgtgagctccaggagcacattccacgccggacaactgcgccaagtgcgggatcaacagaatctcccgtacggagttacaccagctagcccgtcagggcatagtcaggggcgcaggggtgctagtggctcaatattcagtaagtttacgtccaagttcgtgcgacgtaaccttaacgaacctgaaagcaaggatcgcgttgagacgctcagaccccacgtagtcggcagcggcggaaatgacaaagagaaagaggagtttagggaggccaaaccgcgcagcctgagattcacctggagcatgaagacaacgtcttcaatggaacctaatgagatgatgcgggaaattcggaaggtgctcgacgctaatagctgccagtccgagctccacgagaaatatatgctgctctgtatgcatggtactcccggacacgaagactttgtgcagtgggaaatggaagtgtgcaagctgcctcggctttccctgaacggcgttaggttcaaaagaatctccggcacttcaatggcatttaaaaacatcgcgtcaaagatcgctaacgagctgaagctatag

SEQ ID NO: 151387 - DNA, 2205 bp, Artificial Sequence
  derived and/or modified sequence
atgagcagcgcccggacccccctgcccaccctgaatgaaagagacacagagcagcccaccctgggccacctggacagcaagcccagcagcaagagcaacatgatccggggcaggaacagcgccaccagcgcagatgagcagccccacatcggcaactaccgcctgctgaagaccatcggcaaaggaaactttgccaaggtgaagctggcccggcacatcctgaccgggaaggaggtggccgtgaagatcatcgacaagacccagctgaacagcagcagcctgcagaagctgttccgggaggtgcgcatcatgaaggtgctgaaccaccccaacatcgtgaagctgtttgaggtgattgaaacagagaagaccctgtacctggtgatggagtatgccagcggcggggaggtgtttgactacctggtggcccacggccgcatgaaggagaaggaggcccgggccaagttccggcagatcgtgtctgctgtgcagtactgccaccagaagttcatcgtgcaccgggacctgaaggccgagaacctgctgctggatgctgacatgaacatcaagattgctgactttggcttcagcaatgagttcaccttcggcaacaagctggacaccttctgtggcagccccccctatgctgcccctgagctgttccagggcaagaagtatgatggccctgaggtggatgtgtggagcctgggcgtcatcctgtacaccctggtgtctggcagcctgccctttgatggccagaacctgaaggagctgcgggagcgggtgctgcggggcaagtaccgcatccccttctacatgagcacagactgtgagaacctgctgaagaagttcctgatcctgaaccccagcaagaggggcaccctggagcagatcatgaaggaccgctggatgaatgtgggccatgaagatgatgagctgaagccctacgtggagcccctgcctgactacaaggaccccaggagaacagagctgatggtgtccatgggctacacccgggaggagatccaggacagcctggtgggccagcgctacaatgaggtgatggccacctacctgctgctgggctacaagagcagcgagctggagggggacaccatcaccctgaagccccggcccagcgctgacctgaccaacagcagcgcccccagccccagccacaaggtgcagaggtctgtgtctgccaaccccaagcagaggcgcttcagtgaccaggccgccggccctgccatccccaccagcaacagctacagcaagaagacccagagcaacaatgctgagaacaagaggccagaagaagatcgggagagcggcaggaaggccagcagcacagccaaggtgcctgccagccccctgcccggcctggagaggaagaagaccacccccacccccagcaccaacagcgtgctgagcaccagcaccaacagaagcaggaacagccccctgctggagcgggccagcctgggccaggccagcatccagaatggcaaggacagcacagccccccagagggtgcctgtggccagccccagcgcccacaacatcagcagcagcggcggggccccagacaggaccaacttcccccggggcgtgagcagccgcagcaccttccacgccggccagctgcggcaggtgcgggaccagcagaacctgccctatggagtgaccccagccagccccagcggccacagccagggcagaagaggagccagcggcagcatcttcagcaagttcaccagcaagtttgtgagaagaaacctgtccttccgctttgcccggaggaacctgaatgaacctgagagcaaggacagagtggagaccctgcggccccacgtggtgggcagcggcggcaatgacaaggagaaggaggagttccgggaggccaagcccaggagcctgcgcttcacctggagcatgaagaccaccagctccatggagcccaatgagatgatgagggagatcaggaaggtgctggatgccaacagctgccagagcgagctgcacgagaagtacatgctgctgtgcatgcacggcaccccaggccatgaagattttgtgcagtgggagatggaggtgtgcaagctgccccggctgagcctgaatggagtgcgcttcaagaggatcagcggcacctccatggccttcaagaacatcgccagcaagatcgccaatgagctgaagctgtag

SEQ ID NO: 151388 - DNA, 2175 bp, Artificial Sequence
  derived and/or modified sequence
atgagcagcgcccggacccccctgcccaccctgaatgaaagagacacagagcagcccaccctgggccacctggacagcaagcccagcagcaagagcaacatgatccggggcaggaacagcgccaccagcgcagatgagcagccccacatcggcaactaccgcctgctgaagaccatcggcaaaggaaactttgccaaggtgaagctggcccggcacatcctgaccgggaaggaggtggccgtgaagatcatcgacaagacccagctgaacagcagcagcctgcagaagctgttccgggaggtgcgcatcatgaaggtgctgaaccaccccaacatcgtgaagctgtttgaggtgattgaaacagagaagaccctgtacctggtgatggagtatgccagcggcggggaggtgtttgactacctggtggcccacggccgcatgaaggagaaggaggcccgggccaagttccggcagatcgtgtctgctgtgcagtactgccaccagaagttcatcgtgcaccgggacctgaaggccgagaacctgctgctggatgctgacatgaacatcaagattgctgactttggcttcagcaatgagttcaccttcggcaacaagctggacaccttctgtggcagccccccctatgctgcccctgagctgttccagggcaagaagtatgatggccctgaggtggatgtgtggagcctgggcgtcatcctgtacaccctggtgtctggcagcctgccctttgatggccagaacctgaaggagctgcgggagcgggtgctgcggggcaagtaccgcatccccttctacatgagcacagactgtgagaacctgctgaagaagttcctgatcctgaaccccagcaagaggggcaccctggagcagatcatgaaggaccgctggatgaatgtgggccatgaagatgatgagctgaagccctacgtggagcccctgcctgactacaaggaccccaggagaacagagctgatggtgtccatgggctacacccgggaggagatccaggacagcctggtgggccagcgctacaatgaggtgatggccacctacctgctgctgggctacaagagcagcgagctggagggggacaccatcaccctgaagccccggcccagcgctgacctgaccaacagcagcgcccccagccccagccacaaggtgcagaggtctgtgtctgccaaccccaagcagaggcgcttcagtgaccaggccggccctgccatccccaccagcaacagctacagcaagaagacccagagcaacaatgctgagaacaagaggcctgaggaggaccgggagagcggcaggaaggccagcagcacagccaaggtgcctgccagccccctgcccggcctggagaggaagaagaccacccccacccccagcaccaacagcgtgctgagcaccagcaccaacagaagcaggaacagccccctgctggagcgggccagcctgggccaggccagcatccagaatggcaaggacagcacagccccccagagggtgcctgtggccagccccagcgcccacaacatcagcagcagtggaggagccccagacaggaccaacttcccccggggcgtgagcagccgcagcaccttccacgccggccagctgcggcaggtgcgggaccagcagaacctgccctacggcgtgaccccagccagccccagcggccacagccagggccggcggggggccagcggcagcatcttcagcaagttcaccagcaagtttgtgagaagaaacctgaatgaacctgagagcaaggacagagtggagaccctgcggccccacgtggtgggcagcggcggcaatgacaaggagaaggaggagttccgggaggccaagcccaggagcctgcgcttcacctggagcatgaagaccaccagctccatggagcccaatgagatgatgagggagatcaggaaggtgctggatgccaacagctgccagagcgagctgcacgagaagtacatgctgctgtgcatgcacggcaccccaggccatgaagattttgtgcagtgggagatggaggtgtgcaagctgccccggctgagcctgaatggagtgcgcttcaagaggatcagcggcacctccatggccttcaagaacatcgccagcaagatcgccaatgagctgaagctgtag

SEQ ID NO: 151389 - DNA, 4536 bp, Artificial Sequence
  derived and/or modified sequence
aaacagagccgaagcttcgtcttcggaatcgaggaggagagcgcgtccccggggtttaccttcttcggctgtttccggaattcacccgtagtctgtggccgggaggagaaggcgcgccccacctcccgtttctagccgcttcggatgtttccggctgctgccggcgaaaagagccgagggccggcggtggtggcggccatgttgggagcagcaggtccggcggcggctgcctgtgtgccgggcgcggagcagtgccgctgagggcaggggaggagcgaggcaggcggccggctgcggcggcagagagtaggcggagcggcgcggcccggccgaaaggcggcacagcccagccgggggtcgggggggtgcggtccggagccgctcggagccggcgcggcctagcccgagcggcgcatccccgggctggcgtgagcggctgcccggcctccccgcacccccggccggggcccatgcggcgggtgctcctgctgtgagaagccccgcccggccgggctccgcgccttcccttccctcccttcctccaagcttctcggttccctcccccgagataccggcgccatgtccagcgctcggacccccctacccacgctgaacgagagggacacggagcagcccaccttgggacaccttgactccaagcccagcagtaagtccaacatgattcggggccgcaactcagccacctctgctgatgagcagccccacattggaaactaccggctcctcaagaccattggcaagggtaattttgccaaggtgaagttggcccgacacatcctgactgggaaagaggtagctgtgaagatcattgacaagactcaactgaactcctccagcctccagaaactattccgcgaagtaagaataatgaaggttttgaatcatcccaacatagttaaattatttgaagtgattgagactgagaaaacgctctaccttgtcatggagtacgctagtggcggagaggtatttgattacctagtggctcatggcaggatgaaagaaaaagaggctcgagccaaattccgccagatagtgtctgctgtgcagtactgtcaccagaagtttattgtccatagagacttaaaggcagaaaacctgctcttggatgctgatatgaacatcaagattgcagactttggcttcagcaatgaattcacctttgggaacaagctggacaccttctgtggcagtcccccttatgctgccccagaactcttccagggcaaaaaatatgatggacccgaggtggatgtgtggagcctaggagttatcctctatacactggtcagcggatccctgccttttgatggacagaacctcaaggagctgcgggaacgggtactgaggggaaaataccgtattccattctacatgtccacggactgtgaaaacctgcttaagaaatttctcattcttaatcccagcaagagaggcactttagagcaaatcatgaaagatcgatggatgaatgtgggtcacgaagatgatgaactaaagccttacgtggagccactccctgactacaaggacccccggcggacagagctgatggtgtccatgggttatacacgggaagagatccaggactcgctggtgggccagagatacaacgaggtgatggccacctatctgctcctgggctacaagagctccgagctggaaggcgacaccatcaccctgaaaccccggccttcagctgatctgaccaatagcagcgccccatccccatcccacaaggtacagcgcagcgtgtcggccaatcccaagcagcggcgcttcagcgaccaggctggtcctgccattcccacctctaattcttactctaagaagactcagagtaacaacgcagaaaataagcggcctgaggaggaccgggagtcagggcggaaagccagcagcacagccaaggtgcctgccagccccctgcccggtctggagaggaagaagaccaccccaaccccctccacgaacagcgtcctctccaccagcacaaatcgaagcaggaattccccacttttggagcgggccagcctcggccaggcctccatccagaatggcaaagacagcacagccccccagcgtgtccctgttgcctccccatccgcccacaacatcagcagcagtggtggagccccagaccgaactaacttcccccggggtgtgtccagccgaagcaccttccatgctgggcagctccgacaggtgcgggaccagcagaatttgccctacggtgtgaccccagcctctccctctggccacagccagggccggcggggggcctctgggagcatcttcagcaagttcacctccaagtttgtacgcaggaacctgaatgaacctgaaagcaaagaccgagtggagacgctcagacctcacgtggtgggcagtggcggcaacgacaaagaaaaggaagaatttcgggaggccaagccccgctccctccgcttcacgtggagtatgaagaccacgagctccatggagcccaacgagatgatgcgggagatccgcaaggtgctggacgcgaacagctgccagagcgagctgcatgagaagtacatgctgctgtgcatgcacggcacgccgggccacgaggacttcgtgcagtgggagatggaggtgtgcaaactgccgcggctctctctcaacggggttcgatttaagcggatatcgggcacctccatggccttcaaaaacattgcctccaaaatagccaacgagctgaagctttaacaggctgccaggagcgggggcggcgggggcgggccagctggacgggctgccggccgctgcgccgccccacctgggcgagactgcagcgatggattggtgtgtctcccctgctggcacttctcccctccctggcccttctcagttttctcttacatgtttgtggggggtgggagattgttctccagcaccccacattcacccctgcccagagattcccccttctcctctcccctactggaggcaaaggaaggggagggtggatgggggggcagggctccccctcggtactgcggttgcacagagtatttcgcctaaaccaagaaattttttattaccaaaaagaaaaaagaaaaaaaaaatcccagcggccacctttcctccctgccccattgggacagtcgagactggatctgtggggtttcccgggagggtggctcagggctggaacactctcaggcaagagtggtggagctcccgtcaggccctccgccaggcccactgtgggcttctcccctctcctccctccttcccctccaagcaaaccaccagaggtggccttcccctgacctcaggcccctgggctggaggcctgggcggtggggcagggggcgggggtgctgcgcagccctgcagtgggtggggctgggggctgctccggggctgctgaggctggagggccggcacaaggctccgcctccctccacactgtaccctctgcccctcctccccagagctgggcatttccttccacaagctgctgtggggacgtgtgttccctcaaagtctgtgccatcttctcccacccctcccgggtagaaggaggggctgaccccagggctgggagaggggaggggactggagggcagactggcttctcggtccccagggggccgcttgggctgttggtctccagagcagggccactgggcactctgtgatgggggagcctttgtctgaaagcacagccccctcgcccttcctctccccatggcttccccttcattggcattaatctgggcaccagctctctccatagcagtgacttccctcaccactctcatctctcagccttgccttttcttcctgacactgtcgccccctcctctcaggagacactgccgagggccacctggcagaaggctgagttaggcagcagggccgggagcgtctgccctccacagggtgggggacagataggctaagcgactcccagcttgctaccctcagtggccagtgtgggcgtgggcggtttggggcgcttggctggtggtggccactgcatcccttaatttatttctctgctgtttctgttcttgagaaattgggggtgggagtcctacacagaggctgcccctaccctcacctgagttgtacatttttttgtgatgggttttattttttattattttattttattttttttttttttgatttatgatgactccacccctcttcatcacccccgctcccaggccaggctcagcgattaagccgagcccttgcgtcctaggaaggggccttgccaacctcagccctcctgccccacactcctactgcggctcagaccaagggctccccctccctcccttcccccctcctgccctatggaacagcccgggtgctctgagggggctgggagggcatggcttggctcccaaagggggtaggggcccggggcacccaggcaaggtggcccctccccgtctagccccctcctccccaaccctgcacttagtttctcctctggatcaaacacgtaataaagagaatgtttggaatctg

SEQ ID NO: 151390 - DNA, 4566 bp, Artificial Sequence
  derived and/or modified sequence
aaacagagccgaagcttcgtcttcggaatcgaggaggagagcgcgtccccggggtttaccttcttcggctgtttccggaattcacccgtagtctgtggccgggaggagaaggcgcgccccacctcccgtttctagccgcttcggatgtttccggctgctgccggcgaaaagagccgagggccggcggtggtggcggccatgttgggagcagcaggtccggcggcggctgcctgtgtgccgggcgcggagcagtgccgctgagggcaggggaggagcgaggcaggcggccggctgcggcggcagagagtaggcggagcggcgcggcccggccgaaaggcggcacagcccagccgggggtcgggggggtgcggtccggagccgctcggagccggcgcggcctagcccgagcggcgcatccccgggctggcgtgagcggctgcccggcctccccgcacccccggccggggcccatgcggcgggtgctcctgctgtgagaagccccgcccggccgggctccgcgccttcccttccctcccttcctccaagcttctcggttccctcccccgagataccggcgccatgtccagcgctcggacccccctacccacgctgaacgagagggacacggagcagcccaccttgggacaccttgactccaagcccagcagtaagtccaacatgattcggggccgcaactcagccacctctgctgatgagcagccccacattggaaactaccggctcctcaagaccattggcaagggtaattttgccaaggtgaagttggcccgacacatcctgactgggaaagaggtagctgtgaagatcattgacaagactcaactgaactcctccagcctccagaaactattccgcgaagtaagaataatgaaggttttgaatcatcccaacatagttaaattatttgaagtgattgagactgagaaaacgctctaccttgtcatggagtacgctagtggcggagaggtatttgattacctagtggctcatggcaggatgaaagaaaaagaggctcgagccaaattccgccagatagtgtctgctgtgcagtactgtcaccagaagtttattgtccatagagacttaaaggcagaaaacctgctcttggatgctgatatgaacatcaagattgcagactttggcttcagcaatgaattcacctttgggaacaagctggacaccttctgtggcagtcccccttatgctgccccagaactcttccagggcaaaaaatatgatggacccgaggtggatgtgtggagcctaggagttatcctctatacactggtcagcggatccctgccttttgatggacagaacctcaaggagctgcgggaacgggtactgaggggaaaataccgtattccattctacatgtccacggactgtgaaaacctgcttaagaaatttctcattcttaatcccagcaagagaggcactttagagcaaatcatgaaagatcgatggatgaatgtgggtcacgaagatgatgaactaaagccttacgtggagccactccctgactacaaggacccccggcggacagagctgatggtgtccatgggttatacacgggaagagatccaggactcgctggtgggccagagatacaacgaggtgatggccacctatctgctcctgggctacaagagctccgagctggaaggcgacaccatcaccctgaaaccccggccttcagctgatctgaccaatagcagcgccccatccccatcccacaaggtacagcgcagcgtgtcggccaatcccaagcagcggcgcttcagcgaccaggcagctggtcctgccattcccacctctaattcttactctaagaagactcagagtaacaacgcagaaaataagcggcctgaggaggaccgggagtcagggcggaaagccagcagcacagccaaggtgcctgccagccccctgcccggtctggagaggaagaagaccaccccaaccccctccacgaacagcgtcctctccaccagcacaaatcgaagcaggaattccccacttttggagcgggccagcctcggccaggcctccatccagaatggcaaagacagcacagccccccagcgtgtccctgttgcctccccatccgcccacaacatcagcagcagtggtggagccccagaccgaactaacttcccccggggtgtgtccagccgaagcaccttccatgctgggcagctccgacaggtgcgggaccagcagaatttgccctacggtgtgaccccagcctctccctctggccacagccagggccggcggggggcctctgggagcatcttcagcaagttcacctccaagtttgtacgcagaaatctgtctttcaggtttgccagaaggaacctgaatgaacctgaaagcaaagaccgagtggagacgctcagacctcacgtggtgggcagtggcggcaacgacaaagaaaaggaagaatttcgggaggccaagccccgctccctccgcttcacgtggagtatgaagaccacgagctccatggagcccaacgagatgatgcgggagatccgcaaggtgctggacgcgaacagctgccagagcgagctgcatgagaagtacatgctgctgtgcatgcacggcacgccgggccacgaggacttcgtgcagtgggagatggaggtgtgcaaactgccgcggctctctctcaacggggttcgatttaagcggatatcgggcacctccatggccttcaaaaacattgcctccaaaatagccaacgagctgaagctttaacaggctgccaggagcgggggcggcgggggcgggccagctggacgggctgccggccgctgcgccgccccacctgggcgagactgcagcgatggattggtgtgtctcccctgctggcacttctcccctccctggcccttctcagttttctcttacatgtttgtggggggtgggagattgttctccagcaccccacattcacccctgcccagagattcccccttctcctctcccctactggaggcaaaggaaggggagggtggatgggggggcagggctccccctcggtactgcggttgcacagagtatttcgcctaaaccaagaaattttttattaccaaaaagaaaaaagaaaaaaaaaatcccagcggccacctttcctccctgccccattgggacagtcgagactggatctgtggggtttcccgggagggtggctcagggctggaacactctcaggcaagagtggtggagctcccgtcaggccctccgccaggcccactgtgggcttctcccctctcctccctccttcccctccaagcaaaccaccagaggtggccttcccctgacctcaggcccctgggctggaggcctgggcggtggggcagggggcgggggtgctgcgcagccctgcagtgggtggggctgggggctgctccggggctgctgaggctggagggccggcacaaggctccgcctccctccacactgtaccctctgcccctcctccccagagctgggcatttccttccacaagctgctgtggggacgtgtgttccctcaaagtctgtgccatcttctcccacccctcccgggtagaaggaggggctgaccccagggctgggagaggggaggggactggagggcagactggcttctcggtccccagggggccgcttgggctgttggtctccagagcagggccactgggcactctgtgatgggggagcctttgtctgaaagcacagccccctcgcccttcctctccccatggcttccccttcattggcattaatctgggcaccagctctctccatagcagtgacttccctcaccactctcatctctcagccttgccttttcttcctgacactgtcgccccctcctctcaggagacactgccgagggccacctggcagaaggctgagttaggcagcagggccgggagcgtctgccctccacagggtgggggacagataggctaagcgactcccagcttgctaccctcagtggccagtgtgggcgtgggcggtttggggcgcttggctggtggtggccactgcatcccttaatttatttctctgctgtttctgttcttgagaaattgggggtgggagtcctacacagaggctgcccctaccctcacctgagttgtacatttttttgtgatgggttttattttttattattttattttattttttttttttttgatttatgatgactccacccctcttcatcacccccgctcccaggccaggctcagcgattaagccgagcccttgcgtcctaggaaggggccttgccaacctcagccctcctgccccacactcctactgcggctcagaccaagggctccccctccctcccttcccccctcctgccctatggaacagcccgggtgctctgagggggctgggagggcatggcttggctcccaaagggggtaggggcccggggcacccaggcaaggtggcccctccccgtctagccccctcctccccaaccctgcacttagtttctcctctggatcaaacacgtaataaagagaatgtttggaatctg

SEQ ID NO: 151391 - DNA, 2924 bp, Artificial Sequence
  derived and/or modified sequence
gaattcacccgtagtctgtggccgggaggagaaggcgcgccccacctcccgtttctagccgcttcggatgtttccggctgctgccggcgaaaagagccgagggccggcggtggtggcggccatgttgggagcagcaggtccggcggcggctgcctgtgtgccgggcgcggagcagtgccgctgagggcaggggaggagcgaggcaggcggccggctgcggcggcagagagtaggcggagcggcgcggcccggccgaaaggcggcacagcccagccgggggtcgggggggtgcggtccggagccgctcggagccggcgcggcctagcccgagcggcgcatccccgggctggcgtgagcggctgcccggcctccccgcacccccggccggggcccatgcggcgggtgctcctgctgtgagaagccccgcccggccgggctccgcgccttcccttccctcccttcctccaagcttctcggttccctcccccgagataccggcgccatgtccagcgctcggacccccctacccacgctgaacgagagggacacggagcagcccaccttgggacaccttgactccaagcccagcagtaagtccaacatgattcggggccgcaactcagccacctctgctgatgagcagccccacattggaaactaccggctcctcaagaccattggcaagggtaattttgccaaggtgaagttggcccgacacatcctgactgggaaagaggtagctgtgaagatcattgacaagactcaactgaactcctccagcctccagaaactattccgcgaagtaagaataatgaaggttttgaatcatcccaacatagttaaattatttgaagtgattgagactgagaaaacgctctaccttgtcatggagtacgctagtggcggagaggtatttgattacctagtggctcatggcaggatgaaagaaaaagaggctcgagccaaattccgccagatagtgtctgctgtgcagtactgtcaccagaagtttattgtccatagagacttaaaggcagaaaacctgctcttggatgctgatatgaacatcaagattgcagactttggcttcagcaatgaattcacctttgggaacaagctggacaccttctgtggcagtcccccttatgctgccccagaactcttccagggcaaaaaatatgatggacccgaggtggatgtgtggagcctaggagttatcctctatacactggtcagcggatccctgccttttgatggacagaacctcaaggagctgcgggaacgggtactgaggggaaaataccgtattccattctacatgtccacggactgtgaaaacctgcttaagaaatttctcattcttaatcccagcaagagaggcactttagagcaaatcatgaaagatcgatggatgaatgtgggtcacgaagatgatgaactaaagccttacgtggagccactccctgactacaaggacccccggcggacagagctgatggtgtccatgggttatacacgggaagagatccaggactcgctggtgggccagagatacaacgaggtgatggccacctatctgctcctgggctacaagagctccgagctggaaggcgacaccatcaccctgaaaccccggccttcagctgatctgaccaatagcagcgccccatccccatcccacaaggtacagcgcagcgtgtcggccaatcccaagcagcggcgcttcagcgaccaggctggtcctgccattcccacctctaattcttactctaagaagactcagagtaacaacgcagaaaataagcggcctgaggaggaccgggagtcagggcggaaagccagcagcacagccaaggtgcctgccagccccctgcccggtctggagaggaagaagaccaccccaaccccctccacgaacagcgtcctctccaccagcacaaatcgaagcaggaattccccacttttggagcgggccagcctcggccaggcctccatccagaatggcaaagacagcacagccccccagcgtgtccctgttgcctccccatccgcccacaacatcagcagcagtggtggagccccagaccgaactaacttcccccggggtgtgtccagccgaagcaccttccatgctgggcagctccgacaggtgcgggaccagcagaatttgccctacggtgtgaccccagcctctccctctggccacagccagggccggcggggggcctctgggagcatcttcagcaagttcacctccaagtttgtacgcaggaacctgaatgaacctgaaagcaaagaccgagtggagacgctcagacctcacgtggtgggcagtggcggcaacgacaaagaaaaggaagaatttcgggaggccaagccccgctccctccgcttcacgtggagtatgaagaccacgagctccatggagcccaacgagatgatgcgggagatccgcaaggtgctggacgcgaacagctgccagagcgagctgcatgagaagtacatgctgctgtgcatgcacggcacgccgggccacgaggacttcgtgcagtgggagatggaggtgtgcaaactgccgcggctctctctcaacggggttcgatttaagcggatatcgggcacctccatggccttcaaaaacattgcctccaaaatagccaacgagctgaagctttaacaggctgccaggagcgggggcggcgggggcgggccagctggacgggctgccggccgctgcgccgccccacctgggcgagactgcagcgatggattggtgtgtctcccctgctggcacttctcccctccctggcccttctcagttttctcttacatgtttgtggggggtgggagattgttctccagcaccccacattcacccctgcccagagattcccccttctcctctcccctactggaggcaaagg

SEQ ID NO: 151392 - DNA, 2205 bp, Artificial Sequence
  derived and/or modified sequence
atgagcagcgcccggacccccctgcccaccctgaacgagcgggacacagagcagcccacactaggtcatctcgacagcaagccgtcctctaagagcaatatgatcagaggacgcaacagcgcaactagcgctgatgaacagccccatatcggaaattaccgcttgctgaagaccatcggaaaaggtaacttcgcaaaggttaagctagcaaggcatatcctgacgggaaaggaggtggctgtgaaaatcattgataagactcagcttaattccagtagccttcagaaattgttccgtgaggtgcgaatcatgaaagttctgaaccacccgaacatcgtgaaactgtttgaggtgattgagacggagaagacgctgtacctcgtcatggagtacgccagcggcggggaagtgtttgactacttagttgcgcacggtcgtatgaaggagaaggaggccagagcgaagtttcgacagatcgtgtccgcggtacagtattgtcaccaaaagtttatagtgcaccgggacctgaaagcagagaatctcctgctggatgccgacatgaacatcaaaattgccgatttcggttttagtaacgaattcacttttggaaacaagctggacacattctgcggcagccctccttacgctgcgcctgaactcttccagggcaaaaaatatgacggcccagaggtagatgtttggtcactaggcgtcatcctctacacactggtttctggctccctgccctttgacggacaaaacctcaaggagctgagagaacgtgttctcagggggaaatatagaatccctttctacatgagtacggattgcgagaacctcctgaagaagttcctgatactgaacccgagcaagcgtggcacacttgagcagataatgaaggatagatggatgaacgtgggacatgaggatgacgagctaaagccatacgtcgaaccactgcccgactataaggatcctcgaaggactgaactaatggtgtctatggggtacacccgcgaagagatccaagatagcttagtcggtcagcgttataacgaggtgatggcgacgtatttactgctgggctacaaatctagtgaactggagggggacacgattaccctgaaacctagacctagcgccgatctcaccaatagtagcgccccgtccccctcccataaagtccagagaagtgtctcagccaacccaaagcagaggcgattctccgaccaggccgctgggccagctatccctactagtaacagttacagtaaaaaaacccaatctaacaacgcggagaataaacgacctgaagaggaccgtgaatcaggccggaaagccagttccactgcaaaagtgccagcctctccattgcctggactggagcgaaagaagactacgcctaccccctctacaaactcagtactatctacaagcaccaatcggagcaggaactctccactgctggagagggcgtctcttggccaggcttccattcagaatgggaaggacagcaccgctccccagagggtgcccgtggctagtcctagcgcacacaacatttcaagcagcggaggcgcccccgatcgaacaaatttccctagaggggtgagcagcagatcgacgttccatgccgggcagctgagacaggtgagggatcagcagaacttaccatatggggtgaccccagctagtccttctggacacagtcaaggaaggaggggtgcctctggctccatattttctaaattcacgagtaaattcgttaggcgaaacttgagtttccgttttgctagacgcaatttgaatgagcccgaatcaaaggacagggttgaaacattgaggccccacgttgttggttctggcgggaatgataaagagaaggaggaatttcgggaagctaaaccaagatcgttacggttcacctggtcaatgaagactacaagcagtatggagccaaatgaaatgatgagagagatacggaaagtgctggacgccaatagctgtcagagcgagctccatgaaaaatacatgcttctctgcatgcacggtacgcccggtcacgaagacttcgtacagtgggagatggaggtttgtaagttaccccgccttagtcttaacggggtgaggttcaagcggatcagtggaacctcaatggccttcaaaaacatcgcaagcaagatcgccaacgagctgaagctgtag

SEQ ID NO: 151393 - DNA, 2175 bp, Artificial Sequence
  derived and/or modified sequence
atgagcagcgcccggacccccctgcccaccctgaacgagcgggacaccgaacagccgacactgggccatttagattccaagccgagttctaaatcgaatatgatacgtggccgtaattctgccacaagtgctgacgaacaacctcacatcggcaactacagattactgaagaccataggaaaaggcaactttgcaaaggttaagctcgcgaggcacatcctgacgggcaaggaggtggccgttaaaatcatagacaaaacccagctcaatagcagctcactccagaaattatttcgcgaagtcaggattatgaaagtattaaatcacccaaatattgtgaagctctttgaggtaatcgagactgagaaaacactgtacttggtcatggagtacgcctctgggggtgaagtatttgattaccttgtggcacacgggcgcatgaaggagaaggaagctcgtgccaagttcagacagattgtatccgccgtacagtattgccaccagaaattcatcgtccaccgggatctgaaggccgagaatctccttctagacgccgacatgaatataaaaatcgccgacttcggcttttcaaatgaattcacattcggcaacaagctggatacattctgtggatccccgccctatgccgcccccgaactgtttcaggggaaaaaatacgacggccccgaagtggatgtgtggagtctcggggtcatcctgtatactctggtcagcggatcattaccgttcgacggccaaaacctcaaagaacttagagagagggtcctccgggggaagtacagaatcccattttacatgtccactgattgtgaaaacctgctcaagaagtttctgatcttaaatccaagtaaaagaggaaccctggaacagatcatgaaagataggtggatgaatgtcgggcacgaagatgatgagctcaagccctacgtggaaccactacctgattataaggatccacgccggacagaattaatggtaagtatgggatacactcgagaggagatccaagacagtttggtgggacagcggtacaacgaagtcatggcaacatatctcctcctgggctataagagttccgagctagagggcgacaccataacattgaaacctcggccaagcgcagatctcacgaacagttcagcaccatcaccgtcccacaaagttcagagaagcgtctctgcaaacccaaaacagcggaggtttagcgatcaggccggcccagcaataccaaccagtaactcctatagcaagaaaacccagtctaataatgccgaaaacaaaagacccgaggaagaccgagagtccggcaggaaagcctccagcacagcaaaggtgccagcttctccgctgccggggctcgaaagaaagaagacaacccctactccctctactaattccgtgctttccaccagcacaaaccgttctaggaactcaccactgctggagcgggcttccctggggcaggccagtatccaaaacgggaaagactctaccgcaccccagcgggtccctgtggcttctccctctgctcataatatttcctcaagcgggggggcgccagacaggaccaacttccctcgcggcgtttccagccggagtacgttccacgccggacaattgcgccaagttagggaccagcagaatctcccctacggggtcaccccggcctccccctccggtcatagtcagggccgccggggtgccagcgggtcaatctttagtaaattcacctctaaattcgtgcgcaggaaccttaacgagcctgagagcaaggaccgagtagagactctgaggcctcatgtagtgggatccggcggcaatgacaaggagaaagaggagtttagagaagccaagcccagaagcctacgtttcacttggagcatgaagactacatcttccatggagccgaacgaaatgatgagagagatcagaaaagtcttggatgcaaactcatgccagtcagaactgcatgagaaatacatgctcctatgcatgcatgggacacctgggcacgaggactttgttcagtgggaaatggaggtttgtaagctccctaggctttccttgaatggggtccgcttcaaacgaatttctggaaccagtatggccttcaagaatatcgcttctaaaatcgctaacgagttgaagttatag

SEQ ID NO: 151394 - DNA, 2205 bp, Artificial Sequence
  derived and/or modified sequence
atgtctagtgccagaacacctctgcctacactgaacgaaagagataccgaacaaccgaccctcggacacctggatagcaaaccctcttctaagtccaatatgatccgagggagaaactctgccacgtccgcagatgaacaacctcatattggtaactaccgactactgaagaccatagggaaagggaacttcgccaaggttaagctcgctcgccacatcctcacagggaaggaagtggcggtcaagatcattgacaaaacccagctgaattcttctagcctccagaagctgttccgtgaagtgcgcatcatgaaggtgttgaaccaccctaacattgtgaagctattcgaagtcattgaaacagagaagacattgtatctggtgatggaatacgcatctggaggagaagtttttgactacctggtagctcacggtagaatgaaagagaaggaggccagggcaaaattccgccagatcgtgtccgccgtacagtattgtcaccagaaattcatagtgcacagagatctgaaagccgagaatcttcttctggatgctgacatgaatataaaaatagcagactttggtttctctaatgagttcaccttcggcaataagttagacacattctgcggaagccccccatacgccgcaccagaactgttccagggaaagaaatatgatggacccgaggttgatgtttggagtcttggcgtcatcctgtatacactcgtctcaggctctctgccttttgacggacagaatctgaaggaactcagagaaagggtgcttcgagggaagtaccgcattcctttctacatgagtacagactgtgagaacctcctcaaaaagtttctgatcctgaacccaagtaagcgcggaacactggagcagatcatgaaggataggtggatgaatgtgggacatgaagatgacgaactgaaaccctatgtcgaacctcttccagactataaagatcctcgacggacagaactcatggtcagcatgggatatacacgggaagagatccaagactcactggtcggacagcgatacaatgaggtgatggcaacttatttgttgctgggatataagtctagcgagctggagggggacaccatcaccctcaagcctagaccaagtgcggaccttacaaactcatcagctccgagcccctcgcataaagtccagagatcagttagcgcaaatccaaaacaacgacggttcagcgatcaggctgcagggcctgccatccctacctcaaatagctacagcaagaagactcagtcaaataatgccgagaataagaggccagaagaggatagagaatcgggacgcaaagcaagctccaccgcaaaggtgcctgcaagtcctctccccggtctggagcgaaagaagacaactccgaccccaagcaccaactctgtcttgagtacctccacaaatcggtcccggaactcccccctgctggagagggccagcctggggcaggcaagcatccagaatggaaaagatagtaccgcaccacagcgtgtccccgtggcgtctccatccgcacataatataagcagttctgggggagcccctgatcgcacgaacttcccacggggagttagttccagatcgacattccatgccggacagcttaggcaggtgagggatcaacaaaacctgccctacggtgttacccctgcatcaccgagtggacacagccagggccgtcgcggagcctccgggagcatattctccaaatttactagtaagttcgtccgacgcaatctgtctttccgattcgccaggagaaaccttaacgagccggaatctaaggatagagtcgagactttacgaccccacgtggtcggcagtggtggcaacgacaaagaaaaagaagaatttagagaggcaaagccgaggtccctgcgctttacctggtccatgaaaaccacatcttcaatggagccaaatgagatgatgagagaaataagaaaagtgctggacgccaattcatgtcaaagcgaactgcacgagaaatatatgctgctctgcatgcatggaacacctggtcacgaggatttcgtacagtgggaaatggaggtttgcaagctccctaggttgtcactgaacggagttagattcaaaaggatctccggcacctctatggcatttaagaacatcgctagcaaaattgctaacgagctcaagctctag

SEQ ID NO: 151395 - DNA, 2175 bp, Artificial Sequence
  derived and/or modified sequence
atgtcctccgctcgcacccccctgcctactttgaatgaaagagacacagagcaaccaactctcggacatctcgactccaagcccagttccaaaagcaatatgatacgagggagaaattcggccacctcggcagatgagcagccacatattggcaactataggttactgaagaccatcggaaaagggaatttcgcaaaagtcaagctggcgcgtcacatactaacgggcaaggaagttgccgtgaagatcattgataaaacacagcttaactcctcaagtcttcaaaaactgtttcgagaggtccggattatgaaggtcctaaaccaccctaacatcgttaagttatttgaggtgattgagactgaaaaaacactgtacctggtgatggagtatgcctccggaggggaggttttcgattacctcgttgcacacggtcgtatgaaagagaaagaggccagggccaagttccgtcagatcgtgagcgccgtacagtattgtcatcagaaattcatcgtgcatagggacttaaaagccgaaaacttactgctggacgcagatatgaatatcaaaatcgcagactttgggttcagcaatgagtttacctttggaaataagctcgacaccttttgcggctctccaccctatgcggcacctgaactgttccaggggaaaaagtacgatggaccagaggtggacgtttggagcctgggcgtgatcctctacacactggtgagcggtagccttccatttgatggtcagaacctgaaagagctgcgggaacgggtcttgcggggtaaatataggatccccttctacatgagtacagactgcgaaaacttactcaaaaaatttctgatactgaacccttccaagagagggacactggaacagatcatgaaggaccggtggatgaatgtgggacatgaggacgatgagcttaaaccgtacgtcgaacccctgcccgactataaggacccacgcaggacggaattaatggtgtcaatgggatatactcgggaggagatccaggacagcctggttggacaacgctataacgaggttatggccacctacttgctacttgggtacaagtcatctgaattggaaggtgatacaattactctgaagcccaggccaagtgccgacctcactaattctagcgcccctagtccatcacacaaggtccagaggagcgtgagtgctaatcctaagcaacgccgattttcggaccaggctggacctgcaattcccacttctaacagctatagcaaaaaaacacagtccaacaacgcagagaacaagcgtcccgaggaggaccgtgaatccggtcgcaaggcctcctccaccgcaaaggtaccagcgagcccccttcctggcctggagcgcaagaagaccacccccactccgtcgacgaactcagtgttgagcaccagtaccaatcgtagtagaaattcacctttgctggagcgtgccagccttgggcaggcctccatccagaacggaaaggattctaccgcccctcagagggttcctgtggcatctccaagtgcgcataatatctccagcagcgggggtgcaccggaccgcacaaatttccctcgcggagtgtcgtccaggtcgacttttcacgctgggcagctgagacaggtgcgcgaccaacagaacctgccttatggcgtgactcccgcatcgccctccggacattctcaaggacgacgaggggcatccgggagtattttctctaaattcacaagcaaatttgtcaggaggaacctgaatgagcctgagtccaaagatagagtcgagacactgcggcctcacgtggtgggaagtggaggaaatgacaaagagaaagaggaattcagggaggccaagccaaggagtctccggttcacttggagcatgaagacaaccagttctatggaacctaatgaaatgatgcgggagatccggaaggttctcgacgccaatagctgccagagcgagttgcatgaaaagtacatgctcctctgtatgcacggcacacccggtcacgaggactttgtgcaatgggagatggaagtgtgtaaattaccccgtctgtcactgaacggggtccgctttaagcgcatctctggtacaagcatggcctttaaaaacattgctagtaagatagctaacgaattaaagctgtag

SEQ ID NO: 151396 - DNA, 2205 bp, Artificial Sequence
  derived and/or modified sequence
atgagcagcgccagaacccccctgcccaccctgaacgagagagacaccgagcagcccaccctgggccacctggacagcaagcccagcagcaagagcaacatgatcagaggcagaaacagcgccaccagcgccgacgagcagccccacatcggcaactacagactgctgaagaccatcggcaagggcaacttcgccaaggtgaagctggccagacacatcctgaccggcaaggaggtggccgtgaagatcatcgacaagacccagctgaacagcagcagcctgcagaagctgttcagagaggtgagaatcatgaaggtgctgaaccaccccaacatcgtgaagctgttcgaggtgatcgagaccgagaagaccctgtacctggtgatggagtacgccagcggcggcgaggtgttcgactacctggtggcccacggcagaatgaaggagaaggaggccagagccaagttcagacagatcgtgagcgccgtgcagtactgccaccagaagttcatcgtgcacagagacctgaaggccgagaacctgctgctggacgccgacatgaacatcaagatcgccgacttcggcttcagcaacgagttcaccttcggcaacaagctggacaccttctgcggcagccccccctacgccgcccccgagctgttccagggcaagaagtacgacggccccgaggtggacgtgtggagcctgggcgtgatcctgtacaccctggtgagcggcagcctgcccttcgacggccagaacctgaaggagctgagagagagagtgctgagaggcaagtacagaatccccttctacatgagcaccgactgcgagaacctgctgaagaagttcctgatcctgaaccccagcaagagaggcaccctggagcagatcatgaaggacagatggatgaacgtgggccacgaggacgacgagctgaagccctacgtggagcccctgcccgactacaaggaccccagaagaaccgagctgatggtgagcatgggctacaccagagaggagatccaggacagcctggtgggccagagatacaacgaggtgatggccacctacctgctgctgggctacaagagcagcgagctggagggcgacaccatcaccctgaagcccagacccagcgccgacctgaccaacagcagcgcccccagccccagccacaaggtgcagagaagcgtgagcgccaaccccaagcagagaagattcagcgaccaggccgccggccccgccatccccaccagcaacagctacagcaagaagacccagagcaacaacgccgagaacaagagacccgaggaggacagagagagcggcagaaaggccagcagcaccgccaaggtgcccgccagccccctgcccggcctggagagaaagaagaccacccccacccccagcaccaacagcgtgctgagcaccagcaccaacagaagcagaaacagccccctgctggagagagccagcctgggccaggccagcatccagaacggcaaggacagcaccgccccccagagagtgcccgtggccagccccagcgcccacaacatcagcagcagcggcggcgcccccgacagaaccaacttccccagaggcgtgagcagcagaagcaccttccacgccggccagctgagacaggtgagagaccagcagaacctgccctacggcgtgacccccgccagccccagcggccacagccagggcagaagaggcgccagcggcagcatcttcagcaagttcaccagcaagttcgtgagaagaaacctgagcttcagattcgccagaagaaacctgaacgagcccgagagcaaggacagagtggagaccctgagaccccacgtggtgggcagcggcggcaacgacaaggagaaggaggagttcagagaggccaagcccagaagcctgagattcacctggagcatgaagaccaccagcagcatggagcccaacgagatgatgagagagatcagaaaggtgctggacgccaacagctgccagagcgagctgcacgagaagtacatgctgctgtgcatgcacggcacccccggccacgaggacttcgtgcagtgggagatggaggtgtgcaagctgcccagactgagcctgaacggcgtgagattcaagagaatcagcggcaccagcatggccttcaagaacatcgccagcaagatcgccaacgagctgaagctgtag

SEQ ID NO: 151397 - DNA, 2175 bp, Artificial Sequence
  derived and/or modified sequence
atgagcagcgccagaacccccctgcccaccctgaacgagagagacaccgagcagcccaccctgggccacctggacagcaagcccagcagcaagagcaacatgatcagaggcagaaacagcgccaccagcgccgacgagcagccccacatcggcaactacagactgctgaagaccatcggcaagggcaacttcgccaaggtgaagctggccagacacatcctgaccggcaaggaggtggccgtgaagatcatcgacaagacccagctgaacagcagcagcctgcagaagctgttcagagaggtgagaatcatgaaggtgctgaaccaccccaacatcgtgaagctgttcgaggtgatcgagaccgagaagaccctgtacctggtgatggagtacgccagcggcggcgaggtgttcgactacctggtggcccacggcagaatgaaggagaaggaggccagagccaagttcagacagatcgtgagcgccgtgcagtactgccaccagaagttcatcgtgcacagagacctgaaggccgagaacctgctgctggacgccgacatgaacatcaagatcgccgacttcggcttcagcaacgagttcaccttcggcaacaagctggacaccttctgcggcagccccccctacgccgcccccgagctgttccagggcaagaagtacgacggccccgaggtggacgtgtggagcctgggcgtgatcctgtacaccctggtgagcggcagcctgcccttcgacggccagaacctgaaggagctgagagagagagtgctgagaggcaagtacagaatccccttctacatgagcaccgactgcgagaacctgctgaagaagttcctgatcctgaaccccagcaagagaggcaccctggagcagatcatgaaggacagatggatgaacgtgggccacgaggacgacgagctgaagccctacgtggagcccctgcccgactacaaggaccccagaagaaccgagctgatggtgagcatgggctacaccagagaggagatccaggacagcctggtgggccagagatacaacgaggtgatggccacctacctgctgctgggctacaagagcagcgagctggagggcgacaccatcaccctgaagcccagacccagcgccgacctgaccaacagcagcgcccccagccccagccacaaggtgcagagaagcgtgagcgccaaccccaagcagagaagattcagcgaccaggccggccccgccatccccaccagcaacagctacagcaagaagacccagagcaacaacgccgagaacaagagacccgaggaggacagagagagcggcagaaaggccagcagcaccgccaaggtgcccgccagccccctgcccggcctggagagaaagaagaccacccccacccccagcaccaacagcgtgctgagcaccagcaccaacagaagcagaaacagccccctgctggagagagccagcctgggccaggccagcatccagaacggcaaggacagcaccgccccccagagagtgcccgtggccagccccagcgcccacaacatcagcagcagcggcggcgcccccgacagaaccaacttccccagaggcgtgagcagcagaagcaccttccacgccggccagctgagacaggtgagagaccagcagaacctgccctacggcgtgacccccgccagccccagcggccacagccagggcagaagaggcgccagcggcagcatcttcagcaagttcaccagcaagttcgtgagaagaaacctgaacgagcccgagagcaaggacagagtggagaccctgagaccccacgtggtgggcagcggcggcaacgacaaggagaaggaggagttcagagaggccaagcccagaagcctgagattcacctggagcatgaagaccaccagcagcatggagcccaacgagatgatgagagagatcagaaaggtgctggacgccaacagctgccagagcgagctgcacgagaagtacatgctgctgtgcatgcacggcacccccggccacgaggacttcgtgcagtgggagatggaggtgtgcaagctgcccagactgagcctgaacggcgtgagattcaagagaatcagcggcaccagcatggccttcaagaacatcgccagcaagatcgccaacgagctgaagctgtag

SEQ ID NO: 151398 - protein, 537 aa, Artificial Sequence
  derived and/or modified sequence
MLNTLQTNAGYLEQVKRQRGDPQTQLEAMELYLARSGLQVEDLDRLNIIHVTGTKGKGSTCAFTECILRSYGLKTGFFSSPHLVQVRERIRINGQPISPELFTKYFWRLYHRLEETKDGSCVSMPPYFRFLTLMAFHVFLQEKVDLAVVEVGIGGAYDCTNIIRKPVVCGVSSLGIDHTSLLGDTVEKIAWQKGGIFKQGVPAFTVLQPEGPLAVLRDRAQQISCPLYLCPMLEALEEGGPPLTLGLEGEHQRSNAALALQLAHCWLQRQDRHGAGEPKASRPGLLWQLPLAPVFQPTSHMRLGLRNTEWPGRTQVLRRGPLTWYLDGAHTASSAQACVRWFRQALQGRERPSGGPEVRVLLFNATGDRDPAALLKLLQPCQFDYAVFCPNLTEVSSTGNADQQNFTVTLDQVLLRCLEHQQHWNHLDEEQASPDLWSAPSPEPGGSASLLLAPHPPHTCSASSLVFSCISHALQWISQGRDPIFQPPSPPKGLLTHPVAHSGASILREAAAIHVLVTGSLHLVGGVLKLLEPALSQ

SEQ ID NO: 151399 - protein, 375 aa, Artificial Sequence
  derived and/or modified sequence
MSRARSHLRAALFLAAASARGITTQVAARRGLSAWPVPQEPSMEYQDAVRMLNTLQTNAGYLEQVKRQRGDPQTQLEAMELYLARSGLQVEDLDRLNIIHVTGTKGKGSTCAFTECILRSYGLKTGFFSSPHLVQVRERIRINGQPISPELFTKYFWRLYHRLEETKDGSCVSMPPYFRFLTLMAFHVFLQEKVDLAVVEVGIGGAYDCTNIIRKPVVCGVSSLGIDHTSLLGDTVEKIAWQKGGIFKQGVPAFTVLQPEGPLAVLRDRAQQISVLGSQRHPGQGSCGSCPWHLCSSPHPTCGSGFGTRSGRAGRRCCGAGPSPGTWTVRTPPAARRPACAGSARRCRAARGRAVAPRFESCSSMLPGTGTRRPC

SEQ ID NO: 151400 - protein, 587 aa, Artificial Sequence
  derived and/or modified sequence
MSRARSHLRAALFLAAASARGITTQVAARRGLSAWPVPQEPSMEYQDAVRMLNTLQTNAGYLEQVKRQRGDPQTQLEAMELYLARSGLQVEDLDRLNIIHVTGTKGKGSTCAFTECILRSYGLKTGFFSSPHLVQVRERIRINGQPISPELFTKYFWRLYHRLEETKDGSCVSMPPYFRFLTLMAFHVFLQEKVDLAVVEVGIGGAYDCTNIIRKPVVCGVSSLGIDHTSLLGDTVEKIAWQKGGIFKQGVPAFTVLQPEGPLAVLRDRAQQISCPLYLCPMLEALEEGGPPLTLGLEGEHQRSNAALALQLAHCWLQRQDRHGAGEPKASRPGLLWQLPLAPVFQPTSHMRLGLRNTEWPGRTQVLRRGPLTWYLDGAHTASSAQACVRWFRQALQGRERPSGGPEVRVLLFNATGDRDPAALLKLLQPCQFDYAVFCPNLTEVSSTGNADQQNFTVTLDQVLLRCLEHQQHWNHLDEEQASPDLWSAPSPEPGGSASLLLAPHPPHTCSASSLVFSCISHALQWISQGRDPIFQPPSPPKGLLTHPVAHSGASILREAAAIHVLVTGSLHLVGGVLKLLEPALSQ

SEQ ID NO: 151401 - protein, 265 aa, Artificial Sequence
  derived and/or modified sequence
MLNTLQTNAGYLEQVKRQRGDPQTQLEAMELYLARSGLQVEDLDRLNIIHVTGTKGKGSTCAFTECILRSYGLKTGFFSSPHLVQVRERIRINGQPISPELFTKYFWRLYHRLEETKDGSCVSMPPYFRFLTLMAFHVFLQEKVDLAVVEVGIGGAYDCTNIIRKPVVCGVSSLGIDHTSLLGDTVEKIAWQKGGIFKQGVPAFTVLQPEGPLAVLRDRAQQISVLGSQRHPGQGSCGSCPWHLCSSPHPTCGSGFGTRSGRAGR

SEQ ID NO: 151402 - DNA, 2278 bp, Artificial Sequence
  derived and/or modified sequence
tgggggtggggacagggaccaggaagttgggcccgggccgccggggctgggaattcggagactatagcgtccccgccccgggttgggaagtgggaagtggcacaggagctaggatccagaagcccagaggctcagcggtgcttctggagttccagtgatcccggagtctgaaccggcagtgagagtggggaaagagggatgccgtgcgcatgctcaataccctgcagaccaatgccggctacctggagcaggtgaagcgccagcggggtgaccctcagacacagttggaagccatggaactgtacctggcacggagtgggctgcaggtggaggacttggaccggctgaacatcatccacgtcactgggacgaaggggaagggctccacctgtgccttcacggaatgtatcctccgaagctatggcctgaagacgggattctttagctctccccacctggtgcaggttcgggagcggatccgcatcaatgggcagcccatcagtcctgagctcttcaccaagtacttctggcgcctctaccaccggctggaggagaccaaggatggcagctgtgtctccatgcccccctacttccgcttcctgacactcatggccttccacgtcttcctccaagagaaggtggacctggcagtggtggaggtgggcattggcggggcttatgactgcaccaacatcatcaggaagcctgtggtgtgcggagtctcctctcttggcatcgaccacaccagcctcctgggggatacggtggagaagatcgcatggcagaaagggggcatctttaagcaaggtgtccctgccttcactgtgctccaacctgaaggtcccctggcagtgctgagggaccgagcccagcagatctcatgtcctctatacctgtgtccgatgctggaggccctcgaggaaggggggccgccgctgaccctgggcctggagggggagcaccagcggtccaacgccgccttggccttgcagctggcccactgctggctgcagcggcaggaccgccatggtgctggggagccaaaggcatccaggccagggctcctgtggcagctgcccctggcacctgtgttccagcccacatcccacatgcggctcgggcttcggaacacggagtggccgggccggacgcaggtgctgcggcgcgggcccctcacctggtacctggacggtgcgcacaccgccagcagcgcgcaggcctgcgtgcgctggttccgccaggcgctgcagggccgcgagaggccgagcggtggccccgaggttcgagtcttgctcttcaatgctaccggggaccgggacccggcggccctgctgaagctgctgcagccctgccagtttgactatgccgtcttctgccctaacctgacagaggtgtcatccacaggcaacgcagaccaacagaacttcacagtgacactggaccaggtcctgctccgctgcctggaacaccagcagcactggaaccacctggacgaagagcaggccagcccggacctctggagtgcccccagcccagagcccggtgggtccgcatccctgcttctggcgccccacccaccccacacctgcagtgccagctccctcgtcttcagctgcatttcacatgccttgcaatggatcagccaaggccgagaccccatcttccagccacctagtcccccaaagggcctcctcacccaccctgtggctcacagtggggccagcatactccgtgaggctgctgccatccatgtgctagtcactggcagcctgcacctggtgggtggtgtcctgaagctgctggagcccgcactgtcccagtagccaaggcccggggttggaggtgggagcttcccacacctgcctgcgttctccccatgaacttacatactaggtgccttttgtttttggctttcctggttctgtctagactggcctaggggccagggctttgggatgggaggccgggagaggatgtcttttttaaggctctgtgccttggtctctccttcctcttggctgagatagcagaggggctccccgggtctctcactgttgcagtggcctggccgttcagcctgtctcccccaacaccccgcctgcctcctggctcaggcccagcttattgtgtgcgctgcctggccaggccctgggtcttgccatgtgctgggtggtagatttcctcctcccagtgccttctgggaagggagagggcctctgcctgggacactgcgggacagagggtggctggagtgaattaaagcctttgttttttaaag

SEQ ID NO: 151403 - DNA, 2274 bp, Artificial Sequence
  derived and/or modified sequence
gcggggcgtctcccgcccgggcctagagcgctgccgggggcgccgggactatgtcgcgggcgcggagccacctgcgcgccgctctattcctggcagcggcgtctgcgcgcggcataacgacccaggtcgcggcgcggcggggcttgagcgcgtggccggtgccgcaggagccgagcatggagtaccaggatgccgtgcgcatgctcaataccctgcagaccaatgccggctacctggagcaggtgaagcgccagcggggtgaccctcagacacagttggaagccatggaactgtacctggcacggagtgggctgcaggtggaggacttggaccggctgaacatcatccacgtcactgggacgaaggggaagggctccacctgtgccttcacggaatgtatcctccgaagctatggcctgaagacgggattctttagctctccccacctggtgcaggttcgggagcggatccgcatcaatgggcagcccatcagtcctgagctcttcaccaagtacttctggcgcctctaccaccggctggaggagaccaaggatggcagctgtgtctccatgcccccctacttccgcttcctgacactcatggccttccacgtcttcctccaagagaaggtggacctggcagtggtggaggtgggcattggcggggcttatgactgcaccaacatcatcaggaagcctgtggtgtgcggagtctcctctcttggcatcgaccacaccagcctcctgggggatacggtggagaagatcgcatggcagaaagggggcatctttaagcaaggtgtccctgccttcactgtgctccaacctgaaggtcccctggcagtgctgagggaccgagcccagcagatctcatgtcctctatacctgtgtccgatgctggaggccctcgaggaaggggggccgccgctgaccctgggcctggagggggagcaccagcggtccaacgccgccttggccttgcagctggcccactgctggctgcagcggcaggaccgccatggtgctggggagccaaaggcatccaggccagggctcctgtggcagctgcccctggcacctgtgttccagcccacatcccacatgcggctcgggcttcggaacacggagtggccgggccggacgcaggtgctgcggcgcgggcccctcacctggtacctggacggtgcgcacaccgccagcagcgcgcaggcctgcgtgcgctggttccgccaggcgctgcagggccgcgagaggccgagcggtggccccgaggttcgagtcttgctcttcaatgctaccggggaccgggacccggcggccctgctgaagctgctgcagccctgccagtttgactatgccgtcttctgccctaacctgacagaggtgtcatccacaggcaacgcagaccaacagaacttcacagtgacactggaccaggtcctgctccgctgcctggaacaccagcagcactggaaccacctggacgaagagcaggccagcccggacctctggagtgcccccagcccagagcccggtgggtccgcatccctgcttctggcgccccacccaccccacacctgcagtgccagctccctcgtcttcagctgcatttcacatgccttgcaatggatcagccaaggccgagaccccatcttccagccacctagtcccccaaagggcctcctcacccaccctgtggctcacagtggggccagcatactccgtgaggctgctgccatccatgtgctagtcactggcagcctgcacctggtgggtggtgtcctgaagctgctggagcccgcactgtcccagtagccaaggcccggggttggaggtgggagcttcccacacctgcctgcgttctccccatgaacttacatactaggtgccttttgtttttggctttcctggttctgtctagactggcctaggggccagggctttgggatgggaggccgggagaggatgtcttttttaaggctctgtgccttggtctctccttcctcttggctgagatagcagaggggctccccgggtctctcactgttgcagtggcctggccgttcagcctgtctcccccaacaccccgcctgcctcctggctcaggcccagcttattgtgtgcgctgcctggccaggccctgggtcttgccatgtgctgggtggtagatttcctcctcccagtgccttctgggaagggagagggcctctgcctgggacactgcgggacagagggtggctggagtgaattaaagcctttgttttttaaagaaatg

SEQ ID NO: 151404 - DNA, 1764 bp, Artificial Sequence
  derived and/or modified sequence
atgtcacgtgccaggtcgcacctccgggcagcccttttcttggccgctgcctctgccagggggatcacgactcaggtggccgccaggcgcggattgtctgcttggccagtccctcaagagccgagcatggaataccaggatgccgtgcgaatgctgaatactctacagactaatgccgggtacctggaacaggtcaaacgccagcgtggagatccacagacacagcttgaggctatggagctctatttagcaagaagcggtttgcaagtcgaggatctggatcgccttaatatcattcacgtgaccgggacaaagggcaaaggaagcacgtgcgccttcacggagtgcattttgaggtcctacgggctgaaaaccggatttttttcatccccccatctagtccaggtaagggaacgcatcaggatcaatggccagccgatatcccccgaactgtttactaaatacttctggaggctctatcaccggctcgaagagacgaaggacggtagctgtgtatctatgccaccttacttccggttcctgacactcatggccttccacgtatttctgcaggagaaggttgacctggccgtggtggaggttgggattggaggagcctatgactgtaccaatattatacggaaacctgttgtctgtggggtgagttccctcgggatagaccatacgagcctgctgggcgacactgtggaaaagatcgcttggcaaaaggggggtatcttcaaacagggagttccagcttttaccgtgctccagccggaggggccactggctgtgcttagagatcgggctcagcagatcagttgcccgctttacctctgccctatgctcgaagctttggaagaaggtggtccccctctcactctggggttggagggtgaacatcaaaggtcaaatgcagcgctcgctcttcaattggctcactgctggctgcagcgtcaagatagacatggtgccggtgagcccaaggcttctcggccaggcctactgtggcagctgcccctggctccagtgttccagccgacttcgcacatgcggctcggcctgagaaacaccgagtggcctgggaggacacaggttttgagacgcggcccacttacctggtacctcgacggggctcacactgcgtctagcgcacaggcttgcgtgagatggttccggcaagcccttcagggccgcgagcgcccatctggaggcccggaagtaagagtcctcttatttaatgctaccggcgaccgcgatcccgctgccctgctgaagctgcttcaaccctgccagttcgattatgcagtcttttgtcccaacctgactgaggtatctagtacagggaacgcagaccagcagaattttactgtgacactggatcaagtgctgctgcgctgtctcgaacaccagcaacactggaaccacttagatgaggaacaggcatccccagacctgtggtctgcaccctcccccgagcctggaggatctgcatccctgctgctggctcctcatcctcctcacacctgttctgcctcttcactcgtgttttcgtgtatctctcacgcactgcagtggataagccaggggcgcgaccctatctttcagcccccctcaccgccaaaggggttacttactcatcctgtagcccatagtggtgccagcattctacgggaggcagccgccattcatgtgctggttaccggctcactgcacctcgtgggcggtgtgttgaaactacttgagccagcgctgtcacagtag

SEQ ID NO: 151405 - DNA, 1764 bp, Artificial Sequence
  derived and/or modified sequence
atgagccgggcccggagccacctgcgggccgccctcttcctggccgccgccagcgcccggggcatcaccacccaggtggccgcccggcggggcctgagcgcctggcctgtgccccaggagcccagcatggagtaccaggatgctgtgaggatgctgaacaccctgcagaccaatgccggctacctggagcaggtgaagaggcagagaggagacccccagacccagctggaggccatggagctgtacctggcccggagcggcctgcaggtggaggacctggaccggctgaacatcatccacgtgacaggcaccaagggcaagggcagcacctgtgccttcacagagtgcatcctgcggagctatggcctgaagacaggcttcttcagcagcccccacctggtgcaggtgcgggagcgcatccgcatcaatggccagcccatcagccctgagctgttcaccaagtacttctggaggctgtaccaccggctggaggagaccaaggatggcagctgtgtgtccatgccaccctacttccgcttcctgaccctgatggccttccacgtgttcctgcaggagaaggtggacctggccgtggtggaggtgggcattggaggagcctatgactgcaccaacatcatcaggaagcctgtggtgtgtggggtgagcagcctgggcatcgaccacaccagcctgctgggggacacagtggagaagatcgcctggcagaagggcggcatcttcaagcagggcgtgcctgccttcaccgtgctgcagcctgagggccccctggccgtgctgcgggaccgggcccagcagatcagctgccccctgtacctgtgccccatgctggaggccctggaggagggcggcccccccctgaccctgggcctggagggggagcaccagaggagcaatgctgccctggccctgcagctggcccactgctggctgcagaggcaggacagacatggagctggggagcccaaggccagcaggcctggcctgctgtggcagctgcccctggcccctgtgttccagcccaccagccacatgaggctgggcctgaggaacacagagtggccaggccgcacccaggtgctgcggcggggccccctgacctggtacctggatggagcccacacagccagcagcgcccaggcctgtgtgcgctggttccggcaggccctgcagggccgggagcggcccagcggcggccctgaggtgcgggtgctgctcttcaatgccaccggggaccgggaccctgctgccctgctgaagctgctgcagccctgccagtttgattatgctgtgttctgccccaacctgacagaggtgagcagcactggaaatgctgaccagcagaacttcaccgtgaccctggaccaggtgctgctgcgctgcctggagcaccagcagcactggaaccacctggatgaggagcaggccagcccagacctgtggagcgcccccagccctgagcccggcggcagcgccagcctgctgctggccccccaccccccccacacctgcagcgccagcagcctggtgttcagctgcatcagccacgccctgcagtggatcagccagggccgggaccccatcttccagccccccagcccccccaagggcctgctgacccaccctgtggcccacagcggggccagcatcctgcgggaggccgccgccatccacgtgctggtgacaggcagcctgcacctggtgggcggcgtgctgaagctgctggagcccgccctgagccagtag

SEQ ID NO: 151406 - DNA, 1764 bp, Artificial Sequence
  derived and/or modified sequence
atgagccgggcccggagccacctgcgggccgccctgttcctggccgctgcgtccgctagggggatcaccactcaggtggccgcccgacgaggcctgtctgcctggcccgtgccccaggagcccagtatggaataccaagatgccgtgagaatgctcaataccttacagacgaatgcggggtaccttgagcaggtcaagaggcagcgaggagacccacaaactcagttggaagcaatggaactctatctggcccgcagcggtctccaggtagaagatctcgatagactgaatattattcacgtgaccggtacaaaagggaaggggtctacctgtgccttcacggaatgtatcctgcgcagctacgggctgaaaacgggattcttttcttccccccatctggtccaggtgcgggagaggattcgcatcaatgggcagccaatcagtcctgagctcttcactaaatacttctggcgattgtaccataggctggaggagaccaaggacggctcgtgcgtatctatgccgccctacttccgcttcctgacactcatggcattccacgtgtttttgcaagagaaggtcgatctagccgtggtggaagttggtattggaggagcatatgattgcactaacatcattcggaagccggtggtgtgtggagtgtccagtctgggcatagaccatacttcgcttctgggcgataccgtggaaaaaatcgcttggcagaaaggtgggatattcaagcaaggggtgccagcttttaccgtgctacaaccagaaggcccactcgccgttcttcgcgatcgagcgcagcaaattagctgtcccctctatctgtgccccatgttggaagccctggaggagggcgggccaccattgacattaggcttggagggcgagcatcagcgctccaacgccgccctggcactccagttagcacactgttggctgcagagacaggaccgccatggagctggggagcccaaagcatctagacctggattgctctggcagttgccactggctccagtgtttcagcccaccagtcatatgcgcctgggattgagaaataccgagtggcccggcaggactcaggtgttgagacgcggcccactcacttggtacctcgacggcgcccacaccgcgtctagtgcccaagcttgtgtgcgctggttccggcaggctttacagggcagagagaggccttctggagggcccgaagtgcgggtgctcctgttcaacgctacaggggacagggacccagctgccctacttaaactcttacaaccctgtcagtttgactacgcagtcttttgcccaaatttgaccgaggtatcatcaactggcaatgcagatcaacagaattttacggtgaccctggatcaagttcttctgcggtgccttgagcaccagcagcactggaatcatctggatgaagaacaggctagcccagatttatggtcagctccaagccctgagccaggtgggagcgcctcactgctgctggcgcctcaccccccccatacttgcagcgcttcctcccttgtgttttcttgcatttcccacgcgttgcagtggatcagtcaaggccgagatccaattttccagccgccctcaccccccaaaggactcttgacacacccagtggctcactctggtgcctcgatcctgcgggaggcagctgctatacatgtgctagtgaccggtagcctgcatctggtggggggggttctgaagctcctcgagccagctctcagtcaatag

SEQ ID NO: 151407 - DNA, 1764 bp, Artificial Sequence
  derived and/or modified sequence
atgagtcgcgcacggagccacctccgggcagccttgtttctcgctgccgcttctgctcgtggcatcaccacccaggtggctgctcgcagaggcctctccgcttggcccgtacctcaggagccctcaatggagtatcaggacgctgtcagaatgctgaatacactgcagacaaatgcagggtatctcgagcaggttaaacgccagcggggagacccgcagactcagctggaagccatggagttgtatctggccagatccgggcttcaggtggaggacctggatcgtctgaacattatccatgtgacggggaccaaaggaaaaggtagcacctgtgccttcactgagtgcatcttaagatcctatggattgaaaaccggcttcttctcttcccctcacctggtccaagtccgcgagcggatccggatcaacggccagcctatttccccagaactgttcacaaagtacttctggcggttgtatcaccgtctggaggaaacaaaggatggctcctgtgtgagcatgcccccatattttcggttcctgacactaatggcattccatgtttttttacaggagaaggtcgaccttgcggtcgtcgaagtgggcattggaggcgcatatgattgcacaaatattatccgaaagcctgtggtctgcggagtctccagtttgggcatcgaccatacctcgctacttggcgacacagtggaaaaaatcgcatggcaaaagggcggtatcttcaagcagggggtcccagcttttaccgtcttgcagccagaagggcctctcgccgtgcttagagatagggcccaacagatatcttgccccctgtacttgtgccccatgctcgaggccctggaggaaggtggcccaccgctcacattggggctggagggggagcatcagcgatccaatgccgcactggctcttcagctggcacattgttggttgcaacgccaggatcgccatggcgcaggtgaacccaaggccagtaggcctgggctgctgtggcagctcccgctggctcccgtgtttcagcctaccagccatatgaggctcgggctgcgcaacacagaatggcccggacggactcaagttctgagacggggaccactgacctggtatctagacggtgcgcatactgcgtcatctgcccaagcttgcgtgaggtggtttagacaggctttacaggggagggaaaggccgtccggtggaccagaggtgcgcgtactgttattcaatgcgaccggggaccgggatccagctgctctcctgaagctactccagccatgtcaattcgattatgcggtgttctgtcccaacctaacagaggtgtccagcaccgggaatgccgaccagcagaacttcactgtcaccctggatcaagtgctcctgaggtgcttagagcaccagcagcattggaatcacctggacgaagagcaggcctcccccgacctgtggagcgccccttcccccgaaccgggagggtccgccagcctcttgcttgcgccacatcctcctcacacctgcagcgcttcaagcctagtcttctcgtgcatttcgcatgctttacagtggatatctcaggggagagaccccatctttcagcccccaagtccacctaaaggtcttctgacccaccctgttgcccatagcggggcatcaatcctgagggaggccgcagccatccacgttctggttacggggagcctccacttggttggcggagtgctgaagctactcgagcctgcactcagtcaatag

SEQ ID NO: 151408 - DNA, 1764 bp, Artificial Sequence
  derived and/or modified sequence
atgagcagagccagaagccacctgagagccgccctgttcctggccgccgccagcgccagaggcatcaccacccaggtggccgccagaagaggcctgagcgcctggcccgtgccccaggagcccagcatggagtaccaggacgccgtgagaatgctgaacaccctgcagaccaacgccggctacctggagcaggtgaagagacagagaggcgacccccagacccagctggaggccatggagctgtacctggccagaagcggcctgcaggtggaggacctggacagactgaacatcatccacgtgaccggcaccaagggcaagggcagcacctgcgccttcaccgagtgcatcctgagaagctacggcctgaagaccggcttcttcagcagcccccacctggtgcaggtgagagagagaatcagaatcaacggccagcccatcagccccgagctgttcaccaagtacttctggagactgtaccacagactggaggagaccaaggacggcagctgcgtgagcatgcccccctacttcagattcctgaccctgatggccttccacgtgttcctgcaggagaaggtggacctggccgtggtggaggtgggcatcggcggcgcctacgactgcaccaacatcatcagaaagcccgtggtgtgcggcgtgagcagcctgggcatcgaccacaccagcctgctgggcgacaccgtggagaagatcgcctggcagaagggcggcatcttcaagcagggcgtgcccgccttcaccgtgctgcagcccgagggccccctggccgtgctgagagacagagcccagcagatcagctgccccctgtacctgtgccccatgctggaggccctggaggagggcggcccccccctgaccctgggcctggagggcgagcaccagagaagcaacgccgccctggccctgcagctggcccactgctggctgcagagacaggacagacacggcgccggcgagcccaaggccagcagacccggcctgctgtggcagctgcccctggcccccgtgttccagcccaccagccacatgagactgggcctgagaaacaccgagtggcccggcagaacccaggtgctgagaagaggccccctgacctggtacctggacggcgcccacaccgccagcagcgcccaggcctgcgtgagatggttcagacaggccctgcagggcagagagagacccagcggcggccccgaggtgagagtgctgctgttcaacgccaccggcgacagagaccccgccgccctgctgaagctgctgcagccctgccagttcgactacgccgtgttctgccccaacctgaccgaggtgagcagcaccggcaacgccgaccagcagaacttcaccgtgaccctggaccaggtgctgctgagatgcctggagcaccagcagcactggaaccacctggacgaggagcaggccagccccgacctgtggagcgcccccagccccgagcccggcggcagcgccagcctgctgctggccccccaccccccccacacctgcagcgccagcagcctggtgttcagctgcatcagccacgccctgcagtggatcagccagggcagagaccccatcttccagccccccagcccccccaagggcctgctgacccaccccgtggcccacagcggcgccagcatcctgagagaggccgccgccatccacgtgctggtgaccggcagcctgcacctggtgggcggcgtgctgaagctgctggagcccgccctgagccagtag

SEQ ID NO: 151409 - protein, 461 aa, Artificial Sequence
  derived and/or modified sequence
MDYSYDEDLDELCPVCGDKVSGYHYGLLTCESCKGFFKRTVQNNKHYTCTESQSCKIDKTQRKRCPFCRFQKCLTVGMRLEAVRADRMRGGRNKFGPMYKRDRALKQQKKAQIRANGFKLETGPPMGVPPPPPPAPDYVLPPSLHGPEPKGLAAGPPAGPLGDFGAPALPMAVPGAHGPLAGYLYPAFPGRAIKSEYPEPYASPPQPGLPYGYPEPFSGGPNVPELILQLLQLEPDEDQVRARILGCLQEPTKSRPDQPAAFGLLCRMADQTFISIVDWARRCMVFKELEVADQMTLLQNCWSELLVFDHIYRQVQHGKEGSILLVTGQEVELTTVATQAGSLLHSLVLRAQELVLQLLALQLDRQEFVCLKFIILFSLDLKFLNNHILVKDAQEKANAALLDYTLCHYPHCGDKFQQLLLCLVEVRALSMQAKEYLYHKHLGNEMPRNNLLIEMLQAKQT

SEQ ID NO: 151410 - protein, 178 aa, Artificial Sequence
  derived and/or modified sequence
MDYSYDEDLDELCPVCGDKVSGYHYGLLTCESCKGFFKRTVQNNKHYTCTESQSCKIDKTQRKRCPFCRFQKCLTVGMRLEAVRADRMRGGRNKFGPMYKRDRALKQQKKAQIRANGFKLETGPPMGVPPPPPPAPDYVLPPSLHGPEPKGLAAGPPAGPLGDFGAPALPMAVPGAHG

SEQ ID NO: 151411 - DNA, 3095 bp, Artificial Sequence
  derived and/or modified sequence
ggaggacggacggacagggccagcctgctgtccggctgccgcccgccgtggtgtgagggggtttctgcgcacccacagtcgccaccgtcccacctgggctgccggagcctccccctggacccctggtgcccactgccaccctcatccggtgtgagagcgctgcttccgcttcgcggacgccgcgggcatggactattcgtacgacgaggacctggacgagctgtgccccgtgtgcggggacaaggtgtccggctaccactacggactgctcacgtgtgagagctgcaagggcttcttcaagcgcacggtgcagaacaacaagcactacacgtgcaccgagagccagagctgcaagatcgacaagacgcagcgcaagcgctgtcccttctgccgcttccagaaatgcctgacggtggggatgcgcctggaagccgtgcgcgctgaccgtatgaggggtggccggaacaagtttgggccgatgtacaagcgggaccgggccctgaaacagcagaagaaggcacagattcgggccaatggcttcaagctggagacagggcccccgatgggggtgcccccgccgccccctcccgcaccggactacgtgctgcctcccagcctgcatgggcctgagcccaagggcctggccgccggtccacctgctgggccactgggcgactttggggccccagcactgcccatggccgtgcccggtgcccacgggccactggctggctacctctaccctgcctttcctggccgtgccatcaagtctgagtacccggagccttatgccagccccccacagcctgggctgccgtacggctacccagagcccttctctggagggcccaacgtgcctgagctcatcctgcagctgctgcagctggagccggatgaggaccaggtgcgggcccgcatcttgggctgcctgcaggagcccaccaaaagccgccccgaccagccggcggccttcggcctcctgtgcagaatggccgaccagaccttcatctccatcgtggactgggcacgcaggtgcatggtcttcaaggagctggaggtggccgaccagatgacgctgctgcagaactgctggagcgagctgctggtgttcgaccacatctaccgccaggtccagcacggcaaggagggcagcatcctgctggtcaccgggcaggaggtggagctgaccacagtggccacccaggcgggctcgctgctgcacagcctggtgttgcgggcgcaggagctggtgctgcagctgcttgcgctgcagctggaccggcaggagtttgtctgcctcaagttcatcatcctcttcagcctggatttgaagttcctgaataaccacatcctggtgaaagacgctcaggagaaggccaacgccgccctgcttgactacaccctgtgccactacccgcactgcggggacaaattccagcagctgctgctgtgcctggtggaggtgcgggccctgagcatgcaggccaaggagtacctgtaccacaagcacctgggcaacgagatgccccgcaacaacctgctcatcgaaatgctgcaagccaagcagacttgagcctgggccgggggcggggccgggactgggggcgggactgggggcggggcctgggcggggccgcagccacaccgctggctccgcatggttcattttctgatgcccaccgaggagccccagccccgtcccagaggccgctgcccctgagttctgacactgtgtgtttgggaaggtgggtgaggctgggcagggcctggcggaggtggagtggccactggcacttgcctgctgcttggagtgccccaaggaggtggctgttaaccacccgccccgccccctccctgctcccagctctctctcctggagtctgaagcctgcaggtccggggaggaggttcgggattccctggtgggcctcgacgtcccttggatcagaggtcatcccttcctcctctcctggaaacagacagggagaagttgagcaggtatcaactaggggaggagagagggtctccagtgttccccccatagagaccaggagggagagcctctgttttgtaaactaaggataaccgagtttgctaaattgagaggggctattgggccctagaggacactaggagactggttaggacaaaaagaccttctccctagcccttctaccccacctgacctctgcaagagggggcattgatacatcatcgggaaaaaactttgctccaggcatcactgattccctctcccacccaaggagaacgtttggtacaatcgacatcctagccccacccagaggtggccctcccaggctggtatttatctgcaaggttgtagtcaagaggtttttctccccgctttttgtttttaagcttctagacactccttgaaatgtgtgtgtgatggagggaaggggacagatttgaggactgaagctggggcttggggattgccactaagtacagctgacggtttctccccggacactcgcctactaagtacccttggggtggtgctgggtcattacttctgagccccagccccaatccagagaagcgctgttgcccgccctccacccactaggtgaacagcaggatgccctgttgggggcttcaggtctctgtgggtgggaatgcaagtgaacttgggagggggcacgggcctgtagatcagggatagcgctgttgatcccctctctgtggctccaacccgttgggtcccttgctgcaaacccatgaagctggccctcagctccctgaccccctgtcctaggtcatgaaggacactctgcagggtgaagcaccagggagaggcctcggctgtctcctgtccccggcggggtgcctgctgtccgtcccgctttcatgttactgttgcagcttgtgctgagcctgcccagttggaggagactgggcacccctgcctcctgcctcccgcctcccgccaccctgtctcagtacctcccctccccgccccctgaaacatgtgcccctgccaaggccggagacccacagccctgaaacgagaagtgcccttaaggatcaccccagcccccacagccctggaataaatttcgcaattagtttcca

SEQ ID NO: 151412 - DNA, 1386 bp, Artificial Sequence
  derived and/or modified sequence
atggattatagctacgatgaagatctggacgagctgtgtcctgtgtgtggtgacaaggtttccggttatcactacggactcctgacgtgtgagtcatgtaagggatttttcaaacggaccgtgcaaaacaacaagcattatacatgtaccgaatctcagagctgcaagatcgacaagactcagaggaaaaggtgtcctttctgccgcttccagaaatgcctgaccgtcgggatgcggctcgaggctgtgcgggccgatagaatgagaggtggccgaaacaagttcggccctatgtacaagagggaccgggccttaaagcagcagaaaaaagcccagattcgcgcaaacggctttaagctggagaccggcccccccatgggcgtgcctcctcccccaccacccgcccctgactatgttctcccaccaagccttcacggacctgagcccaagggactggccgctggcccccccgcaggccctctgggcgattttggggcacctgctttaccaatggccgttccaggtgctcatgggcccctggccggctacctgtaccccgcatttcctggtcgagcgattaaatctgaatatcccgaaccctacgcctccccacctcagcctggcctgccctatggttaccctgagcccttttcaggagggcccaatgtccctgagctcatccttcagctattgcaactggaacccgacgaggatcaagtgcgggcacgaatcctcggctgtctgcaggaacctacaaaatcaagaccagaccagccagcagccttcgggttgctctgccgcatggcagatcagacttttatcagcatagtggactgggctaggagatgtatggtttttaaagagctagaggtggcagaccagatgaccctgcttcagaattgctggtccgagttactggtgtttgaccatatctaccgccaggtccagcatggaaaagagggatcgatactgcttgttactggccaggaggtggagctgactacagtggcaacgcaggccgggagcctgctgcattccctggtgttaagagcccaagaactggtgttacaactcctcgccttgcagctggatagacaggagttcgtctgcctgaaattcattatactctttagcctcgacctgaagttcctgaacaaccatattctggtgaaagacgctcaggaaaaggccaacgcagctctgctcgattatacattgtgtcactacccccactgcggcgacaagttccagcaacttctcttgtgtctggtggaggtcagggcgctgtcgatgcaggccaaagagtacctctatcataaacacttgggcaacgagatgcctcggaataacctgctcatcgaaatgctgcaggccaaacaaacatag

SEQ ID NO: 151413 - DNA, 1386 bp, Artificial Sequence
  derived and/or modified sequence
atggactacagctatgatgaggacctggatgagctgtgccctgtgtgtggggacaaggtgtctggctaccactacggcctgctgacctgtgagagctgcaagggcttcttcaagaggacagtgcagaacaacaagcactacacctgcacagagagccagagctgcaagattgacaagacccagaggaagcgctgccccttctgccgcttccagaagtgcctgactgtgggcatgaggctggaggccgtgcgggctgacaggatgaggggcggcaggaacaagtttggccccatgtacaagagggaccgggccctgaagcagcagaagaaggcccagatccgggccaacggcttcaagctggagaccggcccccccatgggcgtgcccccacctcctcctccagccccagactatgtgctgccccccagcctgcacggccctgagcccaagggcctggccgccggccccccagctggccccctgggggactttggagccccagccctgcccatggctgtgcctggggcccacggccccctggccggctacctgtacccagccttccctggccgggccatcaagtctgagtacccagagccctatgccagccccccccagcccggcctgccctacggctacccagagcccttcagcggcggccccaacgtgcctgagctgatcctgcagctgctgcagctggagccagatgaggaccaggtgcgggcccgcatcctgggctgcctgcaggagcccaccaagagcaggccagaccagcctgctgccttcggcctgctgtgcaggatggctgaccagaccttcatcagcatcgtggactgggcccggcgctgcatggtgttcaaggagctggaggtggccgaccagatgaccctgctgcagaactgctggagcgagctgctggtgtttgaccacatctaccggcaggtgcagcacggcaaggagggcagcatcctgctggtgacaggccaggaggtggagctgaccaccgtggccacccaggccggcagcctgctgcacagcctggtgctgcgggcccaggagctggtgctgcagctgctggccctgcagctggaccggcaggagtttgtgtgcctgaagttcatcatcctcttcagcctggacctgaagttcctgaacaaccacatcctggtgaaggatgcccaggagaaggccaatgctgccctgctggactacaccctgtgccactacccccactgtggggacaagttccagcagctgctgctgtgcctggtggaggtgcgggccctgtccatgcaggccaaggagtacctgtaccacaagcacctgggcaatgagatgcccaggaacaacctgctgattgagatgctgcaggccaagcagacctag

SEQ ID NO: 151414 - DNA, 1386 bp, Artificial Sequence
  derived and/or modified sequence
atggactacagctacgacgaggacctggacgagctgtgccccgtgtgcggagataaagtgagcgggtatcactacggactactgacctgtgaatcgtgcaaaggcttcttcaagagaaccgtccagaataacaagcactacacctgcactgagtctcagtcctgcaagatcgataaaactcagaggaaaagatgccctttttgtagattccagaagtgtttaacggtgggaatgaggttggaagcagtcagagctgaccggatgaggggtggaaggaacaaatttggcccgatgtacaagcgcgaccgtgctttaaaacagcaaaagaaagctcagatccgggccaatggatttaaattggaaacaggtcccccaatgggcgtgccccccccccccccccccgctcctgattacgtcctcccaccctcactgcatggtcctgagccaaaggggctcgcagctggaccccctgccggaccactcggagattttggcgcccccgcgctacccatggccgtgccaggtgctcacggtcctctggcgggctatctctatcctgctttcccgggccgcgccataaagagcgaataccccgagccttatgccagccccccacagccaggcttgccctacggttatcctgaaccattttcaggaggccccaatgtgcccgagttgattcttcaattgctccagctcgaacctgacgaagatcaggtgcgcgcacgcatactcggctgtttgcaggagcccacaaagagccgccccgatcaaccggctgcgttcggcttgctgtgccgcatggccgatcagactttcatcagcatcgtggactgggccagaagatgcatggtgttcaaggaattggaagtggctgaccagatgacccttctgcagaactgctggagtgaactgttggtattcgaccatatttaccgacaggtgcagcatggcaaggagggatccatacttctggtgacaggccaggaggtagagctaacaacagtggcaacgcaggctgggagtttgttacactccctggtgcttcgagcccaagagctagttctgcagctcctcgctctccagctggacaggcaggaatttgtatgcctaaagttcatcattctgttcagtctggatttaaagtttctgaacaaccacatcctggtgaaagacgcccaggaaaaggccaacgccgccctgttggattacaccctgtgtcactatccccattgtggagataagtttcaacaacttcttctgtgtctcgttgaggtgcgggctttgtccatgcaggccaaagagtacctctaccataaacatctcggcaacgaaatgccaagaaacaacctgctgatagaaatgctacaagccaaacagacctag

SEQ ID NO: 151415 - DNA, 3104 bp, Artificial Sequence
  derived and/or modified sequence
gggaggaggaggaggacggacggacagggccagcctgctgtccggctgccgcccgccgtggtgtgagggggtttctgcgcacccacagtcgccaccgtcccacctgggctgccggagcctccccctggacccctggtgcccactgccaccctcatccggtgtgagagcgctgcttccgcttcgcggacgccgcgggcatggactattcgtacgacgaggacctggacgagctgtgccccgtgtgcggggacaaggtgtccggctaccactacggactgctcacgtgtgagagctgcaagggcttcttcaagcgcacggtgcagaacaacaagcactacacgtgcaccgagagccagagctgcaagatcgacaagacgcagcgcaagcgctgtcccttctgccgcttccagaaatgcctgacggtggggatgcgcctggaagccgtgcgcgctgaccgtatgaggggtggccggaacaagtttgggccgatgtacaagcgggaccgggccctgaaacagcagaagaaggcacagattcgggccaatggcttcaagctggagacagggcccccgatgggggtgcccccgccgccccctcccgcaccggactacgtgctgcctcccagcctgcatgggcctgagcccaagggcctggccgccggtccacctgctgggccactgggcgactttggggccccagcactgcccatggccgtgcccggtgcccacgggccactggctggctacctctaccctgcctttcctggccgtgccatcaagtctgagtacccggagccttatgccagccccccacagcctgggctgccgtacggctacccagagcccttctctggagggcccaacgtgcctgagctcatcctgcagctgctgcagctggagccggatgaggaccaggtgcgggcccgcatcttgggctgcctgcaggagcccaccaaaagccgccccgaccagccggcggccttcggcctcctgtgcagaatggccgaccagaccttcatctccatcgtggactgggcacgcaggtgcatggtcttcaaggagctggaggtggccgaccagatgacgctgctgcagaactgctggagcgagctgctggtgttcgaccacatctaccgccaggtccagcacggcaaggagggcagcatcctgctggtcaccgggcaggaggtggagctgaccacagtggccacccaggcgggctcgctgctgcacagcctggtgttgcgggcgcaggagctggtgctgcagctgcttgcgctgcagctggaccggcaggagtttgtctgcctcaagttcatcatcctcttcagcctggatttgaagttcctgaataaccacatcctggtgaaagacgctcaggagaaggccaacgccgccctgcttgactacaccctgtgccactacccgcactgcggggacaaattccagcagctgctgctgtgcctggtggaggtgcgggccctgagcatgcaggccaaggagtacctgtaccacaagcacctgggcaacgagatgccccgcaacaacctgctcatcgaaatgctgcaagccaagcagacttgagcctgggccgggggcggggccgggactgggggcgggactgggggcggggcctgggcggggccgcagccacaccgctggctccgcatggttcattttctgatgcccaccgaggagccccagccccgtcccagaggccgctgcccctgagttctgacactgtgtgtttgggaaggtgggtgaggctgggcagggcctggcggaggtggagtggccactggcacttgcctgctgcttggagtgccccaaggaggtggctgttaaccacccgccccgccccctccctgctcccagctctctctcctggagtctgaagcctgcaggtccggggaggaggttcgggattccctggtgggcctcgacgtcccttggatcagaggtcatcccttcctcctctcctggaaacagacagggagaagttgagcaggtatcaactaggggaggagagagggtctccagtgttccccccatagagaccaggagggagagcctctgttttgtaaactaaggataaccgagtttgctaaattgagaggggctattgggccctagaggacactaggagactggttaggacaaaaagaccttctccctagcccttctaccccacctgacctctgcaagagggggcattgatacatcatcgggaaaaaactttgctccaggcatcactgattccctctcccacccaaggagaacgtttggtacaatcgacatcctagccccacccagaggtggccctcccaggctggtatttatctgcaaggttgtagtcaagaggtttttctccccgctttttgtttttaagcttctagacactccttgaaatgtgtgtgtgatggagggaaggggacagatttgaggactgaagctggggcttggggattgccactaagtacagctgacggtttctccccggacactcgcctactaagtacccttggggtggtgctgggtcattacttctgagccccagccccaatccagagaagcgctgttgcccgccctccacccactaggtgaacagcaggatgccctgttgggggcttcaggtctctgtgggtgggaatgcaagtgaacttgggagggggcacgggcctgtagatcagggatagcgctgttgatcccctctctgtggctccaacccgttgggtcccttgctgcaaacccatgaagctggccctcagctccctgaccccctgtcctaggtcatgaaggacactctgcagggtgaagcaccagggagaggcctcggctgtctcctgtccccggcggggtgcctgctgtccgtcccgctttcatgttactgttgcagcttgtgctgagcctgcccagttggaggagactgggcacccctgcctcctgcctcccgcctcccgccaccctgtctcagtacctcccctccccgccccctgaaacatgtgcccctgccaaggccggagacccacagccctgaaacgagaagtgcccttaaggatcaccccagcccccacagccctggaataaatttcgcaattagtttcc

SEQ ID NO: 151416 - DNA, 1386 bp, Artificial Sequence
  derived and/or modified sequence
atggactactcttacgatgaggatcttgacgagctatgtccggtttgcggggacaaagtgtcgggctaccattacggactgttgacgtgcgagagttgcaaggggttcttcaagcgcacggtgcaaaataacaaacactacacctgtaccgaatctcagagctgtaaaattgataagacccagaggaagcgctgtccattttgtagattccagaagtgtttgacagtgggaatgcgccttgaagctgtccgcgcagaccgcatgcggggagggagaaacaagtttggacctatgtataagagggacagggcccttaaacagcaaaaaaaggcacagattcgggctaacgggtttaagcttgagactggacctcccatgggagtcccgcctcccccaccacctgccccagactacgtgctgcccccttccctgcatggtccagagccaaagggactggccgcaggaccgcctgcaggtcccttgggggatttcggagcccctgccctgcccatggctgttccaggcgctcatgggcctctggcagggtacctttatcccgcttttccgggtagagccatcaagtctgaatacccagaaccatatgcttctccccctcagcctggactaccttacggatatccagaacctttctccggcggtcctaacgtgcctgaacttattctgcagctgctgcagctcgagcccgacgaagaccaggtgagggcccgaatactgggatgtttgcaagaacctacaaagtccaggcctgaccaaccggcagcttttggcctgctatgtaggatggcagatcagacctttatcagtatcgtggattgggctaggaggtgcatggtgttcaaggaactcgaggttgctgaccaaatgacccttctccagaactgctggtccgagctcctggtctttgatcacatctacagacaggttcagcacggaaaggagggatctatcttgctcgtgactgggcaggaagttgaacttactacggttgccacccaggccggttctttgctgcacagcctcgttctgagagcgcaggagctcgtcctgcaacttctggcccttcagttggaccgacaagaattcgtttgtctgaaattcatcattctctttagtctcgacctgaagtttctgaataatcacatcttggtgaaagacgcacaagaaaaggccaacgccgcactgctcgactatacactctgccactatccacattgcggagataagttccagcagctcctcctgtgcttagtggaggtgagagcgctgtctatgcaagctaaggagtacctgtaccataaacatttgggcaatgaaatgcctaggaacaatttactcatcgaaatgctgcaggctaagcagacttag

SEQ ID NO: 151417 - DNA, 1386 bp, Artificial Sequence
  derived and/or modified sequence
atggactacagctacgacgaggacctggacgagctgtgccccgtgtgcggcgacaaggtgagcggctaccactacggcctgctgacctgcgagagctgcaagggcttcttcaagagaaccgtgcagaacaacaagcactacacctgcaccgagagccagagctgcaagatcgacaagacccagagaaagagatgccccttctgcagattccagaagtgcctgaccgtgggcatgagactggaggccgtgagagccgacagaatgagaggcggcagaaacaagttcggccccatgtacaagagagacagagccctgaagcagcagaagaaggcccagatcagagccaacggcttcaagctggagaccggcccccccatgggcgtgccccccccccccccccccgcccccgactacgtgctgccccccagcctgcacggccccgagcccaagggcctggccgccggcccccccgccggccccctgggcgacttcggcgcccccgccctgcccatggccgtgcccggcgcccacggccccctggccggctacctgtaccccgccttccccggcagagccatcaagagcgagtaccccgagccctacgccagccccccccagcccggcctgccctacggctaccccgagcccttcagcggcggccccaacgtgcccgagctgatcctgcagctgctgcagctggagcccgacgaggaccaggtgagagccagaatcctgggctgcctgcaggagcccaccaagagcagacccgaccagcccgccgccttcggcctgctgtgcagaatggccgaccagaccttcatcagcatcgtggactgggccagaagatgcatggtgttcaaggagctggaggtggccgaccagatgaccctgctgcagaactgctggagcgagctgctggtgttcgaccacatctacagacaggtgcagcacggcaaggagggcagcatcctgctggtgaccggccaggaggtggagctgaccaccgtggccacccaggccggcagcctgctgcacagcctggtgctgagagcccaggagctggtgctgcagctgctggccctgcagctggacagacaggagttcgtgtgcctgaagttcatcatcctgttcagcctggacctgaagttcctgaacaaccacatcctggtgaaggacgcccaggagaaggccaacgccgccctgctggactacaccctgtgccactacccccactgcggcgacaagttccagcagctgctgctgtgcctggtggaggtgagagccctgagcatgcaggccaaggagtacctgtaccacaagcacctgggcaacgagatgcccagaaacaacctgctgatcgagatgctgcaggccaagcagacctag

SEQ ID NO: 151418 - protein, 526 aa, Artificial Sequence
  derived and/or modified sequence
MASNDYTQQATQSYGAYPTQPGQGYSQQSSQPYGQQSYSGYSQSTDTSGYGQSSYSSYGQSQNTGYGTQSTPQGYGSTGGYGSSQSSQSSYGQQSSYPGYGQQPAPSSTSGSYGSSSQSSSYGQPQSGSYSQQPSYGGQQQSYGQQQSYNPPQGYGQQNQYNSSSGGGGGGGGGGNYGQDQSSMSSGGGSGGGYGNQDQSGGGGSGGYGQQDRGGRGRGGSGGGGGGGGGGYNRSSGGYEPRGRGGGRGGRGGMGGSDRGGFNKFGGPRDQGSRHDSEQDNSDNNTIFVQGLGENVTIESVADYFKQIGIIKTNKKTGQPMINLYTDRETGKLKGEATVSFDDPPSAKAAIDWFDGKEFSGNPIKVSFATRRADFNRGGGNGRGGRGRGGPMGRGGYGGGGSGGGGRGGFPSGGGGGGGQQRAGDWKCPNPTCENMNFSWRNECNQCKAPKPDGPGGGPGGSHMGGNYGDDRRGGRGGYDRGGYRGRGGDRGGFRGGRGGGDRGGFGPGKMDSRGEHRQDRRERPY

SEQ ID NO: 151419 - protein, 506 aa, Artificial Sequence
  derived and/or modified sequence
MLSKVLPVLLGILLILQSRVEGPQTESKNEASSRDVVYGPQPQPLENQLLSEETKSTETETGSRVGKLPEASRILNTILSNYDHKLRPGIGEKPTVVTVEISVNSLGPLSILDMEYTIDIIFSQTWYDERLCYNDTFESLVLNGNVVSQLWIPDTFFRNSKRTHEHEITMPNQMVRIYKDGKVLYTIRMTIDAGCSLHMLRFPMDSHSCPLSFSSFSYPENEMIYKWENFKLEINEKNSWKLFQFDFTGVSNKTEIITTPVGDFMVMTIFFNVSRRFGYVAFQNYVPSSVTTMLSWVSFWIKTESAPARTSLGITSVLTMTTLGTFSRKNFPRVSYITALDFYIAICFVFCFCALLEFAVLNFLIYNQTKAHASPKLRHPRINSRAHARTRARSRACARQHQEAFVCQIVTTEGSDGEERPSCSAQQPPSPGSPEGPRSLCSKLACCEWCKRFKKYFCMVPDCEGSTWQQGRLCIHVYRLDNYSRVVFPVTFFFFNVLYWLVCLNL

SEQ ID NO: 151420 - DNA, 1521 bp, Artificial Sequence
  derived and/or modified sequence
atgctgtccaaggttctgcctgtgttgctggggatcttactcatcctgcagtcgcgcgtggaagggccacagacggaatcgaaaaacgaggcgtccagcagggatgtggtctacggcccacaaccgcagcccctggagaaccagttactgtccgaggagacaaagagtactgaaacagagactggctctcgggtgggtaaactgcccgaggcatctcggatcctgaataccatcctgtctaactatgaccacaagctccggcccggcattggagagaaaccaacggtggtaacagtcgagattagcgtaaatagcctgggaccactcagcatcctcgatatggagtatacgatcgacattatcttttcacaaacgtggtatgacgagcgactatgctacaacgatacttttgagtccctagtcctgaatggaaacgtggtttcacagctttggattccggatacctttttcaggaatagcaagcgtactcacgaacacgagattaccatgccgaaccaaatggtgagaatttacaaagatggtaaagtcctgtacactatcagaatgactatcgatgctggctgtagcctgcatatgctgaggtttccgatggactcccacagctgtcctctgtcattctcgagcttcagctaccctgaaaacgaaatgatttacaaatgggaaaacttcaaactggagattaatgaaaagaactcttggaagctgtttcagtttgatttcactggtgtatctaacaaaacagagattatcacgacaccagttggggatttcatggtaatgaccattttttttaatgtgtccaggaggttcgggtatgttgctttccaaaactacgtgccttctagcgtgaccacaatgctgtcatgggtaagtttctggataaagactgagagcgcccccgcaagaaccagcttgggcattaccagcgtcctgacaatgacaacacttggaacgttcagccgtaaaaatttcccccgagtatcatatataacagctttagacttttacattgccatctgctttgtgttctgcttctgtgctctcttggaatttgccgtgctgaatttcctgatctacaaccagaccaaggcccacgcaagtcctaaattaaggcacccaaggataaacagtagggctcatgcaagaacccgggctaggtctcgtgcctgtgctcgtcagcaccaagaagccttcgtatgccagatcgttacgaccgagggaagcgatggcgaagagcggccgtcttgttctgcgcagcaacccccaagcccggggagcccagagggcccacgcagcctctgctccaagctggcatgttgtgaatggtgtaaacgctttaagaaatatttctgcatggtgcccgactgtgagggaagcacctggcagcaggggaggctctgcatccacgtttatcgacttgataattattctcgagtagtattcccagtgacctttttctttttcaacgtcctgtactggctggtgtgcctaaatctgtag

SEQ ID NO: 151421 - DNA, 3152 bp, Artificial Sequence
  derived and/or modified sequence
gccagagcgtgagccgcgacctccgcgcaggtggtcgcgccggtctccgcggaaatgttgtccaaagttcttccagtcctcctaggcatcttattgatcctccagtcgagggtcgagggacctcagactgaatcaaagaatgaagcctcttcccgtgatgttgtctatggcccccagccccagcctctggaaaatcagctcctctctgaggaaacaaagtcaactgagactgagactgggagcagagttggcaaactgccagaagcctctcgcatcctgaacactatcctgagtaattatgaccacaaactgcgccctggcattggagagaagcccactgtggtcactgttgagatctccgtcaacagccttggtcctctctctatcctagacatggaatacaccattgacatcatcttctcccagacctggtacgacgaacgcctctgttacaacgacacctttgagtctcttgttctgaatggcaatgtggtgagccagctatggatcccggacaccttttttaggaattctaagaggacccacgagcatgagatcaccatgcccaaccagatggtccgcatctacaaggatggcaaggtgttgtacacaattaggatgaccattgatgccggatgctcactccacatgctcagatttccaatggattctcactcttgccctctatctttctctagcttttcctatcctgagaatgagatgatctacaagtgggaaaatttcaagcttgaaatcaatgagaagaactcctggaagctcttccagtttgattttacaggagtgagcaacaaaactgaaataatcacaaccccagttggtgacttcatggtcatgacgattttcttcaatgtgagcaggcggtttggctatgttgcctttcaaaactatgtcccttcttccgtgaccacgatgctctcctgggtttccttttggatcaagacagagtctgctccagcccggacctctctagggatcacctctgttctgaccatgaccacgttgggcaccttttctcgtaagaatttcccgcgtgtctcctatatcacagccttggatttctatatcgccatctgcttcgtcttctgcttctgcgctctgttggagtttgctgtgctcaacttcctgatctacaaccagacaaaagcccatgcttctcctaaactccgccatcctcgtatcaatagccgtgcccatgcccgtacccgtgcacgttcccgagcctgtgcccgccaacatcaggaagcttttgtgtgccagattgtcaccactgagggaagtgatggagaggagcgcccgtcttgctcagcccagcagccccctagcccaggtagccctgagggtccccgcagcctctgctccaagctggcctgctgtgagtggtgcaagcgttttaagaagtacttctgcatggtccccgattgtgagggcagtacctggcagcagggccgcctctgcatccatgtctaccgcctggataactactcgagagttgttttcccagtgactttcttcttcttcaatgtgctctactggcttgtttgccttaacttgtaggtaccagctggtaccctgtggggcaacctctccagttccccaggaggtccaagccccttgccaagggagttgggggaaagcagcagcagcagcaggagcgactagagtttttcctgccccattccccaaacagaagcttgcagagggtttgtctttgctgcccctctcccctacctggcccattcactgagtcttctcagcagaccatttcaaattattaataaatgggccacctccctcttcttcaaggagcatccgtgatgctcagtgttcaaaaccacagccacttagtgatcagctccctaaaaccatgcctaagtacaggcggattagctatcttccaacaatgctgaccaccagacaattactgcatttttccagaagcccactattgcctttgtagtgctttcggcccagttctggcctcagcctcaaagtgcaccgactagttgcttgcctatacctggcacctcattaagatgctgggcagcagtataacaggaggaagagatccctctcctttggtcagattattatgttctcagttctctctccctgctacccctttctctgcagatagatagacactggcattatccctttaggaagaggggggggcagcaagagagcctatttgggacagcattcctctctctctgctgctgtgacatctccctctccttgctggctccatctttcgtctgcactaccaattcaatgcccttcatccaatgggtatctatttttgtgtgtgattatagtaactactccctgctttatatgccaccctcttccttctctttgacccctgtgactctttctgtaactttcccagtgacttcccctagccctgacccaggcactaggccttggtgacttcctggggccaagaaactaaggaaactcggctttgcaacaggcattactcgccattgattggtgcccacccagggcacactgtcggagttctatcacttgcttgacccctggacccataaaccagtccactgttatacccggggcactctaaccatcacaatcaatcaatcaaattcccttaaatttgtatggcactggaactttggcaaagcacttttgacaagttgtgtctgattggagcttcatgatagccttgtgacatctttagggcaggattcttatccccattttgcagatgaaaaccctgagtcacagatttctgtgggactgtggatctcactggaagctatccaagagcccactgtcaccttctagaccacatgatagggctagacagctcagttcaccatgattctcttctgtcacctctgctggcacaccagtggcaaggcccagaatggcgacctctctttagctcaatttctgggcctgaggtgctcagactgcccccaagatcaaatctctcctggctgtagtaacccagtggaatgaatttggacatgccccaatgcttctatatgctaagtgaaatctgtgtctgtaatttgttggggggtggatagggtggggtctccatctactttttgtcaccatcatctgaaatggggaaatatgtaaataaatatatcagcaaagca

SEQ ID NO: 151422 - DNA, 1521 bp, Artificial Sequence
  derived and/or modified sequence
atgctgagcaaggtgctgcctgtgctgctgggcatcctgctgatcctgcagagccgggtggagggcccccagacagagagcaagaatgaggccagcagcagagatgtggtgtatggcccccagccccagcccctggagaaccagctgctgtctgaggagaccaagagcacagaaacagaaacaggcagccgggtgggcaagctgcctgaggccagccgcatcctgaacaccatcctgagcaactatgaccacaagctgcggcccggcatcggggagaagcccaccgtggtgacagtggagatctctgtgaacagcctgggccccctgagcatcctggacatggagtacaccatcgacatcatcttcagccagacctggtatgatgagcggctgtgctacaatgacacctttgagagcctggtgctgaatggaaatgtggtgtcccagctgtggatcccagacaccttcttcaggaacagcaagaggacccatgagcacgagatcaccatgcccaaccagatggtgcgcatctacaaggatggcaaggtgctgtacaccatccgcatgaccattgatgctggctgcagcctgcacatgctgcgcttccccatggacagccacagctgccccctgtccttcagcagcttctcctacccagaaaatgagatgatctacaagtgggagaacttcaagctggagatcaatgagaagaacagctggaagctgttccagtttgacttcaccggggtgagcaacaagacagagatcatcaccacccctgtgggggacttcatggtgatgaccatcttcttcaacgtgtccagaagatttggctacgtggccttccagaactacgtgcccagctctgtgaccaccatgctgtcctgggtgtccttctggatcaagacagaaagtgccccagcccggaccagcctgggcatcacctctgtgctgaccatgaccaccctgggcaccttcagcaggaagaacttcccccgggtgtcctacatcacagccctggacttctacatcgccatctgctttgtgttctgcttctgtgccctgctggagtttgctgtgctgaacttcctgatctacaaccagaccaaggcccacgccagccccaagctgcggcacccccgcatcaacagccgggcccacgcccggacccgggcccggagccgggcctgtgcccggcagcaccaggaggcctttgtgtgccagatcgtgaccacagagggcagtgatggagaggagcggcccagctgcagcgcccagcagccccccagccctggcagccctgagggccccaggagcctgtgcagcaagctggcctgctgtgagtggtgcaagcgcttcaagaagtacttctgcatggtgcctgactgtgagggcagcacctggcagcagggccgcctgtgcatccacgtgtaccgcctggacaactacagccgggtggtgtttcctgtgaccttcttcttcttcaacgtgctgtactggctggtgtgcctgaacctgtag

SEQ ID NO: 151423 - DNA, 1521 bp, Artificial Sequence
  derived and/or modified sequence
atgctgagcaaggtgctgcccgtgctgctgggcatcctgctgatcttgcagtctagagttgaaggcccgcagaccgagtcaaagaatgaagcatcgtcacgggacgtggtctatggccctcaaccacagcctctggaaaaccagctcctgtctgaggaaacgaagtcgactgaaaccgaaactggatccagagtgggaaagctgcctgaggcttctagaattctgaacaccatcttgagtaactatgatcacaagcttaggccaggaattggtgagaaaccaacagtggtgaccgtggaaatatccgttaattccctagggccactctctatcctggatatggagtacaccattgacatcattttctcacagacctggtacgatgagcgtttgtgttataatgatacctttgagagcctggtgcttaacggaaatgtcgtgtcccaactgtggattcctgacacctttttccgtaattctaaacggactcatgaacatgaaataactatgcctaaccagatggtcaggatctataaggacgggaaggtactctacacaataagaatgactatcgatgcagggtgctccctgcacatgcttagattcccaatggattctcattcctgtccgctttccttctcaagcttctcgtaccccgagaatgagatgatatataagtgggaaaattttaagttggaaataaacgaaaaaaacagctggaagctgtttcagttcgatttcacgggcgtttccaacaagacagagattattaccacgcccgtcggggatttcatggtaatgacaatcttcttcaatgtgtcccgcagatttggatatgtagctttccagaattacgtaccttctagtgtgactactatgctctcctgggtgtctttctggatcaaaaccgagagtgcccctgctcggacctccttaggtattacatcagttctcacgatgacgacattgggcaccttctctaggaagaacttcccgcgggtgtcttacattaccgcactcgatttctacatagctatttgtttcgttttttgcttttgcgcactgctagagtttgcagtgctgaattttctgatctacaaccaaacaaaggcccacgcttcccctaagttgagacaccctcgtattaattccagagcacatgcgcgtacacgcgccagatcccgtgcgtgtgccaggcagcaccaggaggcgttcgtgtgccagatcgttacaacagaaggcagcgacggggaagagcgtcctagctgctcggcgcagcaaccaccatctcccggaagccctgaggggcccagatctttatgctctaaactggcatgttgcgaatggtgtaaaaggttcaagaagtatttctgtatggtgcctgattgcgaaggttctacttggcagcaggggaggctgtgtatacacgtctaccgactcgacaactattcgcgcgtggttttcccagtcacgttctttttcttcaacgttctctactggctagtgtgcctgaatctgtag

SEQ ID NO: 151424 - DNA, 1521 bp, Artificial Sequence
  derived and/or modified sequence
atgctgtccaaagtgctgccagtgttgctgggcatcttgctgattctgcaaagtcgtgtggagggcccacagacggaaagcaagaatgaggcatctagccgcgatgtagtttacggccctcagccacagccgctggaaaaccagttgctgtctgaggagacaaaaagtactgaaacggagactggctccagagtcggcaagctcccagaggcgtctcgcattttgaatacgatactgagtaattacgaccacaagctaaggcccggaatcggagagaagccgactgtcgttaccgttgagatttctgtaaattctctcggaccactgtccatcctggacatggaatatacaattgatatcatcttctcccagacatggtacgatgaacggttgtgttataacgacacctttgagtcccttgtgctaaatggaaacgtggtcagccagttgtggataccagacacctttttcaggaactctaagcgaactcacgagcatgagataacgatgcccaaccagatggttcgaatctacaaagacggcaaagtcctttacaccattaggatgactatcgatgccggttgttccctgcacatgctaagatttccgatggactctcattcatgccctctgtcattcagttcctttagctaccctgagaacgagatgatatataagtgggaaaattttaagttggagataaacgagaagaacagctggaaattgttccagttcgacttcacgggcgttagcaacaaaactgagatcatcaccacccctgtaggcgacttcatggtcatgacaatattcttcaacgtgtcccggcgattcggttacgttgcctttcaaaactatgtaccatcatctgtgaccaccatgctatcttgggtcagtttctggattaagactgagagcgcacccgctcggacgagcctaggaatcacttccgtcttgacaatgacgacactgggaacattttctagaaagaacttccccagggtgtcatatatcacggccctggacttttacatcgccatctgttttgtcttctgcttctgcgcccttctcgagttcgccgtgctaaactttctgatctacaatcagaccaaggcgcatgcttcgccaaagcttcgccatccgcgaattaactcaagagctcacgccagaacaagggccaggtcaagagcatgcgctcggcagcaccaggaagcatttgtttgtcagatcgtgactaccgaggggtctgacggcgaagagcgaccgagctgttccgctcagcagccaccctctccgggatcccccgagggaccacgatccctctgctcaaaacttgcctgttgtgagtggtgcaaaaggttcaaaaagtacttttgtatggtgccagactgtgaagggtccacatggcaacagggcaggttatgtatccatgtgtatcgcctcgataattacagccgagtcgtttttccagtcactttttttttctttaacgtgctgtattggttggtctgcttaaacctttag

SEQ ID NO: 151425 - DNA, 1521 bp, Artificial Sequence
  derived and/or modified sequence
atgctgagcaaggtgctgcccgtgctgctgggcatcctgctgatcctgcagagcagagtggagggcccccagaccgagagcaagaacgaggccagcagcagagacgtggtgtacggcccccagccccagcccctggagaaccagctgctgagcgaggagaccaagagcaccgagaccgagaccggcagcagagtgggcaagctgcccgaggccagcagaatcctgaacaccatcctgagcaactacgaccacaagctgagacccggcatcggcgagaagcccaccgtggtgaccgtggagatcagcgtgaacagcctgggccccctgagcatcctggacatggagtacaccatcgacatcatcttcagccagacctggtacgacgagagactgtgctacaacgacaccttcgagagcctggtgctgaacggcaacgtggtgagccagctgtggatccccgacaccttcttcagaaacagcaagagaacccacgagcacgagatcaccatgcccaaccagatggtgagaatctacaaggacggcaaggtgctgtacaccatcagaatgaccatcgacgccggctgcagcctgcacatgctgagattccccatggacagccacagctgccccctgagcttcagcagcttcagctaccccgagaacgagatgatctacaagtgggagaacttcaagctggagatcaacgagaagaacagctggaagctgttccagttcgacttcaccggcgtgagcaacaagaccgagatcatcaccacccccgtgggcgacttcatggtgatgaccatcttcttcaacgtgagcagaagattcggctacgtggccttccagaactacgtgcccagcagcgtgaccaccatgctgagctgggtgagcttctggatcaagaccgagagcgcccccgccagaaccagcctgggcatcaccagcgtgctgaccatgaccaccctgggcaccttcagcagaaagaacttccccagagtgagctacatcaccgccctggacttctacatcgccatctgcttcgtgttctgcttctgcgccctgctggagttcgccgtgctgaacttcctgatctacaaccagaccaaggcccacgccagccccaagctgagacaccccagaatcaacagcagagcccacgccagaaccagagccagaagcagagcctgcgccagacagcaccaggaggccttcgtgtgccagatcgtgaccaccgagggcagcgacggcgaggagagacccagctgcagcgcccagcagccccccagccccggcagccccgagggccccagaagcctgtgcagcaagctggcctgctgcgagtggtgcaagagattcaagaagtacttctgcatggtgcccgactgcgagggcagcacctggcagcagggcagactgtgcatccacgtgtacagactggacaactacagcagagtggtgttccccgtgaccttcttcttcttcaacgtgctgtactggctggtgtgcctgaacctgtag

SEQ ID NO: 151426 - protein, 478 aa, Artificial Sequence
  derived and/or modified sequence
MAHVPARTSPGPGPQLLLLLLPLFLLLLRDVAGSHRAPAWSALPAAADGLQGDRDLQRHPGDAAATLGPSAQDMVAVHMHRLYEKYSRQGARPGGGNTVRSFRARLEVVDQKAVYFFNLTSMQDSEMILTATFHFYSEPPRWPRALEVLCKPRAKNASGRPLPLGPPTRQHLLFRSLSQNTATQGLLRGAMALAPPPRGLWQAKDISPIVKAARRDGELLLSAQLDSEERDPGVPRPSPYAPYILVYANDLAISEPNSVAVTLQRYDPFPAGDPEPRAAPNNSADPRVRRAAQATGPLQDNELPGLDERPPRAHAQHFHKHQLWPSPFRALKPRPGRKDRRKKGQEVFMAASQVLDFDEKTMQKARRKQWDEPRVCSRRYLKVDFADIGWNEWIISPKSFDAYYCAGACEFPMPKIVRPSNHATIQSIVRAVGIIPGIPEPCCVPDKMNSLGVLFLDENRNVVLKVYPNMSVDTCACR

SEQ ID NO: 151427 - protein, 288 aa, Artificial Sequence
  derived and/or modified sequence
MALAPPPRGLWQAKDISPIVKAARRDGELLLSAQLDSEERDPGVPRPSPYAPYILVYANDLAISEPNSVAVTLQRYDPFPAGDPEPRAAPNNSADPRVRRAAQATGPLQDNELPGLDERPPRAHAQHFHKHQLWPSPFRALKPRPGRKDRRKKGQEVFMAASQVLDFDEKTMQKARRKQWDEPRVCSRRYLKVDFADIGWNEWIISPKSFDAYYCAGACEFPMPKIVRPSNHATIQSIVRAVGIIPGIPEPCCVPDKMNSLGVLFLDENRNVVLKVYPNMSVDTCACR

SEQ ID NO: 151428 - DNA, 1437 bp, Artificial Sequence
  derived and/or modified sequence
atggcccatgtgcctgctagaacttcccccggcccaggacctcagcttctgttgctcttgctcccgctatttttactgctccttcgggacgtagccggttcccaccgagcaccggcctggagcgccctgcccgccgcagctgatggcctgcagggcgatcgagacttacagcgtcatcccggagatgcggcggccacactgggcccctctgcacaggacatggttgccgttcacatgcatcgcctatacgagaagtactcccggcaaggggcacgccccggtggcggcaacaccgtaagatctttccgagccagattagaagtcgtggaccaaaaagccgtgtacttttttaacctgacaagcatgcaggactctgaaatgatcctaacggccacatttcatttctactccgagccccccaggtggcctcgggctctcgaagtgttgtgcaagccgcgggcaaaaaatgcgtccgggcgacctctccccctgggcccacccacacgtcagcacttgctgtttcgctccctgtctcagaataccgcaacccagggattactcagaggtgcaatggcacttgcaccacctccaagagggctgtggcaggccaaggatatcagcccgatcgtgaaggctgcgcgccgcgacggcgagctgttgctgagtgcccaactcgactccgaggaaagggacccgggggtaccgagacctagcccttacgctccttatatactggtctatgcgaatgacctggcaatctcggagcccaactctgtcgctgtcaccctccagagatatgatcctttcccggcgggtgatcctgaaccgagagcggccccaaacaactccgcggaccctagagtaagacgcgccgcacaggctacaggcccacttcaggataacgagctgcctgggcttgatgagcgcccaccgcgcgcacacgcacagcacttccacaaacaccaactgtggccctcaccattccgcgctttgaagccacgaccagggcgaaaagaccgtcggaagaagggccaggaagtgtttatggctgcctcccaagtgctggacttcgacgaaaaaactatgcaaaaggcacggcgtaaacagtgggatgagccccgcgtgtgcagcagacggtacctcaaggtggactttgctgacatcggctggaacgagtggatcatctctcctaagtccttcgacgcctattactgtgctggagcatgtgagttccccatgccaaaaatcgtgcgcccatccaatcatgcaaccattcagagcattgtgcgggccgtgggtatcatccccggcattcccgagccatgctgtgtgcccgataagatgaactccttgggtgtcctgttcctagacgaaaaccgaaatgtcgtactgaaggtttaccccaacatgtctgtagatacctgcgcgtgtcgatag

SEQ ID NO: 151429 - DNA, 1437 bp, Artificial Sequence
  derived and/or modified sequence
atggcccacgtgcctgcccggaccagccctggccctggcccccagctgctgctgctgctgctgcccctcttcctgctgctgctgagagatgtggccggcagccaccgggccccagcctggagcgccctgcctgctgctgctgatggcctgcagggcgaccgggacctgcagaggcaccctggagatgctgctgccaccctgggccccagcgcccaggacatggtggccgtgcacatgcaccggctgtatgagaagtacagccggcagggcgcccggcctgggggcggcaacacagtgcgctccttccgggcccggctggaggtggtggaccagaaggctgtgtacttcttcaacctgacctccatgcaggacagcgagatgatcctgacagccaccttccacttctacagcgagcccccacgctggccccgggccctggaggtgctgtgcaagccccgggccaagaatgccagcggccggcccctgcccctgggcccccccacccggcagcacctgctcttccgcagcctgagccagaacacagccacccagggcctgctgcggggggccatggccctggcccccccaccccggggcctgtggcaggccaaggacatcagccccatcgtgaaggccgccaggagagatggagagctgctgctgagcgcccagctggacagcgaggagcgggaccccggggtgccccggcccagcccctatgccccctacatcctggtgtatgccaatgacctggccatcagcgagcccaacagcgtggccgtgaccctgcagagatatgaccccttccctgctggggaccctgagccccgggccgcccccaacaacagcgctgacccccgggtgagaagagctgcccaggccaccggccccctgcaggacaatgagctgcccggcctggatgagcggcccccccgggcccacgcccagcacttccacaagcaccagctgtggcccagccccttccgggccctgaagcccaggcctggcaggaaggacaggaggaagaagggccaggaggtgttcatggccgccagccaggtgctggactttgatgagaagaccatgcagaaggcccggaggaagcagtgggatgagccccgggtgtgcagccgccgctacctgaaggtggactttgctgacatcggctggaatgagtggatcatcagccccaagagctttgatgcctactactgtgccggggcctgtgagttccccatgcccaagatcgtgcggcccagcaaccacgccaccatccagagcatcgtgcgggctgtgggcatcatccctggcatccctgagccctgctgcgtgcctgacaagatgaacagcctgggcgtgctcttcctggatgagaacagaaatgtggtgctgaaggtgtaccccaacatgtctgtggacacctgtgcctgcaggtag

SEQ ID NO: 151430 - DNA, 1437 bp, Artificial Sequence
  derived and/or modified sequence
atggcccacgtgcccgcccggaccagccccggccccggcccccagctgctgctgcttcttcttccactcttcttgctgctgctaagggacgtggccgggagccacagagctcctgcatggagcgccctccccgccgccgcggacggactgcagggggatcgagaccttcagaggcacccgggggatgcagcggctacactgggcccgtcagcacaggatatggttgccgtccacatgcatcgattatacgaaaagtactctcgccagggggctaggcctggaggtgggaatacggtcagatccttcagggctcggctcgaggtggttgaccagaaggctgtgtacttcttcaatcttacatccatgcaggatagcgaaatgatcctgaccgcaacattccatttctacagtgagccgcctaggtggcctcgggcactggaggtgctatgtaagccccgggccaagaatgcaagtggtaggcctctgccactgggtccacccacgagacagcacctgctgtttcggtctctgtctcagaacactgcaacgcaaggactgctgagaggggcaatggcgctagcacctcctccgaggggactctggcaggcgaaggatatcagtcctatcgtcaaggctgcccggcgggatggggaacttctgctgagcgcccagctcgattctgaagagagggacccgggcgtaccgaggccaagcccctacgctccatatatattggtatacgctaatgacctcgccatcagtgagcctaacagcgttgctgtcacgctgcagcggtacgatcctttccctgcaggcgacccagaacccagggcagcccctaataactctgccgacccaagagtccgtcgagccgctcaagccactggaccactgcaggacaacgagttgcctggtctagatgaaaggcctcctagagcgcatgctcaacacttccacaaacaccagctctggccctcacccttcagagcactcaagccaagacccggtagaaaagacagaaggaaaaagggccaggaggtgtttatggccgcctctcaggtcctagattttgatgagaaaaccatgcagaaagcacgcagaaagcagtgggatgagccgcgcgtctgcagccgaagatatctgaaagtggacttcgccgacatcggttggaatgagtggatcattagtcccaagtcctttgatgcctattactgtgccggcgcttgcgagttcccaatgcccaagatagtccggccctccaatcacgcaaccattcagagcatcgtccgcgccgtggggatcatcccaggaatacctgagccgtgctgtgtgcccgataagatgaattctttgggtgtgcttttcctggacgaaaaccgaaatgtagtgctgaaggtgtatcccaacatgagcgtggacacctgcgcatgtcggtag

SEQ ID NO: 151431 - DNA, 1437 bp, Artificial Sequence
  derived and/or modified sequence
atggctcacgtgcccgcacggacttccccaggacccggaccccaattacttctgctgttactgcctttatttcttttgctcctgagggacgttgccggttcccacagggcacccgcatggtcagcacttcccgctgcggctgacggactccaaggagatagagacttacagcgccaccccggtgacgcggctgccaccctaggcccatccgcccaggacatggtcgctgtccacatgcatcgcctctatgagaagtatagccggcagggagccagacccggaggtggcaacaccgtgagatcttttcgcgctagactggaggtcgtggaccaaaaggcggtttacttctttaaccttacctcgatgcaagatagcgaaatgatcctaacggcaacatttcacttctattccgagccgcctcgctggcctcgagcactagaagtactgtgtaaacctcgcgcaaaaaacgcctcaggtcggccactgccacttggcccacccacacgccagcacctcctgttccggtccctgagtcagaacaccgccacacagggtctgctgcgcggagcgatggccctggccccacccccaagaggcctatggcaggcaaaggacatttcacccatcgtgaaagcagccaggagagacggggagctccttctgtccgcccagctagatagtgaggagcgtgaccctggggtgccaagaccctccccctacgcgccttacatacttgtctacgccaatgacctggctatctctgaacccaactccgtggcggtgacgctccagcgctatgatccattcccagccggtgatcccgaacctagggcggctccaaataacagtgccgatccgagggtgagaagagcagcccaggctactggcccactccaagataacgagcttccaggtctggacgaacgccctccgcgagcacacgcgcagcacttccacaagcaccagctgtggccatctcctttcagggccctaaagcctcggccagggcgaaaagatcgtagaaaaaaaggccaggaggtcttcatggctgcctctcaggtgctagacttcgatgagaagactatgcagaaagctaggcgaaaacagtgggacgagccaagggtgtgttcacggcgttacctcaaggtggatttcgctgacatcgggtggaatgagtggataatttcccctaagtcatttgacgcctattattgcgctggagcatgtgagtttcctatgccaaaaattgtccggccttctaaccatgcaacaatccagagcattgtccgcgctgtgggaatcatcccaggtatccccgagccctgttgtgtgcccgataagatgaactcgctgggtgtcctgttccttgacgagaatcggaatgtggtgctgaaagtgtatccgaatatgtccgtggacacttgcgcatgccgctag

SEQ ID NO: 151432 - DNA, 1437 bp, Artificial Sequence
  derived and/or modified sequence
atggctcatgtccccgcgagaacctctccaggtcctgggccccaactgctcctgctgctactccctctgtttctgctgctcttgagagacgttgccggaagccacagagctcccgcctggtcggccctgcccgcagccgccgatggccttcagggcgatagagacctgcagcgccaccccggagatgcagcggcaaccctgggaccctcagcccaagatatggttgcagtgcacatgcacagattatacgagaagtattcacgtcagggcgcccgcccagggggtgggaacaccgtaagaagttttcgcgcgcgattggaggtcgttgaccagaaggccgtctactttttcaacctcacctcgatgcaggactcagagatgatattgacagctacttttcatttttactcggaaccacctaggtggccacgcgcgctcgaagtcttgtgcaagccacgtgccaaaaacgccagcgggagacccctgccacttggaccacctactaggcagcatctgctgttcagatccctctcacagaacaccgcaacacagggcttgttgcgcggcgccatggcactggcaccgcccccaagaggcctctggcaggcaaaggacattagtcccatagtaaaggcagcaaggcgggacggcgaactcctgctgagcgcccaactggactcagaagagcgagacccgggagtccctaggcccagcccatacgcaccgtatattttagtttacgccaatgacctggctatttccgaaccaaactcagttgcagtcacgcttcagaggtatgatcccttcccggcgggtgacccagaacctagagcggcccctaacaattcagcagacccgcgggtgcggcgtgcggctcaggcaacaggtccgctgcaggacaacgaactacccggtctcgacgaaagaccacctcgggcccacgctcagcactttcacaagcaccagttatggccttcaccttttcgcgctcttaagcctcgacctgggcggaaggacagaaggaaaaagggacaggaagtgtttatggccgccagtcaggtcctggacttcgacgaaaagactatgcagaaggcaaggaggaaacagtgggatgaaccgcgcgtatgctctcggaggtaccttaaggttgactttgccgatataggctggaacgaatggatcatttctccaaaatctttcgacgcctattattgtgctggggcttgcgagttcccgatgccaaaaattgtgagaccatcgaatcatgcaacaattcagtctatagtgagagcggtcggcattatccctggcatccctgagccctgctgtgtgcctgacaagatgaactcactgggcgtgctgtttctggatgagaatagaaatgttgttctgaaagtgtacccgaacatgagcgtcgacacttgtgcatgccggtag

SEQ ID NO: 151433 - DNA, 1437 bp, Artificial Sequence
  derived and/or modified sequence
atggcacatgtgccagcacgcacaagtccaggacccggtccacagctcctgctccttttgctgccactgttcttgctgcttctgagagacgttgctggcagtcatagagcccccgcttggtcggccctcccagccgcagcagatggactgcaaggggacagagacttgcagcgacaccccggcgatgcagccgctacattgggaccctctgcacaagacatggttgctgttcatatgcatcgcctatatgagaagtactcacggcaaggcgcaagacctggtggagggaatactgtccgatcctttcgcgccagacttgaggttgtcgatcaaaaagcagtttatttctttaatctcacctcgatgcaagactctgagatgatcctcaccgccacatttcacttttacagtgaaccaccaagatggcctcgagcactcgaagtactgtgtaagccgcgggccaagaatgcatcagggcgcccgctcccactaggccccccaacacgccagcatcttctattccgtagcttgtctcaaaatacagcaacccaaggcctcctgcgaggagccatggctttggcccctcctccacgcggcctatggcaagccaaagacattagccccatcgtgaaggcagcgcggcgtgatggtgagcttctcctttccgctcagctggactccgaggaacgggacccaggagtgcccagacctagcccttatgctccgtacatactggtctatgctaacgacctcgccattagcgaacctaattccgtcgctgtcactctgcagagatatgatccttttccagctggagaccctgaacctcgggccgcacccaataatagcgctgatccaagagtacgccgggccgctcaagccactggacctctgcaggacaacgagttgcctggactcgacgagagaccacccagagcgcatgcccagcattttcataaacaccagctgtggccttccccattccgcgctttgaaaccaagacctggaagaaaagacaggcgaaaaaagggacaagaggtctttatggcagccagtcaggtccttgacttcgacgaaaaaacaatgcaaaaagctcgcagaaagcagtgggacgagccgagggtatgcagccggcgctatcttaaagtggactttgcggatattggttggaatgaatggatcattagccctaagagcttcgacgcttactactgtgccggagcctgtgaattcccaatgcccaaaatcgtgcggcctagcaaccatgccactatccaatccatcgtgcgcgccgttggtattatccccggaatcccagaaccgtgttgcgtgcccgacaagatgaatagcctcggggtcctctttctggatgagaatcgaaacgtcgtgctgaaggtatatccgaacatgagcgttgacacatgtgcctgccgctag

SEQ ID NO: 151434 - DNA, 1437 bp, Artificial Sequence
  derived and/or modified sequence
atggcccacgtgcccgccagaaccagccccggccccggcccccagctgctgctgctgctgctgcccctgttcctgctgctgctgagagacgtggccggcagccacagagcccccgcctggagcgccctgcccgccgccgccgacggcctgcagggcgacagagacctgcagagacaccccggcgacgccgccgccaccctgggccccagcgcccaggacatggtggccgtgcacatgcacagactgtacgagaagtacagcagacagggcgccagacccggcggcggcaacaccgtgagaagcttcagagccagactggaggtggtggaccagaaggccgtgtacttcttcaacctgaccagcatgcaggacagcgagatgatcctgaccgccaccttccacttctacagcgagccccccagatggcccagagccctggaggtgctgtgcaagcccagagccaagaacgccagcggcagacccctgcccctgggcccccccaccagacagcacctgctgttcagaagcctgagccagaacaccgccacccagggcctgctgagaggcgccatggccctggcccccccccccagaggcctgtggcaggccaaggacatcagccccatcgtgaaggccgccagaagagacggcgagctgctgctgagcgcccagctggacagcgaggagagagaccccggcgtgcccagacccagcccctacgccccctacatcctggtgtacgccaacgacctggccatcagcgagcccaacagcgtggccgtgaccctgcagagatacgaccccttccccgccggcgaccccgagcccagagccgcccccaacaacagcgccgaccccagagtgagaagagccgcccaggccaccggccccctgcaggacaacgagctgcccggcctggacgagagaccccccagagcccacgcccagcacttccacaagcaccagctgtggcccagccccttcagagccctgaagcccagacccggcagaaaggacagaagaaagaagggccaggaggtgttcatggccgccagccaggtgctggacttcgacgagaagaccatgcagaaggccagaagaaagcagtgggacgagcccagagtgtgcagcagaagatacctgaaggtggacttcgccgacatcggctggaacgagtggatcatcagccccaagagcttcgacgcctactactgcgccggcgcctgcgagttccccatgcccaagatcgtgagacccagcaaccacgccaccatccagagcatcgtgagagccgtgggcatcatccccggcatccccgagccctgctgcgtgcccgacaagatgaacagcctgggcgtgctgttcctggacgagaacagaaacgtggtgctgaaggtgtaccccaacatgagcgtggacacctgcgcctgcagatag

SEQ ID NO: 151435 - DNA, 2458 bp, Artificial Sequence
  derived and/or modified sequence
gccgactcgggctcggctcggctctgcgctgctccggacggctgtgaccgctggccgggggctcgggccgccggtacccacggaccgcgcgcccgggtgcctgctccgctaagcccctcgccccgcgcggacctcggtatccagcgccctgctgcccgggctctccccgcgcgccctactgccgcgaggtcagtccgcagcctccggtgcgccagcgctcgccttcctcctcctggacttcggccctttgccgccctcaccacgccatggctcatgtccccgctcggaccagcccgggacccgggccccagctgctgctgctgctgctgccgttgtttctgctgttgctccgggatgtggccggcagccacagggcccccgcctggtccgcactgcccgcggccgccgacggcctgcagggggacagggatctccagcggcaccctggggacgcggccgccacgttgggccccagcgcccaggacatggtcgctgtccacatgcacaggctctatgagaagtacagccggcagggcgcgcggccgggagggggcaacacggtccgcagcttcagggccaggctggaagtggtcgaccagaaggccgtgtatttcttcaacctgacttccatgcaagactcggaaatgatccttacggccactttccacttctactcagagccgcctcggtggcctcgagcgctcgaggtgctatgcaagccgcgggccaagaacgcttcaggccgcccgctgcccctgggcccgcccacacgccagcacctgctcttccgcagcctctcgcagaacacggccacacaggggctactccgcggggccatggccctggcgcccccaccgcgcggcctgtggcaggccaaggacatctcccccatcgtcaaggcggcccgccgggatggcgagctgctcctctccgcccagctggattctgaggagagggacccgggggtgccccggcccagcccctatgcgccctacatcctagtctatgccaacgatctggccatctcggagcccaacagcgtggcagtgacgctgcagagatacgaccccttccctgccggagaccccgagccccgcgcagcccccaacaactcagcggacccccgcgtgcgccgagccgcgcaggccactgggcccctccaggacaacgagctgccggggctggatgagaggccgccgcgcgcccacgcacagcacttccacaagcaccagctgtggcccagccccttccgggcgctgaaaccccggccagggcgcaaagaccgcaggaagaagggccaggaggtgttcatggccgcctcgcaggtgctggactttgacgagaagacgatgcagaaagcccggaggaagcagtgggatgagccgagggtgtgctcccggaggtacctgaaggtggacttcgcagacatcggctggaatgaatggataatctcaccgaaatcttttgatgcctactactgcgcgggagcatgtgagttccccatgcctaagatcgttcgtccatccaaccatgccaccatccagagcattgtcagggctgtgggcatcatccctggcatcccagagccctgctgtgttcccgataagatgaactcccttggggtcctcttcctggatgagaatcggaatgtggttctgaaggtgtaccccaacatgtccgtggacacctgtgcctgccggtgagaccactccagggtggaaagaagccacgcccagcagagctgccttctcggagccttctgcaaccaggacttgtggtgcagctgcagacacagagcacagctcatgggcaacatcactggggcccagagagagctgtccgccagtgcatcattagggggtctttcattgctagtgactagccccttaaatgccagcctgagtacctgaaggaatctgggaattagccctggcctgaaagtggcccatcattcatacccactgttctgaaggcttgaaaacaaaacatatccacaacattggcttgatgtgatcatcatctcataactgagcaagaagactatgcaaatcttagggcgctcgctccctgcacacggaaagaactctgtttaaatgctcagttcagaacactttgggccacatagtgattttggaaaacaggataatcgtggtgtaaatgagtgtttcctttcaaagtccactgcagagcttttatccatatggtatgcacatgtagccaatattggtttctttttcttaatatatatattttattttaaaacaacaaaaagggagggcgttgacaccattccccacagagatagtcatgctgagtgtgggttgtttaaacatgcatattgaaataacacatatagtaacgtgggaatactaaaaaataaccaagattttatatttttgtaaattatactttctatactgtagattgtgtatgttatgtgtttttatggaaagctaat

SEQ ID NO: 151436 - RNA, 1437 nt, Artificial Sequence
  derived and/or modified sequence
auggcucauguccccgcgagaaccucuccagguccugggccccaacugcuccugcugcuacucccucuguuucugcugcucuugagagacguugccggaagccacagagcucccgccuggucggcccugcccgcagccgccgauggccuucagggcgauagagaccugcagcgccaccccggagaugcagcggcaacccugggacccucagcccaagauaugguugcagugcacaugcacagauuauacgagaaguauucacgucagggcgcccgcccagggggugggaacaccguaagaaguuuucgcgcgcgauuggaggucguugaccagaaggccgucuacuuuuucaaccucaccucgaugcaggacucagagaugauauugacagcuacuuuucauuuuuacucggaaccaccuagguggccacgcgcgcucgaagucuugugcaagccacgugccaaaaacgccagcgggagaccccugccacuuggaccaccuacuaggcagcaucugcuguucagaucccucucacagaacaccgcaacacagggcuuguugcgcggcgccauggcacuggcaccgcccccaagaggccucuggcaggcaaaggacauuagucccauaguaaaggcagcaaggcgggacggcgaacuccugcugagcgcccaacuggacucagaagagcgagacccgggagucccuaggcccagcccauacgcaccguauauuuuaguuuacgccaaugaccuggcuauuuccgaaccaaacucaguugcagucacgcuucagagguaugaucccuucccggcgggugacccagaaccuagagcggccccuaacaauucagcagacccgcgggugcggcgugcggcucaggcaacagguccgcugcaggacaacgaacuacccggucucgacgaaagaccaccucgggcccacgcucagcacuuucacaagcaccaguuauggccuucaccuuuucgcgcucuuaagccucgaccugggcggaaggacagaaggaaaaagggacaggaaguguuuauggccgccagucagguccuggacuucgacgaaaagacuaugcagaaggcaaggaggaaacagugggaugaaccgcgcguaugcucucggagguaccuuaagguugacuuugccgauauaggcuggaacgaauggaucauuucuccaaaaucuuucgacgccuauuauugugcuggggcuugcgaguucccgaugccaaaaauugugagaccaucgaaucaugcaacaauucagucuauagugagagcggucggcauuaucccuggcaucccugagcccugcugugugccugacaagaugaacucacugggcgugcuguuucuggaugagaauagaaauguuguucugaaaguguacccgaacaugagcgucgacacuugugcaugccgguag

SEQ ID NO: 151437 - RNA, 1437 nt, Artificial Sequence
  derived and/or modified sequence
auggcacaugugccagcacgcacaaguccaggacccgguccacagcuccugcuccuuuugcugccacuguucuugcugcuucugagagacguugcuggcagucauagagcccccgcuuggucggcccucccagccgcagcagauggacugcaaggggacagagacuugcagcgacaccccggcgaugcagccgcuacauugggacccucugcacaagacaugguugcuguucauaugcaucgccuauaugagaaguacucacggcaaggcgcaagaccugguggagggaauacuguccgauccuuucgcgccagacuugagguugucgaucaaaaagcaguuuauuucuuuaaucucaccucgaugcaagacucugagaugauccucaccgccacauuucacuuuuacagugaaccaccaagauggccucgagcacucgaaguacuguguaagccgcgggccaagaaugcaucagggcgcccgcucccacuaggccccccaacacgccagcaucuucuauuccguagcuugucucaaaauacagcaacccaaggccuccugcgaggagccauggcuuuggccccuccuccacgcggccuauggcaagccaaagacauuagccccaucgugaaggcagcgcggcgugauggugagcuucuccuuuccgcucagcuggacuccgaggaacgggacccaggagugcccagaccuagcccuuaugcuccguacauacuggucuaugcuaacgaccucgccauuagcgaaccuaauuccgucgcugucacucugcagagauaugauccuuuuccagcuggagacccugaaccucgggccgcacccaauaauagcgcugauccaagaguacgccgggccgcucaagccacuggaccucugcaggacaacgaguugccuggacucgacgagagaccacccagagcgcaugcccagcauuuucauaaacaccagcuguggccuuccccauuccgcgcuuugaaaccaagaccuggaagaaaagacaggcgaaaaaagggacaagaggucuuuauggcagccagucagguccuugacuucgacgaaaaaacaaugcaaaaagcucgcagaaagcagugggacgagccgaggguaugcagccggcgcuaucuuaaaguggacuuugcggauauugguuggaaugaauggaucauuagcccuaagagcuucgacgcuuacuacugugccggagccugugaauucccaaugcccaaaaucgugcggccuagcaaccaugccacuauccaauccaucgugcgcgccguugguauuauccccggaaucccagaaccguguugcgugcccgacaagaugaauagccucgggguccucuuucuggaugagaaucgaaacgucgugcugaagguauauccgaacaugagcguugacacaugugccugccgcuag

SEQ ID NO: 151438 - protein, 1073 aa, Artificial Sequence
  derived and/or modified sequence
MKTLLLDLALWSLLFQPGWLSFSSQVSQNCHNGSYEISVLMMGNSAFAEPLKNLEDAVNEGLEIVRGRLQNAGLNVTVNATFMYSDGLIHNSGDCRSSTCEGLDLLRKISNAQRMGCVLIGPSCTYSTFQMYLDTELSYPMISAGSFGLSCDYKETLTRLMSPARKLMYFLVNFWKTNDLPFKTYSWSTSYVYKNGTETEDCFWYLNALEASVSYFSHELGFKVVLRQDKEFQDILMDHNRKSNVIIMCGGPEFLYKLKGDRAVAEDIVIILVDLFNDQYFEDNVTAPDYMKNVLVLTLSPGNSLLNSSFSRNLSPTKRDFALAYLNGILLFGHMLKIFLENGENITTPKFAHAFRNLTFEGYDGPVTLDDWGDVDSTMVLLYTSVDTKKYKVLLTYDTHVNKTYPVDMSPTFTWKNSKLPNDITGRGPQILMIAVFTLTGAVVLLLLVALLMLRKYRKDYELRQKKWSHIPPENIFPLETNETNHVSLKIDDDKRRDTIQRLRQCKYDKKRVILKDLKHNDGNFTEKQKIELNKLLQIDYYNLTKFYGTVKLDTMIFGVIEYCERGSLREVLNDTISYPDGTFMDWEFKISVLYDIAKGMSYLHSSKTEVHGRLKSTNCVVDSRMVVKITDFGCNSILPPKKDLWTAPEHLRQANISQKGDVYSYGIIAQEIILRKETFYTLSCRDRNEKIFRVENSNGMKPFRPDLFLETAEEKELEVYLLVKNCWEEDPEKRPDFKKIETTLAKIFGLFHDQKNESYMDTLIRRLQLYSRNLEHLVEERTQLYKAERDRADRLNFMLLPRLVVKSLKEKGFVEPELYEEVTIYFSDIVGFTTICKYSTPMEVVDMLNDIYKSFDHIVDHHDVYKVETIGDAYMVASGLPKRNGNRHAIDIAKMALEILSFMGTFELEHLPGLPIWIRIGVHSGPCAAGVVGIKMPRYCLFGDTVNTASRMESTGLPLRIHVSGSTIAILKRTECQFLYEVRGETYLKGRGNETTYWLTGMKDQKFNLPTPPTVENQQRLQAEFSDMIANSLQKRQAAGIRSQKPRRVASYKKGTLEYLQLNTTDKESTYF

SEQ ID NO: 151439 - DNA, 3222 bp, Artificial Sequence
  derived and/or modified sequence
atgaaaaccctgttgctggatctcgcactatggtctctgctattccaacccggatggttaagcttcagcagccaggtgtcacagaattgtcacaatggtagttacgagatttcagtgctgatgatgggaaattctgcatttgctgagcccctgaagaatcttgaagatgccgtaaacgagggcttagagattgtaagaggtaggctacaaaatgccggactcaacgtcacagtgaatgccacatttatgtatagcgatggactgatccacaactctggagactgccgctctagcacctgtgagggactcgacctgctgaggaagatatcaaacgcccagcgtatgggctgtgtgcttatcggcccatcatgtacgtattccacttttcaaatgtacctcgatacagagctgtcctatccaatgatttcagccggaagctttgggctgtcttgcgactataaggaaaccttgacaaggcttatgtctcccgcaaggaagctgatgtatttcctagttaacttctggaagacgaatgatctgccctttaaaacttacagctggtcaactagctacgtgtacaagaatgggacagagactgaggattgtttttggtacttgaatgctctcgaagcgtctgtgtcttactttagccacgaattgggcttcaaagtggtgcttcggcaggacaaggagttccaggatatcctgatggaccataatcggaagagcaatgtcatcattatgtgcggcggacccgaattcctttacaagttgaaaggcgatagagctgtggccgaagacatcgtgattattctggtcgatttgttcaacgatcagtatttcgaagacaacgttacagcccctgattacatgaaaaacgtgctcgttcttacattgtcccccggcaactccctcttgaacagctccttcagtaggaacctgagtcctaccaagagggacttcgctctcgcctatttgaatgggatcttgctcttcggtcatatgcttaagatatttctggagaatggagagaacatcaccaccccaaaattcgcacatgcatttaggaatctgaccttcgaaggatacgatggtcctgtgaccctggatgactggggagatgtagactcaaccatggtgcttctatatacaagcgtggatacaaagaagtacaaggttctcttgacttatgacacacacgtgaacaagacgtaccctgtcgacatgtcacccacgtttacctggaagaacagcaagctccccaatgatatcaccggtagggggccacaaatattaatgattgcagtgttcaccctcaccggtgccgtcgtactcttgctcctggtcgcactgttgatgttacgcaaataccgcaaagactacgaacttcggcagaaaaaatggagccacatccctcccgaaaatattttccccttggagactaatgagactaaccatgtgagtcttaagattgacgacgacaaacggagggacaccattcaaagactccgacagtgtaagtatgacaagaagcgggttattcttaaggatttgaagcataatgatggaaacttcactgaaaagcagaaaatcgaactgaacaagttgctgcagattgactactacaacctaactaagttctacggaaccgtgaagctagatactatgatttttggggtaatcgaatattgcgagcgcgggagtctgagagaggtgctgaatgataccatctcctaccccgacggcaccttcatggactgggaattcaaaatttcggtgctatacgacatcgccaaggggatgtcttatctccatagttcaaaaacggaagtgcacggtcgtctcaaatccaccaactgtgtggttgactcaaggatggtggtcaaaatcactgacttcggatgtaattccattctgcctccaaaaaaggatctgtggaccgccccggagcatctccggcaggctaacatctcccagaaaggagatgtgtatagttacggcattattgcacaagaaatcatcctgagaaaggagacgttctacacactgtcttgtcgcgacagaaacgaaaaaatcttccgggttgaaaatagtaatggcatgaaacccttccggccagatctgtttttggaaacagcagaagaaaaggaactggaggtatatttattagttaaaaactgttgggaagaggatcctgagaaaaggcctgacttcaagaagattgaaacaaccttagccaagattttcggactttttcacgaccagaagaatgagtcatatatggataccctgataaggaggctccagctctattccaggaatcttgaacatctagttgaggaacggacccaactgtacaaggccgaacgggacagagcagatcgcctgaatttcatgctcttacccaggttggtcgtcaagtctctgaaggagaaggggtttgtcgaacccgagttatacgaggaggtcacaatctatttctccgatatcgtcggcttcactacaatttgtaagtatagcacccccatggaggtcgtagatatgcttaatgatatatacaaatcctttgaccacatcgtagaccatcacgatgtgtataaagtcgagaccatcggggacgcctacatggtggccagcggattgcctaaacgcaacggaaacagacacgccatagatatcgcgaaaatggcccttgaaatcttatcctttatgggcacctttgagttagagcacttacccggactgccgatctggatcaggatcggtgtccactccggcccgtgtgcagctggagtcgtgggtatcaaaatgcctagatactgtttgtttggcgacactgtaaatactgcctcgcggatggagtctacgggcctgcctctgcgcatacatgtgtccggatcaacaatcgctattctgaagcgcaccgaatgtcaatttctttatgaggtcaggggtgaaacttaccttaagggccgaggcaatgaaacgacatactggctcacggggatgaaggaccagaagtttaaccttcccacaccccccacagtagagaatcagcaacggctgcaggctgagtttagcgatatgattgctaatagcctgcagaagagacaggccgctggaattcgctcacagaaacctagaagggtcgcaagttacaagaaaggcacactagaatacctacagcttaatacgaccgataaggagtccacctacttctag

SEQ ID NO: 151440 - DNA, 3834 bp, Artificial Sequence
  derived and/or modified sequence
gaccagagagaagcgtggggaagagtgggctgagggactccactagaggctgtccatctggattccctgcctccctaggagcccaacagagcaaagcaagtgggcacaaggagtatggttctaacgtgattggggtcatgaagacgttgctgttggacttggctttgtggtcactgctcttccagcccgggtggctgtcctttagttcccaggtgagtcagaactgccacaatggcagctatgaaatcagcgtcctgatgatgggcaactcagcctttgcagagcccctgaaaaacttggaagatgcggtgaatgaggggctggaaatagtgagaggacgtctgcaaaatgctggcctaaatgtgactgtgaacgctactttcatgtattcggatggtctgattcataactcaggcgactgccggagtagcacctgtgaaggcctcgacctactcaggaaaatttcaaatgcacaacggatgggctgtgtcctcatagggccctcatgtacatactccaccttccagatgtaccttgacacagaattgagctaccccatgatctcagctggaagttttggattgtcatgtgactataaagaaaccttaaccaggctgatgtctccagctagaaagttgatgtacttcttggttaacttttggaaaaccaacgatctgcccttcaaaacttattcctggagcacttcgtatgtttacaagaatggtacagaaactgaggactgtttctggtaccttaatgctctggaggctagcgtttcctatttctcccacgaactcggctttaaggtggtgttaagacaagataaggagtttcaggatatcttaatggaccacaacaggaaaagcaatgtgattattatgtgtggtggtccagagttcctctacaagctgaagggtgaccgagcagtggctgaagacattgtcattattctagtggatcttttcaatgaccagtactttgaggacaatgtcacagcccctgactatatgaaaaatgtccttgttctgacgctgtctcctgggaattcccttctaaatagctctttctccaggaatctatcaccaacaaaacgagactttgctcttgcctatttgaatggaatcctgctctttggacatatgctgaagatatttcttgaaaatggagaaaatattaccacccccaaatttgctcatgctttcaggaatctcacttttgaagggtatgacggtccagtgaccttggatgactggggggatgttgacagtaccatggtgcttctgtatacctctgtggacaccaagaaatacaaggttcttttgacctatgatacccacgtaaataagacctatcctgtggatatgagccccacattcacttggaagaactctaaacttcctaatgatattacaggccggggccctcagatcctgatgattgcagtcttcaccctcactggagctgtggtgctgctcctgctcgtcgctctcctgatgctcagaaaatatagaaaagattatgaacttcgtcagaaaaaatggtcccacattcctcctgaaaatatctttcctctggagaccaatgagaccaatcatgttagcctcaagatcgatgatgacaaaagacgagatacaatccagagactacgacagtgcaaatacgacaaaaagcgagtgattctcaaagatctcaagcacaatgatggtaatttcactgaaaaacagaagatagaattgaacaagttgcttcagattgactattacaacctgaccaagttctacggcacagtgaaacttgataccatgatcttcggggtgatagaatactgtgagagaggatccctccgggaagttttaaatgacacaatttcctaccctgatggcacattcatggattgggagtttaagatctctgtcttgtatgacattgctaagggaatgtcatatctgcactccagtaagacagaagtccatggtcgtctgaaatctaccaactgcgtagtggacagtagaatggtggtgaagatcactgattttggctgcaattccattttacctccaaaaaaggacctgtggacagctccagagcacctccgccaagccaacatctctcagaaaggagatgtgtacagctatgggatcatcgcacaggagatcatcctgcggaaagaaaccttctacactttgagctgtcgggaccggaatgagaagattttcagagtggaaaattccaatggaatgaaacccttccgcccagatttattcttggaaacagcagaggaaaaagagctagaagtgtacctacttgtaaaaaactgttgggaggaagatccagaaaagagaccagatttcaaaaaaattgagactacacttgccaagatatttggactttttcatgaccaaaaaaatgaaagctatatggataccttgatccgacgtctacagctatattctcgaaacctggaacatctggtagaggaaaggacacagctgtacaaggcagagagggacagggctgacagacttaactttatgttgcttccaaggctagtggtaaagtctctgaaggagaaaggctttgtggagccggaactatatgaggaagttacaatctacttcagtgacattgtaggtttcactactatctgcaaatacagcacccccatggaagtggtggacatgcttaatgacatctataagagttttgaccacattgttgatcatcatgatgtctacaaggtggaaaccatcggtgatgcgtacatggtggctagtggtttgcctaagagaaatggcaatcggcatgcaatagacattgccaagatggccttggaaatcctcagcttcatggggacctttgagctggagcatcttcctggcctcccaatatggattcgcattggagttcactctggtccctgtgctgctggagttgtgggaatcaagatgcctcgttattgtctatttggagatacggtcaacacagcctctaggatggaatccactggcctccctttgagaattcacgtgagtggctccaccatagccatcctgaagagaactgagtgccagttcctttatgaagtgagaggagaaacatacttaaagggaagaggaaatgagactacctactggctgactgggatgaaggaccagaaattcaacctgccaacccctcctactgtggagaatcaacagcgtttgcaagcagaattttcagacatgattgccaactctttacagaaaagacaggcagcagggataagaagccaaaaacccagacgggtagccagctataaaaaaggcactctggaatacttgcagctgaataccacagacaaggagagcacctatttttaaacctaaatgaggtataaggactcacacaaattaaaatacagctgcactgaggcagcgacctcaagtgtcctgaaagcttacattttcctgagacctcaatgaagcagaaatgtacttaggcttggctgccctgtctggaacatggactttcttgcatgaatcagatgtgtgttctcagtgaaataactaccttccactctggaaccttattccagcagttgttccagggagcttctacctggaaaagaaaagaaatgaatagactatctagaacttgagaagattttattcttatttcatttattttttgtttgtttatttttatcgtttttgtttactggctttccttctgtattcataagattttttaaattgtcataattatattttaaatacccatcttcattaaagtatatttaactcataatttttgcagaaaatatgctatatattaggcaagaataaaagctaaagg

SEQ ID NO: 151441 - DNA, 3222 bp, Artificial Sequence
  derived and/or modified sequence
atgaagaccctgctgctggacctggccctgtggagcctgctcttccagcccggctggctgtccttcagcagccaggtgtcccagaactgccacaacggcagctatgagatctctgtgctgatgatgggcaacagcgcctttgctgagcccctgaagaacctggaggatgctgtgaatgaaggcctggagatcgtgcggggccgcctgcagaatgccggcctgaatgtgacagtgaatgccaccttcatgtacagtgatggcctcatccacaacagcggggactgccgcagcagcacctgtgagggcctggacctgctgaggaagatcagcaatgcccagaggatgggctgtgtgctgattggccccagctgcacctacagcaccttccagatgtacctggacacagagctgagctaccccatgatctctgctggcagctttggcctgagctgtgactacaaggagaccctgacccggctgatgagccctgccaggaagctgatgtacttcctggtgaacttctggaagaccaatgacctgcccttcaagacctacagctggagcaccagctatgtgtacaagaatggaacagaaacagaggactgcttctggtacctgaatgccctggaggcctctgtgtcctacttcagccatgagctgggcttcaaggtggtgctgcggcaggacaaggagttccaggacatcctgatggaccacaacaggaagagcaatgtcatcatcatgtgtggcggccctgagttcctgtacaagctgaagggggacagagctgtggccgaggacatcgtcatcatcctggtggacctcttcaatgaccagtactttgaggacaacgtgacagccccagactacatgaagaatgtgctggtgctgaccctgagccctggcaacagcctgctgaacagcagcttcagcaggaacctgagccccaccaagagggactttgccctggcctacctgaatggcatcctgctgtttggccacatgctgaagatcttcctggagaatggagagaacatcaccacccccaagtttgcccacgccttcaggaacctgacctttgagggctatgatggccctgtgaccctggatgactggggagatgtggacagcaccatggtgctgctgtacacctctgtggacaccaagaagtacaaggtgctgctgacctatgacacccacgtgaacaagacctaccctgtggacatgagccccaccttcacctggaagaacagcaagctgcccaatgacatcaccggccggggcccccagatcctgatgattgctgtgttcaccctgaccggggctgtggtgctgctgctgctggtggccctgctgatgctgaggaagtacaggaaggactatgagctgcggcagaagaagtggagccacatccccccagagaacatcttccccctggagaccaatgagaccaaccacgtgtccctgaagattgatgatgacaagaggcgggacaccatccagaggctgcggcagtgcaagtatgacaagaagagggtcatcctgaaggacctgaagcacaatgatggcaacttcacagagaagcagaagattgagctgaacaagctgctgcagattgactactacaacctgaccaagttctacggcaccgtgaagctggacaccatgatcttcggcgtgattgagtactgtgagcggggcagcctgcgggaggtgctgaatgacaccatctcctacccagatggcaccttcatggactgggagttcaagatctctgtgctgtatgacatcgccaagggcatgagctacctgcacagcagcaagacagaggtgcacggccgcctgaagagcaccaactgtgtggtggacagcaggatggtggtgaagatcacagactttggctgcaacagcatcctgccccccaagaaggacctgtggacagcccctgagcacctgcggcaggccaacatcagccagaagggagatgtgtacagctatggcatcatcgcccaggagatcatcctgaggaaggagaccttctacaccctgagctgccgggacagaaatgagaagatcttccgggtggagaacagcaatggcatgaagcccttccggccagacctcttcctggagacagctgaggagaaggagctggaggtgtacctgctggtgaagaactgctgggaggaggaccctgagaagaggccagacttcaagaagattgagaccaccctggccaagatcttcggcctcttccatgaccagaagaatgaaagctacatggacaccctcatccggcggctgcagctgtacagcaggaacctggagcacctggtggaggagaggacccagctgtacaaggccgagcgggacagagctgaccggctgaacttcatgctgctgccccggctggtggtgaagagcctgaaggagaagggctttgtggagcctgagctgtatgaggaggtgaccatctacttcagtgacatcgtgggcttcaccaccatctgcaagtacagcacccccatggaggtggtggacatgctgaatgacatctacaagagctttgaccacatcgtggaccaccatgatgtgtacaaggtggagaccatcggagatgcctacatggtggccagcggcctgcccaagagaaatggaaacagacatgccattgatattgccaagatggccctggagatcctgtccttcatgggcacctttgagctggagcacctgcccggcctgcccatctggatcagaattggagtgcacagcggcccctgtgccgccggcgtggtgggcatcaagatgccccgctactgcctgtttggagacacagtgaacacagccagcaggatggagagcacaggcctgcccctgcgcatccacgtgtctggcagcaccatcgccatcctgaagaggacagagtgccagttcctgtatgaggtgcggggggagacctacctgaagggcagaggaaatgagaccacctactggctgaccggcatgaaggaccagaagttcaacctgcccaccccacccaccgtggagaaccagcagaggctgcaggccgagttcagtgacatgattgccaacagcctgcagaagaggcaggccgccggcatccgcagccagaagccccggcgggtggccagctacaagaagggcaccctggagtacctgcagctgaacaccacagacaaggagagcacctacttctag

SEQ ID NO: 151442 - DNA, 3222 bp, Artificial Sequence
  derived and/or modified sequence
atgaagaccctgctgctggacctggccctgtggagcctgctgttccaaccgggatggctgtcctttagcagtcaagtgtcccagaattgtcacaacggtagctacgagataagtgtactgatgatgggcaattctgccttcgcagaacctttgaaaaatcttgaggacgcggtgaacgaggggctggagattgtgagaggaaggttacagaacgccggactcaatgtcactgtgaatgcaacctttatgtactctgatgggcttatccacaattcgggtgactgccggtccagtacttgtgaaggcctggacttactgagaaagatcagtaatgcacaaagaatggggtgcgtccttatcgggccatcgtgcacttactccactttccagatgtatctggatactgaactgagctacccaatgatttccgcgggtagcttcggtctatcctgcgattacaaggaaacccttacccggctcatgtcgcccgccagaaagcttatgtatttcctggtcaatttttggaagaccaatgatttgccattcaaaacgtactcgtggtccactagctatgtgtataagaatggtaccgagaccgaggactgcttctggtacctgaacgccctagaagcctctgtatcatatttctcccatgaactgggctttaaggtagttcttaggcaggataaggagttccaggatatattaatggatcacaaccgcaagagcaatgttatcatcatgtgtggtggacctgaattcttgtacaaattgaaaggagatagggccgtggccgaagacatcgtaattatactggtcgatctgtttaatgaccagtactttgaggataacgtcactgcccctgattatatgaagaacgtgcttgttctgaccctgtctccaggcaattctttgctgaacagtagttttagtcgcaacttgtcaccaactaaacgagacttcgccctagcgtaccttaacggaatcttacttttcggtcacatgttgaagattttcctcgagaacggagaaaacataacgacacccaagttcgcacacgcattcaggaatctcaccttcgagggatacgacggcccggtcactcttgacgattggggcgacgttgacagcactatggtgttgctctacacgagtgtcgataccaagaaatataaggtgctgcttacctacgacactcacgtgaataagacttaccccgtcgatatgtctcctacttttacatggaaaaattccaaactccccaacgatattaccgggagggggcctcaaattcttatgatcgccgtgtttactcttacgggcgccgtggtgttgctgctgttggtggccctgctgatgttgcggaaatatcggaaagactatgagctgaggcagaagaaatggagccatatccctccagagaatatcttccctcttgaaaccaacgagacaaaccatgttagtctcaaaattgacgatgataagagacgagataccattcaaaggctgcgccaatgtaagtacgacaagaaaagagtaattctcaaagatctgaaacacaacgatggcaattttacggagaaacagaaaatagaactcaataagctgctccaaattgattactacaacctgaccaagttttatggcacagtgaagctggatactatgatttttggggtcatcgaatattgtgagagaggtagcttgagggaagttctgaacgacacaatctcttacccagatgggaccttcatggactgggagtttaaaattagcgtgttgtatgatatcgctaaggggatgtcctacttgcacagcagcaaaactgaggtccatggaagactgaaatccactaattgcgtcgttgacagtcggatggtagtgaagattacagatttcggctgtaattccatactcccaccaaagaaagatctgtggaccgcccctgaacacttgagacaggccaatatttcacaaaaaggagatgtgtactcttatggaatcattgcacaggagatcattttacggaaagaaacgttctataccttgagctgtcgcgataggaacgaaaagatctttcgagttgagaattccaacggcatgaagccattccgacccgacttgtttctcgagacggcagaggaaaaagagctggaagtttacctcctcgtgaagaactgttgggaggaagaccctgagaagcgcccagattttaaaaaaatcgagactactctcgccaaaatcttcggactgtttcacgatcagaagaatgagtcttatatggacacactgatcaggcgactgcagctttatagcaggaacctcgaacatctggtcgaggagcgcacacaactgtacaaagcagagagggatcgggccgaccgcttaaatttcatgctactgccccgcttagttgtcaagtcgttgaaggaaaaaggatttgtggagccggagctttatgaggaagtaacaatctatttctctgacatcgttgggttcacgacaatatgtaaatacagcacgcctatggaagtagtcgatatgctgaacgacatctacaagtcattcgatcacatcgtggatcatcacgatgtgtacaaggtcgaaacaattggcgacgcctacatggtcgctagcggactgcccaagcgtaacggcaacagacatgcgattgacatagccaagatggctctggagattctgtcctttatggggactttcgagttggagcatttgcctgggttgcctatttggattagaataggcgtgcacagcggcccatgtgccgcgggagtggtggggataaaaatgcctaggtattgcctatttggcgatacggtgaacacagcatctcgtatggaaagcaccggcttgccactcaggattcatgtgagtggatcgaccatagccattttgaagagaactgagtgccagtttctctacgaggtccgaggggagacttatcttaagggcaggggcaatgaaactacctattggcttacaggcatgaaggatcaaaaatttaatctgccaacacctcccaccgtggaaaaccagcagcgccttcaggccgaattcagcgacatgatcgcaaattccttgcagaagcggcaggcggccggaatccgctctcagaagcctcggagggtggccagttacaagaagggaaccttggagtatctgcagttaaataccacagataaagagtctacttacttttag

SEQ ID NO: 151443 - DNA, 3222 bp, Artificial Sequence
  derived and/or modified sequence
atgaagaccctgctcctcgacctggccttgtggagtctgctgtttcagcccggatggctttccttcagtagccaggtgtcgcaaaattgccacaacggttcctacgagatctccgtactgatgatgggcaactctgcattcgccgagcctctgaaaaacctagaggatgccgttaacgaggggctcgagatcgtgcgcggtcgacttcagaacgctgggctgaatgtgactgtcaatgccaccttcatgtacagcgatggactgattcataatagcggcgactgtcgatcgtcaacctgcgaaggactcgatctgctgcggaagattagcaatgcgcagaggatgggttgcgtgctaatcggcccatcctgtacgtattctaccttccagatgtacttagacactgaactttcctaccccatgattagcgccggatcatttgggctctcttgcgattacaaggagacattgactaggctgatgagcccagccaggaaactgatgtacttcctggtaaacttctggaagacaaatgacctaccctttaagacatacagttggagtacctcatacgtttataaaaatggcaccgagacggaggattgtttctggtaccttaacgccctcgaagcatctgtctcctactttagccacgagcttggattcaaagtcgtgctccgccaagataaagaatttcaggacatactgatggatcacaacaggaaaagtaacgtgattattatgtgtggcggtccagagttcctgtataagctgaaaggagacagggcggtggccgaagacatcgttatcattttagtcgacctgttcaacgatcagtattttgaggacaatgtgacagccccagattatatgaagaatgtattggttctgactctcagtcctggtaattccctcctcaatagcagttttagccgcaatttgtccccgaccaaaagggatttcgctctggcctacctgaatggaatacttttgttcggtcatatgctgaagatctttctggagaatggcgaaaacataacaactccaaagtttgcccatgctttcaggaacttgaccttcgaggggtacgacgggcctgtgactctagacgactggggggacgtcgacagtacaatggttttgctctacacctctgtggacacgaagaagtacaaggtactgctgacctacgatacacacgtaaataagacataccccgtggacatgagtcccactttcacttggaaaaattccaaattgcccaacgatattaccggacgaggaccccaaattcttatgattgccgtctttaccttaaccggcgctgttgtgttgttgctgcttgtcgcccttctcatgttgcgcaaataccggaaggactacgaactgaggcagaagaagtggagtcatattccacctgagaatatttttcccctcgaaaccaatgagactaaccacgtgtctctgaagatcgacgacgacaagcgcagagataccatacagcggctgcgccaatgcaagtacgataagaaacgggtcatcttgaaggatttaaagcacaatgacggcaacttcacagaaaagcagaagattgaactgaacaagctgttgcagatcgattactacaacctgacaaaattttacgggactgtgaaactcgatacaatgatcttcggcgtcattgagtattgtgagagaggatccctcagagaggtcctcaatgataccatttcatatcccgatggcacctttatggattgggaatttaagatttctgtactgtacgacatagccaagggcatgagttacttgcatagttctaagacagaagtccacgggcgtttgaagagcacgaactgtgttgtggatagccggatggtggttaagataaccgactttgggtgtaactctattctaccaccgaaaaaggatttatggactgcccctgagcatcttcgacaggcaaatatctcccagaagggggatgtctactcctatgggatcattgcccaggaaataattctgcgcaaggaaactttttataccttgagctgtagagatcgcaacgagaaaatttttcgggtggagaactccaatggtatgaagcctttccgcccagaccttttcttagaaacagcagaagagaaagagctggaagtatacttgctggtgaaaaactgttgggaggaggaccctgaaaagcggcctgactttaaaaagatcgagacaaccctcgccaaaatatttggactatttcatgatcaaaaaaacgaatcttacatggacaccctgatcagacggctgcaactctacagtcggaatctcgagcacttggtggaggagcggacgcaactatataaggcggaacgggatcgggctgatagattgaactttatgttactgccgcgtctggtggtcaagtcactgaaagaaaaggggttcgtggaacccgaactttacgaagaagtcactatatatttctcggatatcgtgggcttcacaacaatctgcaaatacagcacccctatggaggtcgtagacatgcttaatgatatttataaaagcttcgatcacattgttgaccaccacgacgtgtataaagttgagacaattggggacgcctacatggtcgcatcaggcctgccaaagcgaaacggcaaccgacatgctatagacattgccaagatggccctagagatcctttctttcatggggacgttcgagttggagcacctgccaggcctacccatctggatccgaatcggcgtccacagcgggccttgtgctgccggagttgtggggatcaaaatgcccaggtattgcctgttcggggatactgttaacaccgcctcacgcatggagagtactggtcttcctctgcggatccacgtgtcgggatctacaatcgccatcttgaagcgcaccgagtgccagtttctctacgaggtgcgcggtgaaacatacctgaagggtagaggaaatgagacaacatactggctcaccggaatgaaggatcagaagttcaacctccccacaccacctaccgttgagaaccagcagagactgcaagccgaattttcagatatgattgccaactccctgcagaagcgtcaagccgctggcatccgctcccagaagcctagacgcgtcgctagttacaaaaaaggaactctcgaatacttgcaactcaatactacagacaaggagtccacatatttctag

SEQ ID NO: 151444 - DNA, 3222 bp, Artificial Sequence
  derived and/or modified sequence
atgaagaccctgctgctggacctggccctgtggagcctgctgttccagcccggctggctgagcttcagcagccaggtgagccagaactgccacaacggcagctacgagatcagcgtgctgatgatgggcaacagcgccttcgccgagcccctgaagaacctggaggacgccgtgaacgagggcctggagatcgtgagaggcagactgcagaacgccggcctgaacgtgaccgtgaacgccaccttcatgtacagcgacggcctgatccacaacagcggcgactgcagaagcagcacctgcgagggcctggacctgctgagaaagatcagcaacgcccagagaatgggctgcgtgctgatcggccccagctgcacctacagcaccttccagatgtacctggacaccgagctgagctaccccatgatcagcgccggcagcttcggcctgagctgcgactacaaggagaccctgaccagactgatgagccccgccagaaagctgatgtacttcctggtgaacttctggaagaccaacgacctgcccttcaagacctacagctggagcaccagctacgtgtacaagaacggcaccgagaccgaggactgcttctggtacctgaacgccctggaggccagcgtgagctacttcagccacgagctgggcttcaaggtggtgctgagacaggacaaggagttccaggacatcctgatggaccacaacagaaagagcaacgtgatcatcatgtgcggcggccccgagttcctgtacaagctgaagggcgacagagccgtggccgaggacatcgtgatcatcctggtggacctgttcaacgaccagtacttcgaggacaacgtgaccgcccccgactacatgaagaacgtgctggtgctgaccctgagccccggcaacagcctgctgaacagcagcttcagcagaaacctgagccccaccaagagagacttcgccctggcctacctgaacggcatcctgctgttcggccacatgctgaagatcttcctggagaacggcgagaacatcaccacccccaagttcgcccacgccttcagaaacctgaccttcgagggctacgacggccccgtgaccctggacgactggggcgacgtggacagcaccatggtgctgctgtacaccagcgtggacaccaagaagtacaaggtgctgctgacctacgacacccacgtgaacaagacctaccccgtggacatgagccccaccttcacctggaagaacagcaagctgcccaacgacatcaccggcagaggcccccagatcctgatgatcgccgtgttcaccctgaccggcgccgtggtgctgctgctgctggtggccctgctgatgctgagaaagtacagaaaggactacgagctgagacagaagaagtggagccacatcccccccgagaacatcttccccctggagaccaacgagaccaaccacgtgagcctgaagatcgacgacgacaagagaagagacaccatccagagactgagacagtgcaagtacgacaagaagagagtgatcctgaaggacctgaagcacaacgacggcaacttcaccgagaagcagaagatcgagctgaacaagctgctgcagatcgactactacaacctgaccaagttctacggcaccgtgaagctggacaccatgatcttcggcgtgatcgagtactgcgagagaggcagcctgagagaggtgctgaacgacaccatcagctaccccgacggcaccttcatggactgggagttcaagatcagcgtgctgtacgacatcgccaagggcatgagctacctgcacagcagcaagaccgaggtgcacggcagactgaagagcaccaactgcgtggtggacagcagaatggtggtgaagatcaccgacttcggctgcaacagcatcctgccccccaagaaggacctgtggaccgcccccgagcacctgagacaggccaacatcagccagaagggcgacgtgtacagctacggcatcatcgcccaggagatcatcctgagaaaggagaccttctacaccctgagctgcagagacagaaacgagaagatcttcagagtggagaacagcaacggcatgaagcccttcagacccgacctgttcctggagaccgccgaggagaaggagctggaggtgtacctgctggtgaagaactgctgggaggaggaccccgagaagagacccgacttcaagaagatcgagaccaccctggccaagatcttcggcctgttccacgaccagaagaacgagagctacatggacaccctgatcagaagactgcagctgtacagcagaaacctggagcacctggtggaggagagaacccagctgtacaaggccgagagagacagagccgacagactgaacttcatgctgctgcccagactggtggtgaagagcctgaaggagaagggcttcgtggagcccgagctgtacgaggaggtgaccatctacttcagcgacatcgtgggcttcaccaccatctgcaagtacagcacccccatggaggtggtggacatgctgaacgacatctacaagagcttcgaccacatcgtggaccaccacgacgtgtacaaggtggagaccatcggcgacgcctacatggtggccagcggcctgcccaagagaaacggcaacagacacgccatcgacatcgccaagatggccctggagatcctgagcttcatgggcaccttcgagctggagcacctgcccggcctgcccatctggatcagaatcggcgtgcacagcggcccctgcgccgccggcgtggtgggcatcaagatgcccagatactgcctgttcggcgacaccgtgaacaccgccagcagaatggagagcaccggcctgcccctgagaatccacgtgagcggcagcaccatcgccatcctgaagagaaccgagtgccagttcctgtacgaggtgagaggcgagacctacctgaagggcagaggcaacgagaccacctactggctgaccggcatgaaggaccagaagttcaacctgcccaccccccccaccgtggagaaccagcagagactgcaggccgagttcagcgacatgatcgccaacagcctgcagaagagacaggccgccggcatcagaagccagaagcccagaagagtggccagctacaagaagggcaccctggagtacctgcagctgaacaccaccgacaaggagagcacctacttctag

SEQ ID NO: 151445 - protein, 90 aa, Artificial Sequence
  derived and/or modified sequence
GGAKEEPKRRSARLSAKPPAKVEAKPKKAAAKDKSSDKKVQTKGKRGAKGKQTEVANQETKEDLPAENGETKTEESPASDEAGEKEAKSD

SEQ ID NO: 151446 - protein, 100 aa, Artificial Sequence
  derived and/or modified sequence
MPKRKVSSAEGAAKEEPKRRSARLSAKPPAKVEAKPKKAAAKDKSSDKKVQTKGKRGAKGKQAEVANQETKEDLPAENGETKTEESPASDEAGEKEAKSD

SEQ ID NO: 151447 - DNA, 273 bp, Artificial Sequence
  derived and/or modified sequence
ggcggcgccaaggaggagcccaagagaagaagcgccagactgagcgccaagccccccgccaaggtggaggccaagcccaagaaggccgccgccaaggacaagagcagcgacaagaaggtgcagaccaagggcaagagaggcgccaagggcaagcagaccgaggtggccaaccaggagaccaaggaggacctgcccgccgagaacggcgagaccaagaccgaggagagccccgccagcgacgaggccggcgagaaggaggccaagagcgactag

SEQ ID NO: 151448 - DNA, 273 bp, Artificial Sequence
  derived and/or modified sequence
gggggggccaaggaggagccgaaacgaaggtctgctcggctgtccgccaaacccccagccaaagtggaagccaagccaaagaaggccgccgccaaagataaaagcagcgataaaaaggttcagacgaaaggaaagcggggagctaagggaaaacaaacagaagtagctaaccaagaaaccaaagaagacctacctgccgagaatggtgaaacaaaaaccgaagagtctcctgcttcagacgaggcgggtgagaaggaagctaaatctgactag

SEQ ID NO: 151449 - DNA, 273 bp, Artificial Sequence
  derived and/or modified sequence
gggggcgccaaggaggagcccaagagaagaagtgcccggctgagcgccaagcccccagccaaggtggaggccaagcccaagaaggccgccgccaaggacaagagcagtgacaagaaggtgcagaccaagggcaagagaggagccaagggcaagcagacagaggtggccaaccaggagaccaaggaggacctgcctgcagaaaatggagagaccaagacagaggagagccctgccagtgatgaggccggggagaaggaggccaagagtgactag

SEQ ID NO: 151450 - DNA, 273 bp, Artificial Sequence
  derived and/or modified sequence
ggcggcgccaaggaggagcccaagcggcggagcgcccggctgagcgccaaaccccccgcgaaagtcgaggccaaacccaagaaggcagccgctaaagataagagctctgataagaaggtgcagacgaaaggcaagcggggtgcaaagggaaagcagactgaggtcgcaaaccaagagaccaaggaggatttgcccgcggaaaacggcgagaccaaaacggaggagagccccgcctcggatgaagctggagagaaagaagccaagagtgattag

SEQ ID NO: 151451 - DNA, 273 bp, Artificial Sequence
  derived and/or modified sequence
ggaggtgccaaggaagaacccaagcggagaagcgctaggctgagcgcaaagcccccagcgaaggtggaagcaaaaccaaaaaaggctgcagcaaaagacaagtccagtgataaaaaagtccagacaaaggggaaacggggagccaaggggaagcagactgaggttgccaaccaggagactaaagaggatcttccggcagagaatggcgaaactaagacagaagagtcccctgcctcagatgaggcaggagaaaaggaggccaaatctgactag

SEQ ID NO: 151452 - DNA, 273 bp, Artificial Sequence
  derived and/or modified sequence
gggggcgccaaggaagagcccaagaggagatcagcacggttgtcagctaaacctcctgcaaaagtggaagcaaagccgaaaaaggcagcagcgaaggataaatcttcagacaaaaaagtgcaaacaaaagggaaaaggggagcaaagggaaaacagactgaagtggctaaccaagaaactaaagaagatttacctgcagaaaatggggaaacgaaaactgaggagagtccagcctctgatgaagcaggagagaaagaagccaagtctgattaa

SEQ ID NO: 151453 - DNA, 303 bp, Artificial Sequence
  derived and/or modified sequence
atgcctaaacgtaaggtatcctcggccgagggagcggcgaaagaagaaccaaaacgccgcagcgctcggctgtccgccaagccaccagcaaaagtcgaggctaagcctaaaaaagctgccgcaaaggataaaagttccgataagaaggtgcagactaaagggaagcgcggcgcaaagggcaagcaggccgaggtggctaaccaggagaccaaggaggaccttcctgctgaaaatggggagacaaagacggaggagagtcccgcttcggacgaggcaggcgaaaaagaggcgaaatcagactag

SEQ ID NO: 151454 - DNA, 303 bp, Artificial Sequence
  derived and/or modified sequence
atgcccaagaggaaggtgagcagcgctgagggcgccgccaaggaggagcccaagagaagaagtgcccggctgagcgccaagcccccagccaaggtggaggccaagcccaagaaggccgccgccaaggacaagagcagtgacaagaaggtgcagaccaagggcaagagaggagccaagggcaagcaggccgaggtggccaaccaggagaccaaggaggacctgcctgcagaaaatggagagaccaagacagaggagagccctgccagtgatgaggccggggagaaggaggccaagagtgactag

SEQ ID NO: 151455 - DNA, 303 bp, Artificial Sequence
  derived and/or modified sequence
atgcccaagcggaaggtgagcagcgccgagggcgccgccaaggaggagcccaaaaggcgtagtgctagactgagcgctaagccacctgcaaaagtggaggccaagccaaagaaggcagctgccaaggacaaatcttcagataagaaagtgcaaactaaggggaaaaggggagccaaaggaaagcaggcggaggttgcgaaccaagagaccaaggaggacctgccggccgagaacggggagaccaaaaccgaagagtctcctgcaagtgatgaggccggcgaaaaggaggctaagtccgactag

SEQ ID NO: 151456 - DNA, 303 bp, Artificial Sequence
  derived and/or modified sequence
atgcccaagcgcaaggtttcatcagcggagggggctgctaaggaagagcctaagagacggtcggcccgattgagcgctaaacccccagcaaaagtggaagcaaagcctaaaaaggccgctgccaaggacaaatccagcgataaaaaagtgcaaactaaaggcaagaggggggctaaaggtaagcaggccgaggtggccaaccaggagaccaaagaagatctgcccgctgaaaacggggagactaagactgaagagagtccagcctctgatgaagcgggagagaaggaagcaaagtctgactag

SEQ ID NO: 151457 - DNA, 303 bp, Artificial Sequence
  derived and/or modified sequence
atgcccaagagaaaggtgagcagcgccgagggcgccgccaaggaggagcccaagagaagaagcgccagactgagcgccaagccccccgccaaggtggaggccaagcccaagaaggccgccgccaaggacaagagcagcgacaagaaggtgcagaccaagggcaagagaggcgccaagggcaagcaggccgaggtggccaaccaggagaccaaggaggacctgcccgccgagaacggcgagaccaagaccgaggagagccccgccagcgacgaggccggcgagaaggaggccaagagcgactag

SEQ ID NO: 151458 - protein, 317 aa, Artificial Sequence
  derived and/or modified sequence
MKTALILLSILGMACAFSMKNLHRRVKIEDSEENGVFKYRPRYYLYKHAYFYPHLKRFPVQGSSDSSEENGDDSSEEEEEEEETSNEGENNEESNEDEDSEAENTTLSATTLGYGEDATPGTGYTGLAAIQLPKKAGDITNKATKEKESDEEEEEEEEGNENEESEAEVDENEQGINGTSTNSTEAENGNGSSGGDNGEEGEEESVTGANAEDTTETGRQGKGTSKTTTSPNGGFEPTTPPQVYRTTSPPFGKTTTVEYEGEYEYTGANEYDNGYEIYESENGEPRGDNYRAYEDEYSYFKGQGYDGYDGQNYYHHQ

SEQ ID NO: 151459 - DNA, 954 bp, Artificial Sequence
  derived and/or modified sequence
atgaaaacggccttaatactgctcagcattcttggtatggcctgtgcgttcagtatgaagaatttgcatcgccgcgtcaaaattgaagatagcgaggagaatggtgtgtttaagtaccgcccccgttattacttatacaaacacgcatacttttatccccacttgaagagattccccgttcaagggagttcggactccagtgaagagaacggtgatgacagttctgaagaagaggaggaagaggaggaaacctctaatgaaggcgagaacaacgaggagagcaatgaggacgaggacagcgaggcagaaaacacaacactctccgccactactttaggctacggggaggatgccaccccagggactgggtacacaggacttgccgctattcaacttcctaaaaaggcaggggacattacaaacaaagcaaccaaggaaaaagaaagcgacgaggaggaggaggaagaggaggagggcaacgagaacgaggaaagcgaggcagaggttgacgaaaacgagcaaggaattaacggaacttccaccaatagtacagaggccgagaacggaaacgggtcatctggcggcgataatggtgaggagggagaagaagagtcagtaaccggggccaacgccgaagatacaactgaaactgggaggcagggcaaaggaacgtccaaaacaacgacctcgcctaacggtggcttcgagccaacaaccccacctcaagtgtaccggactacctctccccctttcggcaagactacaactgtggagtacgagggggaatatgagtacactggtgctaatgagtatgacaatggttacgaaatttacgagagtgagaatggagaaccgagaggtgataactaccgggcttacgaggatgagtactcttacttcaaaggccagggttatgatggctatgacgggcagaattactaccaccaccagtag

SEQ ID NO: 151460 - DNA, 954 bp, Artificial Sequence
  derived and/or modified sequence
atgaagacagccctgatcctgctgagcatcctgggcatggcctgtgccttctccatgaagaacctgcaccggcgggtgaagattgaagattctgaagaaaatggagtcttcaagtaccggccccgctactacctgtacaagcacgcctacttctacccccacctgaagcgcttccctgtgcagggcagcagtgacagcagtgaagaaaatggagatgacagcagcgaggaggaggaggaggaggaggagaccagcaatgaaggagaaaataatgaggagagcaatgaagatgaggacagcgaggccgagaacaccaccctgagcgccaccaccctgggctacggggaggatgccaccccaggcaccggctacacaggcctggccgccatccagctgcccaagaaggccggggacatcaccaacaaggccaccaaggagaaggagagtgatgaggaggaggaggaggaggaggagggcaatgaaaatgaggagagcgaggccgaggtggatgaaaatgagcagggcatcaatggcaccagcaccaacagcacagaagcagaaaatggaaatggcagcagtggaggagacaatggagaggagggggaggaggagagcgtgactggagccaatgctgaggacaccacagaaacaggccggcagggcaagggcaccagcaagaccaccaccagccccaacggcggctttgagcccaccaccccaccccaggtgtaccgcaccaccagccccccatttgggaagaccaccaccgtggagtatgaaggagaatatgagtacaccggggccaatgaatatgacaatggctatgagatctatgaaagtgaaaatggagagcccaggggggacaactaccgggcctatgaagatgagtacagctacttcaagggccagggctatgatggctatgatggccagaactactaccaccaccagtag

SEQ ID NO: 151461 - DNA, 954 bp, Artificial Sequence
  derived and/or modified sequence
atgaagaccgccctgatcctgctgagcatcctgggcatggcctgcgctttttcaatgaaaaacctccataggagggtgaaaatcgaggactccgaagaaaacggcgtcttcaaatacagaccacggtactacctgtataagcacgcatatttttaccctcacctgaagcggtttccagttcagggttccagtgactctagtgaggagaacggcgacgattccagcgaagaagaggaagaggaggaggagaccagcaatgaaggggagaacaatgaagagagtaatgaggatgaagatagcgaggctgagaataccacactgtctgccactaccctggggtacggtgaagacgcgacaccagggaccggatatactggattagcggctatccagctgcctaagaaggccggagatatcactaataaagcaacaaaggagaaagaaagcgacgaagaggaggaggaagaagaggaggggaacgaaaacgaggagagcgaagctgaagtggatgagaatgagcagggcatcaatggcacctcaaccaactcaacggaggcggagaacggcaatgggagcagcgggggagacaacggggaggaaggggaagaagagtcagtgacaggtgccaacgctgaagatactacagagaccggcaggcagggcaagggaacctcaaaaacaacaacctccccaaacggcggatttgaacccactactccaccccaggtttatcgaactacatcaccaccattcggcaagaccactaccgtggagtatgagggtgagtacgagtataccggagctaatgaatacgacaatgggtatgagatatacgaatcagagaatggcgaaccgcgcggcgataactatcgcgcgtacgaggatgagtatagctattttaagggacaaggctatgacggctatgatggccaaaactactatcaccaccagtag

SEQ ID NO: 151462 - DNA, 954 bp, Artificial Sequence
  derived and/or modified sequence
atgaagacggctttaatcttgctgagcatcttagggatggcctgcgccttctccatgaaaaacctgcataggcgggttaagatcgaagacagcgaggagaacggtgtatttaaatacaggcccaggtattacctgtacaagcatgcgtacttctacccgcatttaaagaggtttcccgttcagggatctagcgactcctccgaagaaaacggcgacgactctagtgaggaggaggaggaagaagaggagacctctaacgagggggaaaataacgaggagtctaatgaggatgaggacagtgaggcggagaacacaaccttaagcgccactacactcggatatggggaggacgcaaccccgggtaccggatacaccgggcttgctgcaatccagctccccaagaaagctggagatattacaaataaggccaccaaagagaaagaaagtgatgaagaagaagaggaggaggaggagggcaatgaaaatgaggagtcggaggctgaagtggatgagaacgagcaaggtattaatggaacgagtacaaattccacagaggccgagaatggaaatgggtcgtctggcggagacaacggggaagaaggcgaggaagagtccgtgaccggggcaaacgccgaagatacaactgagaccggcagacaggggaaaggaacatctaaaaccactaccagcccaaacgggggatttgagcccacaaccccacctcaggtttatcggacaacgagtcccccattcggcaagacgactacggttgagtatgagggtgagtatgagtacactggggctaatgaatatgacaacggatacgagatttacgagagtgaaaatggtgagcccagaggcgataattaccgggcttacgaggatgaatatagttactttaaagggcagggctacgacggctatgacggacagaactactatcatcatcagtag

SEQ ID NO: 151463 - DNA, 954 bp, Artificial Sequence
  derived and/or modified sequence
atgaagaccgccctgatcctgctgagcatcctgggcatggcctgcgccttcagcatgaagaacctgcacagaagagtgaagatcgaggacagcgaggagaacggcgtgttcaagtacagacccagatactacctgtacaagcacgcctacttctacccccacctgaagagattccccgtgcagggcagcagcgacagcagcgaggagaacggcgacgacagcagcgaggaggaggaggaggaggaggagaccagcaacgagggcgagaacaacgaggagagcaacgaggacgaggacagcgaggccgagaacaccaccctgagcgccaccaccctgggctacggcgaggacgccacccccggcaccggctacaccggcctggccgccatccagctgcccaagaaggccggcgacatcaccaacaaggccaccaaggagaaggagagcgacgaggaggaggaggaggaggaggagggcaacgagaacgaggagagcgaggccgaggtggacgagaacgagcagggcatcaacggcaccagcaccaacagcaccgaggccgagaacggcaacggcagcagcggcggcgacaacggcgaggagggcgaggaggagagcgtgaccggcgccaacgccgaggacaccaccgagaccggcagacagggcaagggcaccagcaagaccaccaccagccccaacggcggcttcgagcccaccacccccccccaggtgtacagaaccaccagcccccccttcggcaagaccaccaccgtggagtacgagggcgagtacgagtacaccggcgccaacgagtacgacaacggctacgagatctacgagagcgagaacggcgagcccagaggcgacaactacagagcctacgaggacgagtacagctacttcaagggccagggctacgacggctacgacggccagaactactaccaccaccagtag

SEQ ID NO: 151464 - DNA, 1033 bp, Artificial Sequence
  derived and/or modified sequence
tctgtgccactcactgccttgagcctgcttcctcactccaggactgccagaggaagcaatcaccaaaatgaagactgctttaattttgctcagcattttgggaatggcctgtgctttctcaatgaaaaatttgcatcgaagagtcaaaatagaggattctgaagaaaatggggtctttaagtacaggccacgatattatctttacaagcatgcctacttttatcctcatttaaaacgatttccagttcagggcagtagtgactcatccgaagaaaatggagatgacagttcagaagaggaggaggaagaagaggagacttcaaatgaaggagaaaacaatgaagaatcgaatgaagatgaagactctgaggctgagaataccacactttctgctacaacactgggctatggagaggacgccacgcctggcacagggtatacagggttagctgcaatccagcttcccaagaaggctggggatataacaaataaagctacaaaagagaaggaaagtgatgaagaagaagaggaggaagaggaaggaaatgaaaacgaagaaagcgaagcagaagtggatgaaaacgaacaaggcataaacggcaccagtaccaacagcacagaggcagaaaacggcaacggcagcagcggaggagacaatggagaagaaggggaagaagaaagtgtcactggagccaatgcagaagacaccacagagaccggaaggcagggcaagggcacctcgaagacaacaacctctccaaatggtgggtttgaacctacaaccccaccacaagtctatagaaccacttccccaccttttgggaaaaccaccaccgttgaatacgagggggagtacgaatacacgggcgccaatgaatacgacaatggatatgaaatctatgaaagtgagaacggggaacctcgtggggacaattaccgagcctatgaagatgagtacagctactttaaaggacaaggctacgatggctatgatggtcagaattactaccaccaccagtgaagctccagcctg

SEQ ID NO: 151465 - protein, 483 aa, Artificial Sequence
  derived and/or modified sequence
MSGHKCSYPWDLQDRYAQDKSVVNKMQQKYWETKQAFIKATGKKEDEHVVASDADLDAKLELFHSIQRTCLDLSKAIVLYQKRICFLSQEENELGKFLRSQGFQDKTRAGKMMQATGKALCFSSQQRLALRNPLCRFHQEVETFRHRAISDTWLTVNRMEQCRTEYRGALLWMKDVSQELDPDLYKQMEKFRKVQTQVRLAKKNFDKLKMDVCQKVDLLGASRCNLLSHMLATYQTTLLHFWEKTSHTMAAIHESFKGYQPYEFTTLKSLQDPMKKLVEKEEKKKINQQESTDAAVQEPSQLISLEEENQRKESSSFKTEDGKSILSALDKGSTHTACSGPIDELLDMKSEEGACLGPVAGTPEPEGADKDDLLLLSEIFNASSLEEGEFSKEWAAVFGDGQVKEPVPTMALGEPDPKAQTGSGFLPSQLLDQNMKDLQASLQEPAKAASDLTAWFSLFADLDPLSNPDAVGKTDKEHELLNA

SEQ ID NO: 151466 - DNA, 774 bp, Artificial Sequence
  derived and/or modified sequence
atgagtgggcataaatgtagctacccatgggatttgcaggaccgttacgctcaggataagagcgtggtgaacaagatgcaacagaaatattgggaaaccaagcaggcctttattaaagctacgggaaaaaaggaggatgaacacgttgtagcttccgatgccgacctggacgccaagcttgaactcttccattccatacagcggacatgcctggatctctccaaggcaatcgttctctatcagaaaaggatctgttttcttagccaggaggagaacgaactgggaaaatttttacgctctcagggatttcaggacaagacccgcgcaggaaaaatgatgcaagccacgggtaaggccctgtgttttagcagtcagcagcgactggccttaagaaaccccctgtgccgctttcaccaagaggtagagaccttccgccatcgagccatatccgatacttggctcacagttaaccgcatggagcagtgccgtaccgagtaccgcggggctttgttatggatgaaggatgtgtctcaggagctcgatccagatctgtataagcagatggagaagttccggaaggtgcaaactcaagtgagactggccaagaagaattttgacaagctaaagatggacgtgtgtcaaaaggtcgatctcctaggcgccagtcgttgcaacctgctcagccacatgctggctacctaccagcttgcatgggatcagtggcagggcccacgaaacctcaaagttctgacaaaaatgacgtgctgctgttag

SEQ ID NO: 151467 - DNA, 1452 bp, Artificial Sequence
  derived and/or modified sequence
atgtccggccacaagtgtagctacccttgggacctccaggatcggtatgcgcaagacaaaagcgtggttaacaaaatgcaacagaagtattgggagactaaacaggctttcattaaagcaaccggcaaaaaggaggatgagcatgttgtggccagcgacgctgatttggacgctaaactggagcttttccacagtattcagagaacttgcctggacctgagcaaggccatcgtgctgtatcagaagcggatatgcttcctttcacaggaggaaaatgaacttggaaaatttctgcgatctcaaggattccaagacaaaactcgcgccggaaaaatgatgcaggctaccgggaaggccttgtgcttttcaagtcagcagagattagcactcaggaaccctctgtgtcggttccatcaagaggttgagaccttcagacatcgggcaatcagcgacacctggttgaccgtgaaccgtatggaacaatgcagaaccgagtaccgcggcgcacttctgtggatgaaggacgttagccaagagttggacccggatctctataaacaaatggagaagtttcgtaaggtccagacccaggttcgcctggcgaagaaaaacttcgataagctcaagatggacgtgtgccaaaaggtcgacctgctgggtgcctctcgttgtaatctgctcagtcacatgcttgcaacgtatcagactaccttgctgcacttctgggaaaagacctcacatacaatggcagctatccacgaatcttttaagggttaccagccctatgagttcactactctaaagtctcttcaggaccctatgaagaagctggtcgaaaaagaggaaaaaaagaagatcaaccagcaggagagtactgatgctgcagtgcaggagccctcccagctgatctcactggaggaagagaatcagcgcaaggagtcttcttcatttaaaacagaagacggtaaatccattttaagcgcgctggataaaggatctacccatacggcatgttcgggaccgatcgacgaactgttagatatgaaaagcgaagagggcgcttgcctgggacccgtcgctggcaccccggagccggagggtgctgacaaggatgatctccttttgctctctgaaatcttcaacgctagctcattggaagaaggagagttcagtaaggaatgggctgcagttttcggcgatggacaggtaaaagagcccgttccaactatggcactaggggagccagatcctaaagcacagacaggtagtggatttttgcccagtcagttgttggaccagaacatgaaggacctccaggccagtcttcaggagcctgcgaaggcagctagcgacctcaccgcgtggttcagccttttcgcagacctcgacccgctgagcaaccctgacgcagtcgggaagaccgataaagagcatgagctactgaatgcctag

SEQ ID NO: 151468 - DNA, 1452 bp, Artificial Sequence
  derived and/or modified sequence
atgtcagggcataagtgttcgtacccatgggacctgcaggaccgctacgcgcaggataagagcgtggtgaacaagatgcagcaaaaatactgggaaacaaaacaggcattcatcaaagcgacggggaagaaagaagatgagcatgtagttgcatccgacgccgaccttgatgcaaagcttgaattatttcatagcatccagaggacatgtctagatctgtcaaaggccattgtcctgtaccagaaacgaatctgtttcctgagccaggaggaaaacgaactggggaaattcctcaggagccaggggttccaggacaaaacccgagccggaaaaatgatgcaggcaaccggcaaagctctgtgtttttccagccagcaacgactggctctgcgaaaccccctctgccgatttcatcaggaggtcgaaacttttcggcaccgtgcgatttcggacacctggctcacggtgaaccggatggagcaatgtagaaccgagtatcgcggagccttactgtggatgaaggacgtttctcaggaactagatcctgacttgtacaagcagatggagaaatttaggaaagtacagactcaagtgcgcctcgcgaagaaaaactttgacaaattgaagatggacgtgtgccagaaggtggatcttcttggagccagtaggtgcaacctcctatctcacatgctggctacataccaaacaacgcttctccatttttgggagaaaacttcacataccatggctgccatccatgaatccttcaagggctatcaaccctacgagttcaccaccttaaagagtctgcaggaccctatgaagaagctagtagagaaggaggagaagaaaaaaataaatcagcaggagtctaccgacgctgccgtacaggaaccatcccagcttatttctctggaggaagaaaaccagaggaaggagagcagcagcttcaagactgaagacgggaagagcatacttagcgccctggacaagggctctacccatacagcctgctcgggcccgatcgacgagctcctagatatgaaaagcgaggagggtgcctgcttagggccagttgccgggacccctgagccggagggggccgataaggacgatttgctcttgctatctgagattttcaacgctagctccttggaggaaggcgaatttagcaaggagtgggcggcggtgtttggtgatggacaggtgaaggagccggtgcccacgatggccctgggtgagccagatcccaaagctcagaccggtagtggatttctgcctagtcagctgcttgatcagaatatgaaggacctccaggcaagcctgcaggaacccgccaaggcagcatccgatcttaccgcatggttctccctgtttgcagacttggaccccctgtctaatcctgacgccgtgggaaagacggataaggagcatgaactgctcaatgcttag

SEQ ID NO: 151469 - DNA, 1452 bp, Artificial Sequence
  derived and/or modified sequence
atgtccggacataaatgtagttacccttgggatttgcaagaccgatacgctcaggataagtcagtggtgaacaaaatgcagcagaaatattgggaaactaaacaggccttcataaaggcaacaggaaaaaaggaggatgagcacgtggttgcttccgacgctgatctagatgctaagctggagctttttcactccatccaacgcacctgcctggatctctcaaaggccatcgtgctttaccaaaaaagaatctgcttccttagccaggaggaaaacgaactcgggaagtttctccggtctcagggcttccaggacaagaccagagccggcaaaatgatgcaagctaccggcaaggctctgtgcttcagtagtcagcagcggctcgcccttagaaaccctctgtgtcgctttcaccaggaggtagagacttttaggcatagggcgatcagtgatacatggctgacagtcaatcggatggaacagtgccgtactgaataccgtggagcattactatggatgaaagatgtatctcaagaactcgaccccgatttgtacaagcagatggagaaattccggaaggtgcagacacaggtgcgccttgccaagaagaacttcgacaagctcaagatggatgtttgtcagaaagtagatctgctaggggcatcgcggtgtaacctgctgagccacatgctggcaacttatcagactaccctcctacatttttgggagaagaccagccacacgatggcggctatccacgaatcatttaagggatatcagccctacgagtttacaacactgaagtccctgcaagaccctatgaagaaactcgtggagaaggaagagaagaaaaagataaatcagcaagaaagcaccgatgccgctgtgcaggagccatcccagctgatttccctcgaagaggagaatcagaggaaagagagttcttcctttaaaacagaagacggtaagagcatcttatccgccctggacaaagggtctactcacacagcatgctcaggtcccattgacgagctgcttgacatgaagagtgaggagggtgcttgcctagggcctgtggccggaacccccgagccagagggagccgataaggacgacctgttactcttgtccgaaattttcaacgcctcaagtctggaggagggggagttctctaaagagtgggcagccgtgttcggagacgggcaggttaaggaacctgtgcctacgatggctcttggcgagccagaccctaaggcacagacgggatcggggttcttgccttctcagctgctggaccagaatatgaaagatctgcaggcaagcctgcaggagcccgccaaagctgcgtctgatctaaccgcctggtttagtctgttcgccgatttagatcctctgtccaacccggacgctgtgggtaagacagataaagagcatgaactgttaaacgcttag

SEQ ID NO: 151470 - DNA, 489 bp, Artificial Sequence
  derived and/or modified sequence
atgagcgggcacaagtgctcatatccatgggacctgcaggatcggtacgcccaggataagagtgtcgtgaacaagatgcaacagaagtattgggagaccaagcaggccttcatcaaggcaaccgggaaaaaagaagatgagcacgttgtcgccagtgacgcagacttagacgccaaactggagcttttccactccattcagcggacctgcctcgatctttccaaagctattgtcctttaccaaaagaggatctgtttcctgagccaggaagaaaacgaactgggaaagttcctacgcagtcagggattccaggacaaaacacgcgccgggaaaatgatgcaggcaacaggaaaggcactgtgtttctcttcccagcagaggctggccctccggaatcccttatgcagattccaccaggaggtggaaacgttccgacacagagctatatctgatacatggctcaccgtaaacaggatggagcagtgctag

SEQ ID NO: 151471 - DNA, 1415 bp, Artificial Sequence
  derived and/or modified sequence
taccccaggagatgggggtcgaggagagaccccggggagtagagagagagaaactcactccccgagtccccgaccctccccaagcaaggttataatataacttatcctctcatgcttttttcctgccccttctccccaaatcatcaacaatagaagaagaagaaaacatgtcaggacacaaatgcagttatccctgggacttacaggatcgatatgctcaagataagtcagttgtaaataagatgcaacagaaatattgggagacgaagcaggcctttattaaagccacagggaagaaggaagatgaacatgttgttgcctctgacgcggacctggatgccaagctagagctgtttcattcaattcagagaacctgtctggacttatcgaaagcaattgtactctatcaaaagaggatatgtttcttgtctcaagaagaaaacgaactgggaaaatttcttcgatcccaaggtttccaagataaaaccagagcaggaaagatgatgcaagcgacaggaaaggccctctgcttttcttcccagcaaaggttggccttacgaaatcctttgtgtcgatttcaccaagaagtggagacttttcggcatcgggccatctcagatacttggctgacggtgaaccgcatggaacagtgcaggacggaatatagaggagcactattatggatgaaggacgtgtctcaggagcttgatccagacctctacaagcaaatggagaagttcaggaaggtacaaacacaagtgcgccttgcaaaaaaaaactttgacaaattgaagatggatgtttgtcaaaaagtggatcttcttggagcgagcagatgcaatctcttgtctcacatgctagcaacataccagcttgcctgggaccagtggcagggaccccggaacctgaaggtgctgacaaagatgacctgctgctgttgagtgagatcttcaatgcttcctccttggaagagggcgagttcagcaaagagtgggccgctgtgtttggagacggccaagtgaaggagccagtgcccactatggccctgggagagccagaccccaaggcccagacaggctcaggtttccttccttcgcagcttttagaccaaaatatgaaagacttacaggcctcgctacaagaacctgctaaggctgcctcagacctgactgcctggttcagcctcttcgctgacctcgacccactctcaaatcctgatgctgttgggaaaaccgataaagaacacgaattgctcaatgcatgaatctgtacccttcgggagggcactcacatgccgcccccagcagctcccctgggggctagcagaagtataaagtgatcagtatgctgttttaataattatgtgccattttaataaaatgaaagggtcaacggccctgtttatattggtataa

SEQ ID NO: 151472 - DNA, 2133 bp, Artificial Sequence
  derived and/or modified sequence
gctgcaggaagcagcaggagacgcccggcagccgggacggtcggggacgcctgaagaagaagaaaacatgtcaggacacaaatgcagttatccctgggacttacaggatcgatatgctcaagataagtcagttgtaaataagatgcaacagaaatattgggagacgaagcaggcctttattaaagccacagggaagaaggaagatgaacatgttgttgcctctgacgcggacctggatgccaagctagagctgtttcattcaattcagagaacctgtctggacttatcgaaagcaattgtactctatcaaaagaggatatgtttcttgtctcaagaagaaaacgaactgggaaaatttcttcgatcccaaggtttccaagataaaaccagagcaggaaagatgatgcaagcgacaggaaaggccctctgcttttcttcccagcaaaggttggccttacgaaatcctttgtgtcgatttcaccaagaagtggagacttttcggcatcgggccatctcagatacttggctgacggtgaaccgcatggaacagtgcaggacggaatatagaggagcactattatggatgaaggacgtgtctcaggagcttgatccagacctctacaagcaaatggagaagttcaggaaggtacaaacacaagtgcgccttgcaaaaaaaaactttgacaaattgaagatggatgtttgtcaaaaagtggatcttcttggagcgagcagatgcaatctcttgtctcacatgctagcaacataccagaccactctgcttcatttttgggagaaaacttctcacactatggcagccatccatgagagtttcaaaggttatcaaccatatgaatttactactttaaagagcttacaagaccctatgaaaaaattagttgagaaagaagagaagaagaaaatcaaccagcaggaaagtacagatgcagccgtgcaggagccgagccaattaatttcattagaggaagaaaaccagcgcaaggaatcctctagttttaagactgaagatggaaaaagtattttatctgccttagacaaaggctctacacatactgcatgctcaggacccatagatgaactattagacatgaaatctgaggaaggtgcttgcctgggaccagtggcagggaccccggaacctgaaggtgctgacaaagatgacctgctgctgttgagtgagatcttcaatgcttcctccttggaagagggcgagttcagcaaagagtgggccgctgtgtttggagacggccaagtgaaggagccagtgcccactatggccctgggagagccagaccccaaggcccagacaggctcaggtttccttccttcgcagcttttagaccaaaatatgaaagacttacaggcctcgctacaagaacctgctaaggctgcctcagacctgactgcctggttcagcctcttcgctgacctcgacccactctcaaatcctgatgctgttgggaaaaccgataaagaacacgaattgctcaatgcatgaatctgtacccttcgggagggcactcacatgccgcccccagcagctcccctgggggctagcagaagtataaagtgatcagtatgctgttttaataattatgtgccattttaataaaatgaaagggtcaacggccctgtttatattggtataattatttactcttatttggtataaagggttttcgtgtatctctatgtggatctaaataatacaggattgtctagaagcggtttccaggccaccgctctcctgcctacatcccatcatggctgctgcggtgtcactgggctaccgtgagatccaagttgaaatcagaagcctactttgatggtaggtttgaatgacgtgtcctacagcctcagaggcagcaggaggctagcaaagcttaaatgcctccttctctgcccccagcctctgtcccccttggaggagggctgtaggaagattccctcttcctgccaagccaccttccagtgagctctggatgaagctctggccaaccaaagacactgtccccacagcaggtgcctggtgggccacgtgttctcacactggtggaggagctgggcttctgtccaaggcacaaaccttactatggaaagcagccatatttg

SEQ ID NO: 151473 - DNA, 2458 bp, Artificial Sequence
  derived and/or modified sequence
gctgcgctgcggtgcgcacgggctccgccggttgctattccggctggtggcggccgccgcaggaagggccggttcctgcgctccccccgcccctttccctcgccttcggctgacgctgacgtcggatgagtgatccggagggacgctccgaccgcggccgggaggctcctgggggccggggctccgaggttataatataacttatcctctcatgcttttttcctgccccttctccccaaatcatcaacaatagaagaagaagaaaacatgtcaggacacaaatgcagttatccctgggacttacaggatcgatatgctcaagataagtcagttgtaaataagatgcaacagaaatattgggagacgaagcaggcctttattaaagccacagggaagaaggaagatgaacatgttgttgcctctgacgcggacctggatgccaagctagagctgtttcattcaattcagagaacctgtctggacttatcgaaagcaattgtactctatcaaaagaggatatgtttcttgtctcaagaagaaaacgaactgggaaaatttcttcgatcccaaggtttccaagataaaaccagagcaggaaagatgatgcaagcgacaggaaaggccctctgcttttcttcccagcaaaggttggccttacgaaatcctttgtgtcgatttcaccaagaagtggagacttttcggcatcgggccatctcagatacttggctgacggtgaaccgcatggaacagtgcaggacggaatatagaggagcactattatggatgaaggacgtgtctcaggagcttgatccagacctctacaagcaaatggagaagttcaggaaggtacaaacacaagtgcgccttgcaaaaaaaaactttgacaaattgaagatggatgtttgtcaaaaagtggatcttcttggagcgagcagatgcaatctcttgtctcacatgctagcaacataccagaccactctgcttcatttttgggagaaaacttctcacactatggcagccatccatgagagtttcaaaggttatcaaccatatgaatttactactttaaagagcttacaagaccctatgaaaaaattagttgagaaagaagagaagaagaaaatcaaccagcaggaaagtacagatgcagccgtgcaggagccgagccaattaatttcattagaggaagaaaaccagcgcaaggaatcctctagttttaagactgaagatggaaaaagtattttatctgccttagacaaaggctctacacatactgcatgctcaggacccatagatgaactattagacatgaaatctgaggaaggtgcttgcctgggaccagtggcagggaccccggaacctgaaggtgctgacaaagatgacctgctgctgttgagtgagatcttcaatgcttcctccttggaagagggcgagttcagcaaagagtgggccgctgtgtttggagacggccaagtgaaggagccagtgcccactatggccctgggagagccagaccccaaggcccagacaggctcaggtttccttccttcgcagcttttagaccaaaatatgaaagacttacaggcctcgctacaagaacctgctaaggctgcctcagacctgactgcctggttcagcctcttcgctgacctcgacccactctcaaatcctgatgctgttgggaaaaccgataaagaacacgaattgctcaatgcatgaatctgtacccttcgggagggcactcacatgccgcccccagcagctcccctgggggctagcagaagtataaagtgatcagtatgctgttttaataattatgtgccattttaataaaatgaaagggtcaacggccctgtttatattggtataattatttactcttatttggtataaagggttttcgtgtatctctatgtggatctaaataatacaggattgtctagaagcggtttccaggccaccgctctcctgcctacatcccatcatggctgctgcggtgtcactgggctaccgtgagatccaagttgaaatcagaagcctactttgatggtaggtttgaatgacgtgtcctacagcctcagaggcagcaggaggctagcaaagcttaaatgcctccttctctgcccccagcctctgtcccccttggaggagggctgtaggaagattccctcttcctgccaagccaccttccagtgagctctggatgaagctctggccaaccaaagacactgtccccacagcaggtgcctggtgggccacgtgttctcacactggtggaggagctgggcttctgtccaaggcacaaaccttactatggaaagcagccatatttgcagataccactgtctccttttgtcctcttcgtggctggaattcaaaagcatgtatttctgaagcctcttgtgacattgttttttttttttttttaattaaacagaaaagatatttgacatgcaaa

SEQ ID NO: 151474 - DNA, 2383 bp, Artificial Sequence
  derived and/or modified sequence
actctgggcggcggatccgagcgggggataccccaggagatgggggtcgaggagagaccccggggagtagagagagagaaactcactccccgagtccccgaccctccccaagcaaggttataatataacttatcctctcatgcttttttcctgccccttctccccaaatcatcaacaatagaagaagaagaaaacatgtcaggacacaaatgcagttatccctgggacttacaggatcgatatgctcaagataagtcagttgtaaataagatgcaacagaaatattgggagacgaagcaggcctttattaaagccacagggaagaaggaagatgaacatgttgttgcctctgacgcggacctggatgccaagctagagctgtttcattcaattcagagaacctgtctggacttatcgaaagcaattgtactctatcaaaagaggatatgtttcttgtctcaagaagaaaacgaactgggaaaatttcttcgatcccaaggtttccaagataaaaccagagcaggaaagatgatgcaagcgacaggaaaggccctctgcttttcttcccagcaaaggttggccttacgaaatcctttgtgtcgatttcaccaagaagtggagacttttcggcatcgggccatctcagatacttggctgacggtgaaccgcatggaacagtgcaggacggaatatagaggagcactattatggatgaaggacgtgtctcaggagcttgatccagacctctacaagcaaatggagaagttcaggaaggtacaaacacaagtgcgccttgcaaaaaaaaactttgacaaattgaagatggatgtttgtcaaaaagtggatcttcttggagcgagcagatgcaatctcttgtctcacatgctagcaacataccagaccactctgcttcatttttgggagaaaacttctcacactatggcagccatccatgagagtttcaaaggttatcaaccatatgaatttactactttaaagagcttacaagaccctatgaaaaaattagttgagaaagaagagaagaagaaaatcaaccagcaggaaagtacagatgcagccgtgcaggagccgagccaattaatttcattagaggaagaaaaccagcgcaaggaatcctctagttttaagactgaagatggaaaaagtattttatctgccttagacaaaggctctacacatactgcatgctcaggacccatagatgaactattagacatgaaatctgaggaaggtgcttgcctgggaccagtggcagggaccccggaacctgaaggtgctgacaaagatgacctgctgctgttgagtgagatcttcaatgcttcctccttggaagagggcgagttcagcaaagagtgggccgctgtgtttggagacggccaagtgaaggagccagtgcccactatggccctgggagagccagaccccaaggcccagacaggctcaggtttccttccttcgcagcttttagaccaaaatatgaaagacttacaggcctcgctacaagaacctgctaaggctgcctcagacctgactgcctggttcagcctcttcgctgacctcgacccactctcaaatcctgatgctgttgggaaaaccgataaagaacacgaattgctcaatgcatgaatctgtacccttcgggagggcactcacatgccgcccccagcagctcccctgggggctagcagaagtataaagtgatcagtatgctgttttaataattatgtgccattttaataaaatgaaagggtcaacggccctgtttatattggtataattatttactcttatttggtataaagggttttcgtgtatctctatgtggatctaaataatacaggattgtctagaagcggtttccaggccaccgctctcctgcctacatcccatcatggctgctgcggtgtcactgggctaccgtgagatccaagttgaaatcagaagcctactttgatggtaggtttgaatgacgtgtcctacagcctcagaggcagcaggaggctagcaaagcttaaatgcctccttctctgcccccagcctctgtcccccttggaggagggctgtaggaagattccctcttcctgccaagccaccttccagtgagctctggatgaagctctggccaaccaaagacactgtccccacagcaggtgcctggtgggccacgtgttctcacactggtggaggagctgggcttctgtccaaggcacaaaccttactatggaaagcagccatatttgcagataccactgtctccttttgtcctcttcgtggctggaattcaaaagcatgtatttctgaagcctcttgtgacattgttttttttttttttttaattaaacagaaaagatatttgacatgc

SEQ ID NO: 151475 - DNA, 604 bp, Artificial Sequence
  derived and/or modified sequence
ggatccgagcgggggataccccaggagatgggggtcgaggagagaccccggggagtagagagagagaaactcactccccgagtccccgaccctccccaagcaagaagaagaagaaaacatgtcaggacacaaatgcagttatccctgggacttacaggatcgatatgctcaagataagtcagttgtaaataagatgcaacagaaatattgggagacgaagcaggcctttattaaagccacagggaagaaggaagatgaacatgttgttgcctctgacgcggacctggatgccaagctagagctgtttcattcaattcagagaacctgtctggacttatcgaaagcaattgtactctatcaaaagaggatatgtttcttgtctcaagaagaaaacgaactgggaaaatttcttcgatcccaaggtttccaagataaaaccagagcaggaaagatgatgcaagcgacaggaaaggccctctgcttttcttcccagcaaaggttggccttacgaaatcctttgtgtcgatttcaccaagaagtggagacttttcggcatcgggccatctcagatacttggctgacggtgaaccgcatggaacagtgc

SEQ ID NO: 151476 - DNA, 774 bp, Artificial Sequence
  derived and/or modified sequence
atgagcggccacaagtgcagctacccctgggacctgcaggacagatatgcccaggacaagtctgtggtgaacaagatgcagcagaagtactgggagaccaagcaggccttcatcaaggccaccgggaagaaggaggatgagcacgtggtggccagtgatgctgacctggatgccaagctggagctgttccacagcatccagaggacctgcctggacctgagcaaggccatcgtgctgtaccagaagaggatctgcttcctgagccaggaggagaatgagctgggcaagttcctgcggagccagggcttccaggacaagaccagggctgggaagatgatgcaggccaccgggaaggccctgtgcttcagcagccagcagaggctggccctgaggaaccccctgtgccgcttccaccaggaggtggagaccttccgccaccgggccatcagtgacacctggctgactgtgaacaggatggagcagtgcaggacagagtacagaggagccctgctgtggatgaaggatgtgtcccaggagctggaccctgacctgtacaagcagatggagaagttcaggaaggtgcagacccaggtgcggctggccaagaagaactttgacaagctgaagatggatgtgtgccagaaggtggacctgctgggcgccagccgctgcaacctgctgagccacatgctggccacctaccagctggcctgggaccagtggcagggccccaggaacctgaaggtgctgaccaagatgacctgctgctgctag

SEQ ID NO: 151477 - DNA, 1452 bp, Artificial Sequence
  derived and/or modified sequence
atgagcggccacaagtgcagctacccctgggacctgcaggacagatatgcccaggacaagtctgtggtgaacaagatgcagcagaagtactgggagaccaagcaggccttcatcaaggccaccgggaagaaggaggatgagcacgtggtggccagtgatgctgacctggatgccaagctggagctgttccacagcatccagaggacctgcctggacctgagcaaggccatcgtgctgtaccagaagaggatctgcttcctgagccaggaggagaatgagctgggcaagttcctgcggagccagggcttccaggacaagaccagggctgggaagatgatgcaggccaccgggaaggccctgtgcttcagcagccagcagaggctggccctgaggaaccccctgtgccgcttccaccaggaggtggagaccttccgccaccgggccatcagtgacacctggctgactgtgaacaggatggagcagtgcaggacagagtacagaggagccctgctgtggatgaaggatgtgtcccaggagctggaccctgacctgtacaagcagatggagaagttcaggaaggtgcagacccaggtgcggctggccaagaagaactttgacaagctgaagatggatgtgtgccagaaggtggacctgctgggcgccagccgctgcaacctgctgagccacatgctggccacctaccagaccaccctgctgcacttctgggagaagaccagccacaccatggccgccatccacgagagcttcaagggctaccagccctatgagttcaccaccctgaagagcctgcaggaccccatgaagaagctggtggagaaggaggagaagaagaagatcaaccagcaggagagcacagatgctgctgtgcaggagcccagccagctgatcagcctggaggaggagaaccagaggaaggagagcagcagcttcaagacagaagatggcaagagcatcctgagcgccctggacaagggcagcacccacacagcctgcagcggccccattgatgagctgctggacatgaagtctgaggagggcgcctgcctgggccctgtggccggcaccccagagcctgagggcgctgacaaggatgacctgctgctgctgtctgagatcttcaatgccagcagcctggaggagggggagttcagcaaggagtgggccgctgtgtttggagatggccaggtgaaggagcctgtgcccaccatggccctgggggagccagaccccaaggcccagacaggcagcggcttcctgcccagccagctgctggaccagaacatgaaggacctgcaggccagcctgcaggagcccgccaaggccgccagtgacctgacagcctggttcagcctgtttgctgacctggaccccctgagcaacccagatgctgtgggcaagacagacaaggagcacgagctgctgaatgcctag

SEQ ID NO: 151478 - DNA, 489 bp, Artificial Sequence
  derived and/or modified sequence
atgagcggccacaagtgcagctacccctgggacctgcaggacagatatgcccaggacaagtctgtggtgaacaagatgcagcagaagtactgggagaccaagcaggccttcatcaaggccaccgggaagaaggaggatgagcacgtggtggccagtgatgctgacctggatgccaagctggagctgttccacagcatccagaggacctgcctggacctgagcaaggccatcgtgctgtaccagaagaggatctgcttcctgagccaggaggagaatgagctgggcaagttcctgcggagccagggcttccaggacaagaccagggctgggaagatgatgcaggccaccgggaaggccctgtgcttcagcagccagcagaggctggccctgaggaaccccctgtgccgcttccaccaggaggtggagaccttccgccaccgggccatcagtgacacctggctgactgtgaacaggatggagcagtgctag

SEQ ID NO: 151479 - DNA, 774 bp, Artificial Sequence
  derived and/or modified sequence
atgagcggccacaagtgcagctacccctgggacctgcaggaccggtacgcccaagacaaaagtgttgtgaataaaatgcagcagaagtactgggaaacgaagcaggcctttatcaaagccaccggcaagaaagaggatgagcatgtggtggccagtgacgcagatctggacgctaagcttgaactttttcatagtattcaaagaacttgtttggacttgagcaaggccatagtgctctatcagaagcggatctgttttttatcccaggaagagaacgaacttggcaagtttctcagatctcagggctttcaggacaaaaccagggccggcaagatgatgcaagctaccggaaaagctctgtgcttctcatcacagcaacgcttagcactgcggaaccccctgtgccggttccaccaggaggtcgagactttccgacatcgggccatatctgatacttggcttaccgtgaaccgaatggagcagtgccggacagaataccggggagcacttctctggatgaaagacgtcagccaggagctggatcctgatctgtacaagcagatggagaagttccggaaagtgcagacccaagtccgattagcaaagaaaaattttgataagctgaaaatggatgtatgtcagaaggtagatttgctgggtgcatcgagatgtaacctcctgagccatatgctggcaacctaccagctggcctgggaccagtggcaagggccaaggaatctcaaggttctgaccaagatgacttgctgttgctag

SEQ ID NO: 151480 - DNA, 1452 bp, Artificial Sequence
  derived and/or modified sequence
atgagcggccacaagtgcagctacccctgggacctgcaggaccggtatgcccaggataaaagtgtggtgaacaagatgcagcagaagtactgggagactaaacaagctttcatcaaggccaccggcaaaaaagaggatgagcacgtagtggccagtgatgctgatttggatgctaagctggagcttttccattccatacagcgcacatgtctggacttgtcaaaagctatcgtactgtatcagaagaggatctgctttctctctcaggaggagaatgaactgggcaaattcctgcgcagtcagggattccaggacaaaactcgggcgggtaagatgatgcaggcaaccgggaaagcactgtgcttctccagtcagcagagattggcgctccggaatcctttatgcagatttcaccaggaggtggaaaccttccgccatcgggcgatctctgacacatggttaacagtgaacaggatggagcagtgcagaacagagtacagaggcgcactactgtggatgaaagacgtcagtcaagaactagatcccgatctctacaagcagatggagaaatttcgtaaggtgcagacccaggtgagactcgcaaaaaagaatttcgacaagctgaagatggacgtgtgccagaaagtggatctattgggggcttccaggtgtaatcttctgtctcacatgctcgctacataccagactactttattgcacttctgggagaaaaccagccacacgatggctgccatccatgagtcttttaagggttaccagccatacgagtttaccaccttgaaaagcctccaagaccccatgaagaaattggtcgaaaaggaggaaaagaaaaagattaaccagcaggagtctactgacgctgcagttcaggagccttcgcagctcatctccctggaggaggagaatcagaggaaagagtcttcttccttcaagacagaggatggaaagtcgatcctcagcgccctggataaggggtctacgcacaccgcatgctccggccccatagacgagcttcttgatatgaagagtgaggagggagcttgcttgggaccagtggctggtacaccggagcctgaaggcgcagataaagacgacctccttcttctctctgaaatctttaacgcctcttccctcgaggagggcgagtttagtaaagaatgggcagccgtctttggcgacgggcaggtcaaagagccggtgccgacgatggcattgggggaaccagacccaaaagcccagacgggatcggggtttctgccatcccaattactagatcaaaatatgaaagacttacaagctagcctccaggaacctgccaaggccgccagcgacctgacggcttggttctccttatttgccgatctggatcccctctcaaaccctgatgccgttggaaagacagataaagagcacgaactgctgaacgcctag

SEQ ID NO: 151481 - DNA, 1452 bp, Artificial Sequence
  derived and/or modified sequence
atgagcggccacaagtgcagctacccctgggacctgcaggaccggtacgcccaggacaagagcgttgtgaataaaatgcagcagaaatactgggagacgaagcaggcatttattaaagccacgggaaaaaaggaggatgagcatgtagtggcctcagacgcggacctggatgcaaaactcgagctctttcatagtatccaaaggacctgcctagatttatctaaagctatcgtcctgtaccaaaaaaggatctgctttttgtcacaggaagagaacgaactagggaaattccttagaagccagggattccaggacaaaaccagggccggtaagatgatgcaagcaaccgggaaggcgctgtgctttagtagtcagcagagacttgccttgaggaatccactgtgccgcttccatcaggaggtggaaacttttaggcacagagcgatttccgatacatggttgactgtcaaccgcatggagcagtgtcgaacagagtataggggtgccttactctggatgaaagatgtttctcaggaacttgaccccgacttgtacaagcagatggaaaagtttagaaaggtacagacacaggtcaggctggccaagaaaaacttcgataaactgaagatggatgtttgccagaaggtggatttactcggcgcatccagatgcaatctccttagccacatgctggctacatatcagaccactttgttacatttctgggaaaaaacttctcatacaatggcagctatccatgagagctttaaagggtatcaaccttacgaattcacaacactaaaatcactgcaggaccctatgaaaaaactggtggaaaaggaagagaagaagaaaatcaaccagcaggagtcaacagacgccgccgtgcaggagccctctcagctgatctctttagaagaggaaaaccaacgaaaagagtctagttccttcaagaccgaggatggcaagagcatcctatctgcattggacaagggtagtactcacaccgcttgttctgggcccattgatgagctactggacatgaagtccgaggaaggcgcctgtctggggcctgttgctggcacgccagagcctgaaggtgctgacaaggatgacttattgcttctgtcagagatcttcaacgcttcttccctggaagagggggaattttccaaggagtgggctgccgttttcggggacggccaggtaaaggagcccgtgcccaccatggccctcggcgaaccggaccctaaggctcaaacagggtccggttttctgcctagccagttattagaccaaaatatgaaggaccttcaggctagtcttcaggaaccagccaaggccgcaagcgacttaacggcgtggttctccctgttcgctgacctggatccactgtccaatccggatgcggtcggtaagacagataaagagcatgagctgctgaacgcctag

SEQ ID NO: 151482 - DNA, 1452 bp, Artificial Sequence
  derived and/or modified sequence
atgagcggccacaagtgcagctacccctgggacctgcaggaccggtatgctcaggacaagagcgtcgtgaacaaaatgcaacagaagtactgggagactaaacaggctttcataaaggcaactggcaagaaagaggacgagcatgttgtagctagtgacgccgacctcgatgctaaactggaactgtttcattcaattcagaggacttgcctagatttatccaaggccatagtcctgtatcaaaagaggatctgcttcttaagtcaggaggagaatgaactgggcaagttcctacgatcacaggggttccaggacaaaacaagagccgggaagatgatgcaggctaccgggaaggcgctttgtttttcgtcacagcagagactggcacttaggaacccgctgtgtaggtttcatcaagaagtggaaacctttcgacatcgtgccatatctgatacttggctcacagttaacaggatggaacagtgcagaaccgaatatcgaggcgctttactgtggatgaaagatgtatcacaggagctcgaccccgacctgtacaaacaaatggagaaatttaggaaagtccagacccaggtccgcctggctaagaaaaattttgataagctcaagatggatgtgtgtcaaaaagtggacttactcggggcttctcgctgtaatttattatctcatatgctggccacttatcagacaaccctgctgcacttctgggagaaaaccagtcacactatggctgctattcatgaatcgtttaaggggtatcagccatacgagttcactactcttaaaagcctgcaagatcctatgaaaaagttggtagagaaggaagaaaagaagaagatcaaccagcaagaatccacagatgccgccgtgcaggaaccgagtcagctgatatcattggaagaggaaaaccaacgaaaggagtctagcagttttaagactgaggacgggaagtcaatcctgtccgccctcgacaagggatccacccacaccgcgtgttcaggaccaatcgacgagctgctcgatatgaagagtgaagagggcgcgtgtctgggtcctgtggcgggaacaccagagcctgaaggggctgataaggatgatctgcttttactctctgagatctttaacgcttctagcctggaggaaggagagttctccaaagaatgggcagccgtgtttggcgatggacaggttaaggagccagtgcccaccatggccttgggcgagccagaccccaaggcacagacaggcagtgggttcctgccgtcgcagctgctagatcagaatatgaaggatcttcaggcctccctgcaggaaccggctaaggctgcgagcgatctgaccgcctggttcagcctttttgccgacttggatcctcttagcaacccggatgccgtgggaaaaaccgataaggaacatgagctgcttaatgcctag

SEQ ID NO: 151483 - DNA, 489 bp, Artificial Sequence
  derived and/or modified sequence
atgagcggccacaagtgcagctacccctgggacctgcaggaccggtacgctcaagacaaatccgtcgttaacaagatgcaacagaaatactgggaaacaaagcaagcttttatcaaagcaactggcaagaaggaggacgagcacgttgtggcctccgacgctgatctggatgcgaagttagagctgtttcatagtatccagagaacgtgcctcgatttatccaaagcaatcgtgttgtaccaaaagagaatctgcttcctgagccaggaagagaacgagctgggtaaattcctgcgctctcaagggtttcaagacaagactcgtgccgggaaaatgatgcaagctacagggaaggctttgtgtttttcaagccagcaaaggctagcgcttcgcaatcccctctgtagattccaccaggaggtcgagacattcagacatcgtgccatcagtgatacttggttaacggtcaatcggatggagcagtgctag

SEQ ID NO: 151484 - DNA, 774 bp, Artificial Sequence
  derived and/or modified sequence
atgtctggacacaaatgctcctacccttgggacttgcaagaccggtacgcgcaggataaaagcgtcgtaaacaagatgcaacagaaatactgggaaactaagcaggccttcattaaagctaccggtaagaaagaggatgagcatgttgtagcgtcggatgctgatctggatgctaaattggagcttttccacagtattcagaggacatgtctcgatctgtcaaaagcaatagttctgtaccagaagagaatctgcttcttgtcgcaggaggaaaatgagctgggaaaatttctaagatcacagggtttccaggataagactagggccggaaagatgatgcaagccacaggcaaagcattatgtttttctagccaacagagacttgcacttcggaatccgctctgtcgttttcaccaggaggtggagactttcagacatcgggctattagcgatacctggctgaccgtcaatcgcatggaacagtgtcggacagaatatcgtggggctctgctgtggatgaaggacgtaagccaagaacttgatccagacctgtacaagcaaatggagaagtttcgcaaggtacagacgcaggtgagactcgctaagaagaacttcgataaattaaaaatggatgtatgccagaaggtagacttgctaggagcttccaggtgtaaccttctgtctcatatgctagctacataccaattagcctgggatcagtggcagggacccaggaatttaaaagtgctcacgaagatgacttgctgctgctag

SEQ ID NO: 151485 - DNA, 1452 bp, Artificial Sequence
  derived and/or modified sequence
atgtcagggcacaaatgttcctacccttgggatttgcaggatcgatacgcgcaagataaatccgtggttaacaagatgcaacagaaatattgggagacaaagcaagccttcattaaggcaacaggaaaaaaagaggacgagcatgtcgtggcctccgacgccgatctagatgccaagcttgagctgtttcatagtattcaaagaacctgtctcgacctgtcaaaggcaattgttctctatcagaaacggatttgttttctgagtcaggaggagaatgagctgggtaagtttctgcgatcccaggggttccaggacaaaacacgggctggaaaaatgatgcaggccaccggaaaggcactctgctttagcagccagcagcggctagcactcagaaaccctttatgccgattccatcaggaagtcgaaacctttcgtcaccgggctatttccgatacatggttaaccgtgaaccggatggaacagtgccgcacagaatataggggggcattgctgtggatgaaagatgttagccaagagctagaccccgacctctataagcaaatggaaaagttccgcaaggtgcagacgcaggtccggctcgcaaagaagaactttgataaactaaagatggacgtgtgccagaaggtagatctgcttggagccagcaggtgtaatctcttgtcacacatgctcgccacttaccagaccacattgctgcatttctgggagaagacttcccataccatggcagctattcacgagtcgtttaaaggataccaaccttacgaattcaccacacttaagagtctgcaagacccaatgaaaaaattagtggaaaaggaggagaagaagaagatcaaccaacaggagtccacagacgccgctgttcaggaacccagccagctcattagcctggaggaggagaaccagcgcaaagagagcagttcatttaaaaccgaggacgggaagagcattctgtcagcgctagacaaggggtctacacatactgcctgcagtggccctatagacgagctcttagacatgaagtccgaagaaggagcctgccttgggcctgtcgcgggaacaccagagcccgaaggggctgacaaggatgatttgctgctcctgtccgagattttcaatgcatcttcgctcgaagaaggcgaattcagtaaagaatgggcggcagtattcggcgacggccaggtgaaggaacctgtgccaaccatggctttgggcgagcccgaccctaaggctcaaacgggttcagggttccttccctctcagctgctggaccaaaatatgaaggacctgcaggcctctcttcaggaacctgccaaggccgcttccgaccttacggcttggtttagcctgtttgcggatttggatcccttgagtaacccagacgctgtgggcaagacagacaaggaacatgagctattaaacgcctag

SEQ ID NO: 151486 - DNA, 1452 bp, Artificial Sequence
  derived and/or modified sequence
atgtccggtcacaaatgcagctatccctgggacctgcaggaccgatatgcccaggataaatcagttgtgaacaaaatgcagcaaaaatactgggaaaccaaacaagccttcattaaggctactggtaaaaaggaagacgagcacgtggtcgcctccgatgcagacctggatgctaagctagaactcttccatagcattcagcgaacctgcctggatctctctaaagctatcgtcctgtaccagaagagaatatgctttctttctcaagaagaaaacgaactcggcaagttcctgcggtcgcaaggtttccaggataaaacccgtgcgggtaagatgatgcaggcaacaggcaaagctctgtgttttagctctcagcaacggctagcgctgaggaaccccctgtgcagattccaccaagaagtggagacgttcagacacagggcaatcagcgatacttggcttacggtgaataggatggagcagtgcagaacagagtatagaggagccctgctatggatgaaagatgtttctcaggaactggatccagacctgtacaagcagatggagaagtttcgaaaggttcaaacgcaggtgcggcttgccaagaagaatttcgataagctgaagatggatgtgtgccagaaggtcgatctcctgggtgctagtagatgcaaccttctgtcacatatgctggccacctaccagacgactctactacacttctgggaaaagacatcccatacgatggcagccatacacgagagctttaagggctatcagccctacgagttcaccacattgaaatctctccaggaccccatgaagaagttggtcgagaaggaggagaaaaagaagattaaccagcaggaatccaccgacgccgctgtgcaagagccgtctcaactgatctccctggaggaagagaatcaacgaaaagaatcttctagcttcaagaccgaggacggaaaatcaatcttgtctgctctggacaaaggcagtacacacacagcctgctcaggacccattgacgaattactagatatgaagagtgaggagggtgcctgcctgggcccagtcgccggtacgccggaaccagagggggctgataaagacgacctgctgctgttgtcagaaattttcaatgcatcgagccttgaggaaggcgagtttagcaaggaatgggccgcagtcttcggggatggccaagtgaaggaaccagtgcctacaatggcacttggagagcctgatcccaaggcacagaccggaagcggatttctgccctcccagctcctcgaccaaaatatgaaagacctgcaagcttctctccaagagcccgctaaagcagcatccgaccttaccgcgtggttttcactgtttgcagaccttgacccgctttccaatcctgatgctgttggaaagaccgacaaagaacacgagctccttaacgcctag

SEQ ID NO: 151487 - DNA, 1452 bp, Artificial Sequence
  derived and/or modified sequence
atgagcggacacaagtgttcctacccttgggaccttcaggacaggtatgcacaggacaagagcgtcgttaataagatgcaacaaaagtactgggaaacgaagcaggcatttatcaaagcaacaggaaagaaggaagacgaacacgtggtcgccagcgatgcagacctggatgccaaactggagctcttccactcaatccaacgcacatgcctggacctcagcaaggcaattgtgctgtatcagaaaaggatatgctttctttcacaggaggagaacgaattggggaaattccttcggtcgcagggatttcaggacaagacaagggctggcaagatgatgcaagcaactggtaaggcactttgtttctctagccaacagcgcctcgcattacgcaaccccctctgtcggttccaccaggaggtagagacctttcgtcatcgcgctatcagcgacacctggctgaccgtgaaccggatggaacagtgccgcaccgagtacagaggtgcactactgtggatgaaagacgtgtctcaggagctggacccagatctgtataagcagatggaaaagtttaggaaggtgcagactcaggtgaggttggcaaagaaaaacttcgacaagctgaaaatggacgtgtgtcagaaagtcgacctgctcggggcttccaggtgcaaccttctgtcgcacatgctcgccacgtatcagactaccctgcttcatttctgggagaaaacatcacatacaatggcggcaatccatgaatcctttaaaggctatcagccctatgaattcacaactctgaagagtctgcaagatccaatgaagaagctggtggagaaggaggagaagaagaaaattaatcagcaagagtcgactgatgctgctgtccaggagcctagtcaactcatcagcctggaagaggaaaatcaacggaaagagagcagctctttcaagacagaggacggcaaatcaatcctctccgcgctggacaagggatcaacccacacagcgtgcagcgggcctattgatgagttgttggatatgaagagtgaggagggcgcatgtctgggcccagtggctggcacaccagaacccgagggcgcagataaagacgacctcctgctcctgtcagaaatttttaacgcaagttctctcgaggaaggggagttttctaaagagtgggcagcagtgtttggggatggccaggttaaggagcccgtcccaactatggcacttggcgagcccgaccccaaggcccagacagggagcggattcctcccttcacaattattagaccaaaacatgaaggatcttcaggcttcactgcaagagccggctaaagcggcttcggatctgacggcctggttttccctattcgctgacctggacccactcagtaacccggacgccgtgggaaaaactgataaagagcacgaactcttgaatgcctag

SEQ ID NO: 151488 - DNA, 489 bp, Artificial Sequence
  derived and/or modified sequence
atgagcgggcataaatgttcttatccttgggatctacaggataggtatgctcaggataagtcggttgtcaataagatgcagcagaagtactgggagacaaaacaggccttcattaaagcaacaggcaaaaaagaggatgaacacgtggtggcttccgacgccgacctcgacgcaaagctggaactcttccattctattcagaggacgtgtctggacttaagcaaagctatcgtgctctaccagaagagaatatgcttcctgtcacaggaggaaaacgagctgggtaaattccttaggagtcaggggttccaggacaaaacccgtgccggaaaaatgatgcaggctaccgggaaagccctgtgttttagttcgcagcagaggctggctctgcggaacccgctgtgcagattccaccaagaagtggagacttttagacatagagccatatctgatacttggctcaccgtgaataggatggaacagtgttag

SEQ ID NO: 151489 - DNA, 774 bp, Artificial Sequence
  derived and/or modified sequence
atgagcggccacaagtgcagctacccctgggacctgcaggacagatacgcccaggacaagagcgtggtgaacaagatgcagcagaagtactgggagaccaagcaggccttcatcaaggccaccggcaagaaggaggacgagcacgtggtggccagcgacgccgacctggacgccaagctggagctgttccacagcatccagagaacctgcctggacctgagcaaggccatcgtgctgtaccagaagagaatctgcttcctgagccaggaggagaacgagctgggcaagttcctgagaagccagggcttccaggacaagaccagagccggcaagatgatgcaggccaccggcaaggccctgtgcttcagcagccagcagagactggccctgagaaaccccctgtgcagattccaccaggaggtggagaccttcagacacagagccatcagcgacacctggctgaccgtgaacagaatggagcagtgcagaaccgagtacagaggcgccctgctgtggatgaaggacgtgagccaggagctggaccccgacctgtacaagcagatggagaagttcagaaaggtgcagacccaggtgagactggccaagaagaacttcgacaagctgaagatggacgtgtgccagaaggtggacctgctgggcgccagcagatgcaacctgctgagccacatgctggccacctaccagctggcctgggaccagtggcagggccccagaaacctgaaggtgctgaccaagatgacctgctgctgctag

SEQ ID NO: 151490 - DNA, 1452 bp, Artificial Sequence
  derived and/or modified sequence
atgagcggccacaagtgcagctacccctgggacctgcaggacagatacgcccaggacaagagcgtggtgaacaagatgcagcagaagtactgggagaccaagcaggccttcatcaaggccaccggcaagaaggaggacgagcacgtggtggccagcgacgccgacctggacgccaagctggagctgttccacagcatccagagaacctgcctggacctgagcaaggccatcgtgctgtaccagaagagaatctgcttcctgagccaggaggagaacgagctgggcaagttcctgagaagccagggcttccaggacaagaccagagccggcaagatgatgcaggccaccggcaaggccctgtgcttcagcagccagcagagactggccctgagaaaccccctgtgcagattccaccaggaggtggagaccttcagacacagagccatcagcgacacctggctgaccgtgaacagaatggagcagtgcagaaccgagtacagaggcgccctgctgtggatgaaggacgtgagccaggagctggaccccgacctgtacaagcagatggagaagttcagaaaggtgcagacccaggtgagactggccaagaagaacttcgacaagctgaagatggacgtgtgccagaaggtggacctgctgggcgccagcagatgcaacctgctgagccacatgctggccacctaccagaccaccctgctgcacttctgggagaagaccagccacaccatggccgccatccacgagagcttcaagggctaccagccctacgagttcaccaccctgaagagcctgcaggaccccatgaagaagctggtggagaaggaggagaagaagaagatcaaccagcaggagagcaccgacgccgccgtgcaggagcccagccagctgatcagcctggaggaggagaaccagagaaaggagagcagcagcttcaagaccgaggacggcaagagcatcctgagcgccctggacaagggcagcacccacaccgcctgcagcggccccatcgacgagctgctggacatgaagagcgaggagggcgcctgcctgggccccgtggccggcacccccgagcccgagggcgccgacaaggacgacctgctgctgctgagcgagatcttcaacgccagcagcctggaggagggcgagttcagcaaggagtgggccgccgtgttcggcgacggccaggtgaaggagcccgtgcccaccatggccctgggcgagcccgaccccaaggcccagaccggcagcggcttcctgcccagccagctgctggaccagaacatgaaggacctgcaggccagcctgcaggagcccgccaaggccgccagcgacctgaccgcctggttcagcctgttcgccgacctggaccccctgagcaaccccgacgccgtgggcaagaccgacaaggagcacgagctgctgaacgcctag

SEQ ID NO: 151491 - DNA, 489 bp, Artificial Sequence
  derived and/or modified sequence
atgagcggccacaagtgcagctacccctgggacctgcaggacagatacgcccaggacaagagcgtggtgaacaagatgcagcagaagtactgggagaccaagcaggccttcatcaaggccaccggcaagaaggaggacgagcacgtggtggccagcgacgccgacctggacgccaagctggagctgttccacagcatccagagaacctgcctggacctgagcaaggccatcgtgctgtaccagaagagaatctgcttcctgagccaggaggagaacgagctgggcaagttcctgagaagccagggcttccaggacaagaccagagccggcaagatgatgcaggccaccggcaaggccctgtgcttcagcagccagcagagactggccctgagaaaccccctgtgcagattccaccaggaggtggagaccttcagacacagagccatcagcgacacctggctgaccgtgaacagaatggagcagtgctag

SEQ ID NO: 151492 - protein, 1019 aa, Artificial Sequence [sequence omitted]

SEQ ID NO: 151493 - DNA, 3060 bp, Artificial Sequence
  derived and/or modified sequence
atgcgttataggcttgcctggctgctacatcctgcgcttccaagcaccttccgtagcgtgctgggcgcccgactgcctccccctgaacgactgtgtggattccagaaaaagacctatagcaagatgaataaccccgctataaagcgaattgggaatcacatcaccaagtctccagaagacaaacgcgaataccgagggctcgagctggctaacggcatcaaagtgctccttatttcagaccccacaaccgataaaagctccgctgctctggatgtgcacataggttcattgtctgatccgcctaatatcgctggcctctcacatttttgtgaacacatgctctttctgggaacaaaaaagtaccccaaggaaaatgaatattcgcagtttctaagtgagcacgctggctcatcaaacgcgttcacctccggtgagcacacgaactactacttcgatgtcagccatgagcacctggaaggtgccctcgacaggtttgctcagttttttctgtgccccctgttcgatgaaagctgcaaagatagggaagtgaatgcagttgatagcgagcatgaaaaaaacgtgatgaacgatgcgtggcggctgttccaactggagaaggctactggaaatccgaagcatccgttttcaaagttcgggactggcaacaaatataccctggagacaaggcctaaccaagaaggcattgacgtgcgccaggaacttttgaaattccactcagcctattattctagcaacctgatggcagtatgtgtcttggggcgcgagtctctcgatgacctgactaatttggtggttaagttgttcagtgaagtggaaaacaaaaacgtgcccttaccagaattcccagagcaccccttccaagaagagcatctgaagcagctgtataagattgtccccattaaagacattagaaatctgtatgtgaccttccctatccctgatttgcagaagtattataagagcaatcctgggcattaccttggtcatctcattggccacgagggaccaggatcgctgttgagtgaactgaagtccaagggatgggtcaatacactggtgggagggcagaaggagggggcgcgtggcttcatgttcttcataatcaatgtcgacctcactgaggaaggcctgctgcatgtagaggacattattctgcatatgttccagtatattcagaagttacgggcagaaggtcctcaagagtgggtgttccaggaatgcaaggatctgaacgctgtcgcattccgatttaaggataaagagaggccccgggggtataccagtaagatcgccggcattctgcattactatcctttggaagaagtcctcacagctgaatacctcctcgaagagttcaggcccgatttaatcgagatggtgctcgacaaattgcgtccagaaaatgtgcgcgtcgctatcgtgtcaaagagcttcgaaggaaagaccgaccgtaccgaggaatggtacgggacacaatacaaacaggaagcaatccctgatgaagtcataaaaaagtggcagaacgccgacttaaacggtaagtttaagctccctacaaaaaatgaattcattccgacgaacttcgagattctccctctcgaaaaagaggccaccccctatcctgcactcataaaggatactgcgatgtcaaagttatggtttaaacaggatgacaagttcttcttgccaaaggcgtgccttaactttgagttttttagcccctttgcttacgtggaccctctacactgtaacatggcatacctttacctggagctcctgaaggatagcctcaacgaatatgcttacgccgccgagctggccggcttgtcttacgacctgcagaatacaatctacggaatgtatctgtcagtcaaaggatataacgataagcaacccatactgctcaagaagatcattgagaaaatggctacatttgagatcgacgaaaagcggtttgaaataatcaaggaggcttatatgcggagcctgaacaacttcagggctgagcagccccaccaacacgctatgtattatttaagactgctcatgacagaggtggcttggaccaaagacgaacttaaggaagcccttgatgatgtgactctaccacggcttaaggcattcatccctcagctgttgtcccggcttcacattgaggctctcctgcacggcaatattacaaagcaggccgctctgggcattatgcagatggttgaggacacactcatagaacatgcgcacaccaagccacttcttcccagtcaactggtgcgatatcgtgaggttcagctgcccgaccggggctggttcgtataccagcagaggaacgaagtccacaataattgcggcattgagatctactaccagacggatatgcagtcaacatctgaaaacatgttcttggaattattttgtcaaatcatctcagagccgtgtttcaacacgctgcggaccaaagaacaactcgggtacatagtattctctggacctcggagagcaaacggaatacaggggctccgctttattattcagagtgagaagcctcctcactatctggagtctcgagtggaagcctttctgattaccatggagaagtctattgaagacatgactgaagaagcttttcagaagcacatccaggcactggctatcagacgccttgacaagcccaaaaagctctctgcagaatgtgccaagtactggggagagatcatttcgcaacaatacaattttgatcgcgataataccgaggtagcctatctcaagaccttgacgaaggaggatattattaaattttataaggagatgctggcagtcgacgcccctcgccgccataaggtttctgtgcacgtgctggctagggagatggacagctgccccgttgttggagagttcccgtgccagaacgatattaacctgagccaagctcctgcgctgccgcagccagaagttattcaaaatatgaccgagtttaagagggggcttccactgtttccattagttaagccacacatcaattttatggcagctaagctctag

SEQ ID NO: 151494 - DNA, 5877 bp, Artificial Sequence
  derived and/or modified sequence
ccggctcgaagcgcaagcaggaagcgtttgcggtgatcccggcgactgcgctggctaatgcggtaccggctagcgtggcttctgcaccccgcactgcccagcaccttccgctcagtcctcggcgcccgcctgccgcctccggagcgcctgtgtggtttccaaaaaaagacttacagcaaaatgaataatccagccatcaagagaataggaaatcacattaccaagtctcctgaagacaagcgagaatatcgagggctagagctggccaatggtatcaaagtacttcttatcagtgatcccaccacggataagtcatcagcagcacttgatgtgcacataggttcattgtcggatcctccaaatattgctggcttaagtcatttttgtgaacatatgctttttttgggaacaaagaaataccctaaagaaaatgaatacagccagtttctcagtgagcatgcaggaagttcaaatgcctttactagtggagagcataccaattactattttgatgtttctcatgaacacctagaaggtgccctagacaggtttgcacagttttttctgtgccccttgttcgatgaaagttgcaaagacagagaggtgaatgcagttgattcagaacatgagaagaatgtgatgaatgatgcctggagactctttcaattggaaaaagctacagggaatcctaaacaccccttcagtaaatttgggacaggtaacaaatatactctggagactagaccaaaccaagaaggcattgatgtaagacaagagctactgaaattccattctgcttactattcatccaacttaatggctgtttgtgttttaggtcgagaatctttagatgacttgactaatctggtggtaaagttattttctgaagtagagaacaaaaatgttccattgccagaatttcctgaacaccctttccaagaagaacatcttaaacaactttacaaaatagtacccattaaagatattaggaatctctatgtgacatttcccatacctgaccttcagaaatactacaaatcaaatcctggtcattatcttggtcatctcattgggcatgaaggtcctggaagtctgttatcagaacttaagtcaaagggctgggttaatactcttgttggtgggcagaaggaaggagcccgaggttttatgttttttatcattaatgtggacttgaccgaggaaggattattacatgttgaagatataattttgcacatgtttcaatacattcagaagttacgtgcagaaggacctcaagaatgggttttccaagagtgcaaggacttgaatgctgttgcttttaggtttaaagacaaagagaggccacggggctatacatctaagattgcaggaatattgcattattatcccctagaagaggtgctcacagcggaatatttactggaagaatttagacctgacttaatagagatggttctcgataaactcagaccagaaaatgtccgggttgccatagtttctaaatcttttgaaggaaaaactgatcgcacagaagagtggtatggaacccagtacaaacaagaagctataccggatgaagtcatcaagaaatggcaaaatgctgacctgaatgggaaatttaaacttcctacaaagaatgaatttattcctacgaattttgagattttaccgttagaaaaagaggcgacaccataccctgctcttattaaggatacagctatgagcaaactttggttcaaacaagatgataagttttttttgccgaaggcttgtctcaactttgaatttttcagcccatttgcttatgtggaccccttgcactgtaacatggcctatttgtaccttgagctcctcaaagactcactcaacgagtatgcatatgcagcagagctagcaggcttgagctatgatctccaaaataccatctatgggatgtatctttcagtgaaaggttacaatgacaagcagccaattttactaaagaagattattgagaaaatggctacctttgagattgatgaaaaaagatttgaaattatcaaagaagcatatatgcgatctcttaacaatttccgggctgaacagcctcaccagcatgccatgtactacctccgcttgctgatgactgaagtggcctggactaaagatgagttaaaagaagctctggatgatgtaacccttcctcgccttaaggccttcatacctcagctcctgtcacggctgcacattgaagcccttctccatggaaacataacaaagcaggctgcattaggaattatgcagatggttgaagacaccctcattgaacatgctcataccaaacctctccttccaagtcagctggttcggtatagagaagttcagctccctgacagaggatggtttgtttatcagcagagaaatgaagttcacaataactgtggcatcgagatatactaccaaacagacatgcaaagcacctcagagaatatgtttctggagctcttctgtcagattatctcggaaccttgcttcaacaccctgcgcaccaaggagcagttgggctatatcgtcttcagcgggccacgtcgagctaatggcatacagggcttgagattcatcatccagtcagaaaagccacctcactacctagaaagcagagtggaagctttcttaattaccatggaaaagtccatagaggacatgacagaagaggccttccaaaaacacattcaggcattagcaattcgtcgactagacaaaccaaagaagctatctgctgagtgtgctaaatactggggagaaatcatctcccagcaatataattttgacagagataacactgaggttgcatatttaaagacacttaccaaggaagatatcatcaaattctacaaggaaatgttggcagtagatgctccaaggagacataaggtatccgtccatgttcttgccagggaaatggattcttgtcctgttgttggagagttcccatgtcaaaatgacataaatttgtcacaagcaccagccttgccacaacctgaagtgattcagaacatgaccgaattcaagcgtggtctgccactgtttccccttgtgaaaccacatattaacttcatggctgcaaaactctgaagattccccatgcatgggaaagtgcaagtggatgcattcctgagtcttccagagcctaagaaaatcatcttggccactttaatagtttctgattcactattagagaaacaaacaaaaaattgtcaaatgtcattatgtagaaatattataaatccaaagtaaattacaaaatcttatagatgtagaatattttttaaatacatgcctcttaaatattttaaaatttttcttttgattactgagagaaatttccccaatataacaatgcttaaaatgaatgatattcctatagaatcttccttccctattctgtaaaatagtcacttgtccgaagaaagttaaaagttagctcttttctaaaagcctcctagcttgacatagaaggcttcacaacatttagaaaggtaataactttttaaaaattgatcctcaaatttgctttctacttgatggtttcatgtaaatcagtggaaaacattacatttggcagatgataaagcaatgtcatcttttattagtgaaatgctggttatataaggcatggttttaatctttttataaaatttgaacatgttttttatgccaactcgtaaaatgctagaaaaccctacttatttacaatgctagaaatacagacttaccttacatcaattttgtcctaaaccgaatttctcaggattactgtggtttctttcattctgattgaattatattgacctacttcttcatagttggtttgcagtgttccatgagttttacttttcctcatcaacatattgctttaacacaacatatttatttaacacgtacaaatagggtcaacttcagatcctactgagtgtgtgacatgcttttccaacatcagctttttgtaaccacctgtataactttttattacagtgaaattgcagtcagtatgtgaaccaaaatatcttgcccctttatgaatttaaaaggcagccaatacaaagccacctttttggaaatataaaaagtaaagccttgcattcttatatagcaggtcttcataaaactctaaaatcccttgttgctaccagtctaatcttgccttaaatgttaagttattttttgaatatataaatataaacatataaacacagatgatgactggagtagacttttaaaaaaatatttttttcatgagatactattttaggtgaaattgttactgtagatttaacagctgttttgaaatatttactgttattaaaacttgcttcaagagaaattgtgaatatatttccatatacaagcactagtaacagtaagtggccctgtcatccactaactcaggcaaagtaaagaatggcatttttgaaggacattttacctccccatatgatttgattggctaggactttcttctgtaaagtcataccttttcacatcttaagtttttacatttgccattttccaaatctcaattttgggcaagaacgatatagtcacaactatggggctgctttcaaaagcggggctccatttctactgtcagatcaatgtggtgctgtaaccatctttttatccctaccttcaagaacctccttatatgaagcctgtctttatccatcagaaggtgtgtgaaatcatcacttccttctggttttatgtatttgtagactatgcagcttttcattaaactgcaagtatatacaagacagatctgaaattaggcctgagtgttccgatccaccactgtactagtaaataaaaatccacctaccttttatgtggaaaattatgtgctattgagtaacttttagctcttttttaaaaaatgggtgaaatttaagtgtcttttttatgagaatgacacatgaagagatctgagagcaatctcatgtagtcttccatgaacctgcaattgtttggtatgcgtcagcattttccaatttccaggttggatctagagctgctgttgatcactcaggcatactaatggattcatttagatgggtccaagctgcagtccatgagcaataacagactaccccagatactgcagtttacgcagtgcttagtaaatgagatttgtggaactaagttattagttacctgaggcttcttaagaaagtcttcttttttgaccagttgatgtgaaagagggagcatgtgacacagccagtatggtggagtgctagggttatcctgtttacaataaatcgcctgaatttcacctctggagtctgcatttgtattatttttccagttttagtgaaatagtacagtggccagtcctcagcctacctctcaacatcccagtttgaccagatttcttgctttcattgttcataatgcagaaagcagtgaattatattaacattttaaaagtgtttctgggtaacaatgatttttgtcaaatagaagactcaatttcacaaccttaagaatagatcacttttgtaaaacaagaatctcagtatttgatgttggactccttgctgtgagtattgtcactgactccaaacccagaaagatttgttcctgcccttacagggatgaaaataaaaaggatagaaaaaatatttctctcctctacaatgagtccttacatcttcttgccacatctccagctgcagtttaggcagatatcttgttcaatctctgtcttcttgatccctgtcaaaataatttttctactcatatagtggccagttggctcaggcaggcatttcaagaggaatctgcttgttcctcacttttccagcataggacagtggtccagcccgcacagtcagc

SEQ ID NO: 151495 - DNA, 4480 bp, Artificial Sequence
  derived and/or modified sequence
agttgtaactgtagtaggtcagtgatacatggtgcaaaacagcctgggataatattgccagctgccagaccagactagggtggctcaaggggttgccatagtttctaaatcttttgaaggaaaaactgatcgcacagaagagtggtatggaacccagtacaaacaagaagctataccggatgaagtcatcaagaaatggcaaaatgctgacctgaatgggaaatttaaacttcctacaaagaatgaatttattcctacgaattttgagattttaccgttagaaaaagaggcgacaccataccctgctcttattaaggatacagctatgagcaaactttggttcaaacaagatgataagttttttttgccgaaggcttgtctcaactttgaatttttcagcccatttgcttatgtggaccccttgcactgtaacatggcctatttgtaccttgagctcctcaaagactcactcaacgagtatgcatatgcagcagagctagcaggcttgagctatgatctccaaaataccatctatgggatgtatctttcagtgaaaggttacaatgacaagcagccaattttactaaagaagattattgagaaaatggctacctttgagattgatgaaaaaagatttgaaattatcaaagaagcatatatgcgatctcttaacaatttccgggctgaacagcctcaccagcatgccatgtactacctccgcttgctgatgactgaagtggcctggactaaagatgagttaaaagaagctctggatgatgtaacccttcctcgccttaaggccttcatacctcagctcctgtcacggctgcacattgaagcccttctccatggaaacataacaaagcaggctgcattaggaattatgcagatggttgaagacaccctcattgaacatgctcataccaaacctctccttccaagtcagctggttcggtatagagaagttcagctccctgacagaggatggtttgtttatcagcagagaaatgaagttcacaataactgtggcatcgagatatactaccaaacagacatgcaaagcacctcagagaatatgtttctggagctcttctgtcagattatctcggaaccttgcttcaacaccctgcgcaccaaggagcagttgggctatatcgtcttcagcgggccacgtcgagctaatggcatacagggcttgagattcatcatccagtcagaaaagccacctcactacctagaaagcagagtggaagctttcttaattaccatggaaaagtccatagaggacatgacagaagaggccttccaaaaacacattcaggcattagcaattcgtcgactagacaaaccaaagaagctatctgctgagtgtgctaaatactggggagaaatcatctcccagcaatataattttgacagagataacactgaggttgcatatttaaagacacttaccaaggaagatatcatcaaattctacaaggaaatgttggcagtagatgctccaaggagacataaggtatccgtccatgttcttgccagggaaatggattcttgtcctgttgttggagagttcccatgtcaaaatgacataaatttgtcacaagcaccagccttgccacaacctgaagtgattcagaacatgaccgaattcaagcgtggtctgccactgtttccccttgtgaaaccacatattaacttcatggctgcaaaactctgaagattccccatgcatgggaaagtgcaagtggatgcattcctgagtcttccagagcctaagaaaatcatcttggccactttaatagtttctgattcactattagagaaacaaacaaaaaattgtcaaatgtcattatgtagaaatattataaatccaaagtaaattacaaaatcttatagatgtagaatattttttaaatacatgcctcttaaatattttaaaatttttcttttgattactgagagaaatttccccaatataacaatgcttaaaatgaatgatattcctatagaatcttccttccctattctgtaaaatagtcacttgtccgaagaaagttaaaagttagctcttttctaaaagcctcctagcttgacatagaaggcttcacaacatttagaaaggtaataactttttaaaaattgatcctcaaatttgctttctacttgatggtttcatgtaaatcagtggaaaacattacatttggcagatgataaagcaatgtcatcttttattagtgaaatgctggttatataaggcatggttttaatctttttataaaatttgaacatgttttttatgccaactcgtaaaatgctagaaaaccctacttatttacaatgctagaaatacagacttaccttacatcaattttgtcctaaaccgaatttctcaggattactgtggtttctttcattctgattgaattatattgacctacttcttcatagttggtttgcagtgttccatgagttttacttttcctcatcaacatattgctttaacacaacatatttatttaacacgtacaaatagggtcaacttcagatcctactgagtgtgtgacatgcttttccaacatcagctttttgtaaccacctgtataactttttattacagtgaaattgcagtcagtatgtgaaccaaaatatcttgcccctttatgaatttaaaaggcagccaatacaaagccacctttttggaaatataaaaagtaaagccttgcattcttatatagcaggtcttcataaaactctaaaatcccttgttgctaccagtctaatcttgccttaaatgttaagttattttttgaatatataaatataaacatataaacacagatgatgactggagtagacttttaaaaaaatatttttttcatgagatactattttaggtgaaattgttactgtagatttaacagctgttttgaaatatttactgttattaaaacttgcttcaagagaaattgtgaatatatttccatatacaagcactagtaacagtaagtggccctgtcatccactaactcaggcaaagtaaagaatggcatttttgaaggacattttacctccccatatgatttgattggctaggactttcttctgtaaagtcataccttttcacatcttaagtttttacatttgccattttccaaatctcaattttgggcaagaacgatatagtcacaactatggggctgctttcaaaagcggggctccatttctactgtcagatcaatgtggtgctgtaaccatctttttatccctaccttcaagaacctccttatatgaagcctgtctttatccatcagaaggtgtgtgaaatcatcacttccttctggttttatgtatttgtagactatgcagcttttcattaaactgcaagtatatacaagacagatctgaaattaggcctgagtgttccgatccaccactgtactagtaaataaaaatccacctaccttttatgtggaaaattatgtgctattgagtaacttttagctcttttttaaaaaatgggtgaaatttaagtgtcttttttatgagaatgacacatgaagagatctgagagcaatctcatgtagtcttccatgaacctgcaattgtttggtatgcgtcagcattttccaatttccaggttggatctagagctgctgttgatcactcaggcatactaatggattcatttagatgggtccaagctgcagtccatgagcaataacagactaccccagatactgcagtttacgcagtgcttagtaaatgagatttgtggaactaagttattagttacctgaggcttcttaagaaagtcttcttttttgaccagttgatgtgaaagagggagcatgtgacacagccagtatggtggagtgctagggttatcctgtttacaataaatcgcctgaatttcacctctggagtctgcatttgtattatttttccagttttagtgaaatagtacagtggccagtcctcagcctacctctcaacatcccagtttgaccagatttcttgctttcattgttcataatgcagaaagcagtgaattatattaacattttaaaagtgtttctgggtaacaatgatttttgtcaaatagaagactcaatttcacaaccttaagaatagatcacttttgtaaaacaagaatctcagtatttgatgttggactccttgctgtgagtattgtcactgactccaaacccagaaagatttgttcctgcccttacagggatgaaaataaaaaggatagaaaaaatatttctctcctctacaatgagtccttacatcttcttgccacatctccagctgcagtttaggcagatatcttgttcaatctctgtcttcttgatccctgtcaaaataatttttctactcatatagtggccagttggctcaggcaggcatttcaagaggaatctgcttgttcctcacttttccagcataggacagtggtccagcccgcacagtcagc

SEQ ID NO: 151496 - DNA, 3060 bp, Artificial Sequence
  derived and/or modified sequence
atgagataccgcctggcctggctgctgcacccagccctgcccagcaccttccgctctgtgctgggcgcccggctgcccccacctgagcggctgtgtggcttccagaagaagacctacagcaagatgaacaacccagccatcaagagaattggcaaccacatcaccaagagccctgaggacaagcgggagtaccggggcctggagctggccaacggcatcaaggtgctgctgatcagtgaccccaccacagacaagagcagcgctgccctggatgtgcacatcggcagcctgagtgacccccccaacattgctggcctgagccacttctgtgagcacatgctgttcctgggcaccaagaagtaccccaaggaaaatgagtacagccagttcctgtctgagcacgccggcagcagcaatgccttcaccagcggggagcacaccaactactactttgatgtgtcccatgagcacctggagggcgccctggacagatttgcccagttcttcctgtgccccctgtttgatgagagctgcaaggaccgggaggtgaatgctgtggacagcgagcacgagaagaatgtgatgaatgatgcctggaggctcttccagctggagaaggccaccggcaaccccaagcaccccttcagcaagtttggcaccggcaacaagtacaccctggagacccggcccaaccaggagggcattgatgtgcggcaggagctgctgaagttccacagcgcctactacagcagcaacctgatggctgtgtgtgtgctgggccgggagagcctggatgacctgaccaacctggtggtgaagctgttcagcgaggtggagaacaagaatgtgcccctgcctgagttccctgagcaccccttccaggaggagcacctgaagcagctgtacaagatcgtgcccatcaaggacatccggaacctgtatgtgaccttccccatcccagacctgcagaagtactacaagagcaaccctggccactacctgggccacctgattggccacgagggccctggcagcctgctgtctgagctgaagagcaagggctgggtgaacaccctggtgggcggccagaaggagggcgcccggggcttcatgttcttcatcatcaacgtggacctgacagaggagggcctgctgcacgtggaggacatcatcctgcacatgttccagtacatccagaagctgcgggcagagggcccccaggagtgggtgttccaggagtgcaaggacctgaatgctgtggccttccgcttcaaggacaaggagcggccccggggctacaccagcaagattgctggcatcctgcactactaccccctggaggaggtgctgacagctgagtacctgctggaggagttccggccagacctgattgagatggtgctggacaagctgcggccagaaaatgtgcgggtggccatcgtgtccaagagctttgagggcaagacagacagaacagaggagtggtacggcacccagtacaagcaggaggccatcccagatgaagtcatcaagaagtggcagaatgctgacctgaatggcaagttcaagctgcccaccaagaatgagttcatccccaccaactttgagatcctgcccctggagaaggaggccaccccctacccagccctgatcaaggacacagccatgagcaagctgtggttcaagcaggatgacaagttcttcctgcccaaggcctgcctgaactttgagttcttcagcccctttgcctacgtggaccccctgcactgcaacatggcctacctgtacctggagctgctgaaggacagcctgaatgaatatgcctatgctgctgagctggccggcctgtcctatgacctgcagaacaccatctacggcatgtacctgtctgtgaagggctacaatgacaagcagcccatcctgctgaagaagatcatcgagaagatggccacctttgaaattgatgagaagagatttgagatcatcaaggaggcctacatgaggagcctgaacaacttccgggcagagcagccccaccagcacgccatgtactacctgcggctgctgatgacagaggtggcctggaccaaggatgagctgaaggaggccctggatgatgtgaccctgccccggctgaaggccttcatcccccagctgctgagccggctgcacatcgaggccctgctgcacggcaacatcaccaagcaggccgccctgggcatcatgcagatggtggaggacaccctcatcgagcacgcccacaccaagcccctgctgcccagccagctggtgcgctaccgggaggtgcagctgcctgaccggggctggtttgtgtaccagcagagaaatgaggtgcacaacaactgtggcatcgagatctactaccagacagacatgcagagcaccagcgagaacatgttcctggagctgttctgccagatcatcagcgagccctgcttcaacaccctgcggaccaaggagcagctgggctacatcgtgttttctggcccccggcgggccaacggcatccagggcctgcgcttcatcatccagagcgagaagccaccccactacctggagagccgggtggaggccttcctgatcaccatggagaagagcattgaggacatgacagaggaggccttccagaagcacatccaggccctggccatccggcggctggacaagcccaagaagctgtctgcagaatgtgccaagtactggggcgagatcatcagccagcagtacaactttgaccgggacaacacagaggtggcctacctgaagaccctgaccaaggaggacatcatcaagttctacaaggagatgctggccgtggatgccccccggcggcacaaggtgtctgtgcacgtgctggcccgggagatggacagctgccctgtggtgggggagttcccctgccagaatgacatcaacctgagccaggccccagccctgccccagcctgaggtgatccagaacatgacagagttcaagaggggcctgcccctcttccccctggtgaagccccacatcaacttcatggccgccaagctgtag

SEQ ID NO: 151497 - DNA, 3060 bp, Artificial Sequence
  derived and/or modified sequence
atgcggtaccggctggcctggctgctgcaccccgccctgcccagcaccttcagaagtgtgctcggcgctcggctccccccccccgaaaggctatgcggatttcagaaaaagacctattccaagatgaataaccctgcaatcaagaggatcggaaatcacatcactaaatcacctgaggacaagcgtgaataccggggcttggaacttgcaaacggaattaaagtcctgcttatctctgaccctacgacagataagtccagtgcagcgttagatgtgcatattggcagtttgtccgacccccccaacattgctgggctctctcacttttgtgagcatatgctgttccttggaacaaagaagtatccgaaggagaacgaatactcccagttcctttcagaacacgcaggaagcagcaatgccttcacctctggtgagcatacaaactattacttcgatgtgtctcatgaacacttggaaggagcacttgatcgctttgctcagttcttcttgtgcccactgtttgacgagagttgcaaggacagagaggtgaatgcagtggatagtgaacatgaaaagaatgtcatgaatgatgcctggagactgttccagctcgagaaagccaccgggaacccaaagcacccattctcaaaatttggcacagggaacaagtatacgctggaaacccgacccaatcaggaagggatcgatgtgagacaggagctgctgaaattccacagtgcttactactcctctaaccttatggctgtgtgcgttctgggtagagaaagcctggacgacttgacaaacctcgttgtgaagcttttttccgaagtggagaacaagaatgtaccactccccgagttcccagagcacccttttcaggaagaacacttaaaacagctctataagatagtccccatcaaagacatccgcaacctgtatgtgactttccctataccagacctgcagaagtactataaaagtaatccagggcattacctgggccatctaatcggacatgagggccctgggagccttctgtctgagctgaagtcgaaaggttgggtaaacacgctcgtgggtggccaaaaagaaggtgcccgtgggttcatgttttttatcataaatgtggacctgactgaagagggcctgctgcacgtcgaagatatcatactacatatgttccaatacatccagaaacttcgcgccgaagggccacaggagtgggtgttccaggaatgtaaggatctgaacgcggtagcatttcggtttaaggacaaggaacgccctcgtggatacacgagcaagatagccgggatcctgcactattatcccctcgaggaagttctaaccgccgaatatctgcttgaagagtttcggccagacctgattgagatggttttggacaaacttaggcctgaaaatgtgcgcgtcgctattgtgtccaaaagctttgaaggcaagactgatagaaccgaggagtggtatggcacccaatacaagcaagaggcaatccccgatgaagtaatcaaaaagtggcagaatgcagatcttaacggaaagtttaagttgcctacgaagaacgagtttattccaacgaacttcgagattcttccactggagaaagaggctactccataccccgccctcattaaagatacagccatgtcaaagttatggtttaaacaggatgacaagttcttccttcccaaggcatgtcttaatttcgagttctttagtcctttcgcttatgtcgatcctctgcactgcaatatggcctacctttatttggaattgcttaaggatagcctcaacgagtacgcgtatgcagcagaactggcaggcttgagttatgatctgcagaatactatttacggcatgtacctctctgtgaagggatataatgataagcagccaatccttctgaaaaaaataatagaaaagatggccacctttgaaattgacgaaaaacgttttgaaataatcaaggaggcttatatgagatcactcaacaattttagagcagaacagcctcaccaacacgccatgtattacttgcggctccttatgaccgaggtcgcgtggaccaaggacgaactgaaagaagccctggatgacgtcaccctcccaagattgaaggcgttcattccacagctgctcagcagactacacattgaagctcttctgcacggaaatatcaccaagcaggctgcccttgggatcatgcagatggtggaggacacgttgatcgagcacgcccacacaaaaccactactgccttcccaattggtgcggtacagagaagtgcagctccccgatcgtgggtggtttgtgtaccagcagaggaacgaggtccataataattgcgggattgaaatttactaccagacagatatgcaatccaccagcgagaacatgttcttagaactcttctgtcagatcatttctgaaccatgctttaatactctgcgcaccaaagagcaactcgggtacatagtgtttagcggccctcggcgcgccaacggcattcagggcctcaggtttatcatccagtcagaaaagccaccacactatctcgagagtcgggtcgaggcattcctcattacaatggagaagtcgatcgaggacatgaccgaggaggctttccaaaaacatatccaagctctagcaatccggcgtctcgacaagcccaagaagctttcagctgaatgcgccaagtattggggtgaaattatttcacagcagtataattttgatcgggacaacacggaggtcgcatacttaaagaccctgacaaaggaggatattataaaattctacaaagagatgcttgccgtcgatgccccccggaggcataaagtatccgtacatgtgctggcacgggaaatggacagttgtcccgtggtgggggagtttccttgccaaaacgatatcaatctgtcccaggcccctgctcttccacagcccgaagtaattcaaaatatgaccgagtttaaacggggtctgcctctatttccccttgtgaaaccacacatcaacttcatggccgcaaaactgtag

SEQ ID NO: 151498 - DNA, 3060 bp, Artificial Sequence
  derived and/or modified sequence
atgcgctaccgcctggcttggctgctgcatcctgccctgccatccactttcaggtcagtgctcggggctcgactccctccccctgagcgattgtgcggatttcagaagaaaacatattccaagatgaacaatcccgcaatcaaaagaattggcaaccacattactaagtcacccgaagacaagcgcgaatacagaggcctcgagcttgccaatggaattaaagtgctcttaattagtgaccccacaaccgataaatctagcgcggcactcgacgtccatataggatcgcttagcgatcctcccaacattgctggactcagtcacttttgcgaacacatgctgttcctggggaccaaaaaatatcctaaagagaacgaatactcccagttcctgtcagaacatgcaggcagcagtaacgcattcacgtccggggagcacaccaactattattttgatgtttcccatgagcacctcgaaggcgcattagatcgattcgctcagttttttctgtgcccgttgttcgatgagagctgcaaagacagggaggtaaatgccgtggatagcgagcatgaaaaaaacgtgatgaatgatgcctggcgtctcttccagttggagaaagctactggcaacccgaaacatccattttcaaagttcggcaccggaaacaaatatactctcgaaacacgcccaaatcaggagggcatcgatgtgagacaggagctgctgaaattccattccgcttactactccagtaatctgatggccgtgtgtgtgttggggagggaatcgctcgacgatctgacaaatctggtcgtcaagcttttttccgaggttgagaacaaaaatgtgcccttgcctgagttcccagagcatccctttcaggaagagcacctgaagcaattgtacaagattgttccaatcaaggatatcagaaatctgtatgtcaccttccccattccggacctccagaaatactacaaaagcaacccaggccattacctcggtcacttgatcgggcacgagggtcctggtagtctcctgtcagaacttaagagtaaaggttgggttaatactctcgtcggaggtcaaaaagaaggggcaaggggtttcatgttttttattattaatgtggacctcaccgaggaaggcttactccacgtggaggacattatcttacacatgttccaatacatccagaagcttagggccgagggacctcaggaatgggtgttccaggagtgtaaggatttaaacgccgtggccttccgtttcaaggacaaagagcgtcctcgcggttacacaagcaagatcgctggcatccttcattattacccactcgaagaggtcctgaccgccgagtacctgctggaagaatttcgcccagacctaattgagatggtgctcgataagttaagacccgaaaacgtgcgtgtggcaattgtgtctaaatcttttgagggaaagacagaccgaactgaagagtggtacggcacccaatataagcaggaagccatccctgacgaggtcattaaaaagtggcaaaatgccgatctaaatggcaaatttaaactgcccactaaaaatgagtttatccctaccaactttgaaattctgcctctggagaaagaggctacaccctaccctgcactaatcaaagacaccgcaatgtcaaaactctggttcaagcaggacgacaagttttttctccccaaggcttgcctaaatttcgaattctttagccctttcgcttacgtggatcctctgcattgcaacatggcctacctgtatctagaactcctcaaggattcactgaatgaatatgcatatgcagccgaactggccggactgagctatgatctgcaaaatacgatctatgggatgtaccttagcgtgaagggctacaatgacaaacaacctatactgttaaaaaagataatcgagaaaatggctacgttcgaaatcgacgagaaacgcttcgagataatcaaggaagcatacatgcggtctctgaacaattttagggccgaacaaccccatcaacacgccatgtattacctacggctgctgatgacggaggttgcttggacaaaggatgagttgaaggaggccctggatgacgtgacccttccaagattaaaagctttcatcccccaactgctgagccggttgcatatcgaagccctgctgcatggtaacatcacaaagcaagctgcgctcgggatcatgcaaatggtggaagatacccttatcgaacacgctcatactaaacctctcttgcctagccagctggtgagatatcgcgaagtccagttaccagatagggggtggttcgtttatcaacagaggaacgaggttcacaacaactgtggcatagagatttactaccagacagatatgcagtccactagcgagaatatgttcttggagctcttctgtcagatcatctccgagccctgtttcaacactctgaggacgaaggagcaactgggatatatcgtgttctcagggccaagacgtgctaatgggatccaaggccttaggttcattatccagtctgagaagccccctcattatctggaatcgagggtggaggccttcctgattacgatggaaaagagcatcgaagatatgacggaagaggcttttcagaagcacatccaggctctcgctatccgtaggctggacaaaccaaaaaagctgtccgctgaatgcgctaagtattggggtgaaattattagccaacaatacaattttgatagggacaacaccgaagtggcatatctgaaaacactgacaaaggaggatataatcaagttctacaaagaaatgcttgcagtcgacgccccacgaaggcacaaagtttcagtccacgtgctggccagagaaatggattcctgtccggtggtgggcgagtttccatgtcagaatgacatcaacctcagccaagcacccgcactccctcaacctgaggtgatccagaacatgacagagttcaaacgcggtctgccgttgttccccctcgttaaaccacatattaactttatggctgcaaaactatag

SEQ ID NO: 151499 - DNA, 3060 bp, Artificial Sequence
  derived and/or modified sequence
atgagatacagactggcctggctgctgcaccccgccctgcccagcaccttcagaagcgtgctgggcgccagactgcccccccccgagagactgtgcggcttccagaagaagacctacagcaagatgaacaaccccgccatcaagagaatcggcaaccacatcaccaagagccccgaggacaagagagagtacagaggcctggagctggccaacggcatcaaggtgctgctgatcagcgaccccaccaccgacaagagcagcgccgccctggacgtgcacatcggcagcctgagcgacccccccaacatcgccggcctgagccacttctgcgagcacatgctgttcctgggcaccaagaagtaccccaaggagaacgagtacagccagttcctgagcgagcacgccggcagcagcaacgccttcaccagcggcgagcacaccaactactacttcgacgtgagccacgagcacctggagggcgccctggacagattcgcccagttcttcctgtgccccctgttcgacgagagctgcaaggacagagaggtgaacgccgtggacagcgagcacgagaagaacgtgatgaacgacgcctggagactgttccagctggagaaggccaccggcaaccccaagcaccccttcagcaagttcggcaccggcaacaagtacaccctggagaccagacccaaccaggagggcatcgacgtgagacaggagctgctgaagttccacagcgcctactacagcagcaacctgatggccgtgtgcgtgctgggcagagagagcctggacgacctgaccaacctggtggtgaagctgttcagcgaggtggagaacaagaacgtgcccctgcccgagttccccgagcaccccttccaggaggagcacctgaagcagctgtacaagatcgtgcccatcaaggacatcagaaacctgtacgtgaccttccccatccccgacctgcagaagtactacaagagcaaccccggccactacctgggccacctgatcggccacgagggccccggcagcctgctgagcgagctgaagagcaagggctgggtgaacaccctggtgggcggccagaaggagggcgccagaggcttcatgttcttcatcatcaacgtggacctgaccgaggagggcctgctgcacgtggaggacatcatcctgcacatgttccagtacatccagaagctgagagccgagggcccccaggagtgggtgttccaggagtgcaaggacctgaacgccgtggccttcagattcaaggacaaggagagacccagaggctacaccagcaagatcgccggcatcctgcactactaccccctggaggaggtgctgaccgccgagtacctgctggaggagttcagacccgacctgatcgagatggtgctggacaagctgagacccgagaacgtgagagtggccatcgtgagcaagagcttcgagggcaagaccgacagaaccgaggagtggtacggcacccagtacaagcaggaggccatccccgacgaggtgatcaagaagtggcagaacgccgacctgaacggcaagttcaagctgcccaccaagaacgagttcatccccaccaacttcgagatcctgcccctggagaaggaggccaccccctaccccgccctgatcaaggacaccgccatgagcaagctgtggttcaagcaggacgacaagttcttcctgcccaaggcctgcctgaacttcgagttcttcagccccttcgcctacgtggaccccctgcactgcaacatggcctacctgtacctggagctgctgaaggacagcctgaacgagtacgcctacgccgccgagctggccggcctgagctacgacctgcagaacaccatctacggcatgtacctgagcgtgaagggctacaacgacaagcagcccatcctgctgaagaagatcatcgagaagatggccaccttcgagatcgacgagaagagattcgagatcatcaaggaggcctacatgagaagcctgaacaacttcagagccgagcagccccaccagcacgccatgtactacctgagactgctgatgaccgaggtggcctggaccaaggacgagctgaaggaggccctggacgacgtgaccctgcccagactgaaggccttcatcccccagctgctgagcagactgcacatcgaggccctgctgcacggcaacatcaccaagcaggccgccctgggcatcatgcagatggtggaggacaccctgatcgagcacgcccacaccaagcccctgctgcccagccagctggtgagatacagagaggtgcagctgcccgacagaggctggttcgtgtaccagcagagaaacgaggtgcacaacaactgcggcatcgagatctactaccagaccgacatgcagagcaccagcgagaacatgttcctggagctgttctgccagatcatcagcgagccctgcttcaacaccctgagaaccaaggagcagctgggctacatcgtgttcagcggccccagaagagccaacggcatccagggcctgagattcatcatccagagcgagaagcccccccactacctggagagcagagtggaggccttcctgatcaccatggagaagagcatcgaggacatgaccgaggaggccttccagaagcacatccaggccctggccatcagaagactggacaagcccaagaagctgagcgccgagtgcgccaagtactggggcgagatcatcagccagcagtacaacttcgacagagacaacaccgaggtggcctacctgaagaccctgaccaaggaggacatcatcaagttctacaaggagatgctggccgtggacgcccccagaagacacaaggtgagcgtgcacgtgctggccagagagatggacagctgccccgtggtgggcgagttcccctgccagaacgacatcaacctgagccaggcccccgccctgccccagcccgaggtgatccagaacatgaccgagttcaagagaggcctgcccctgttccccctggtgaagccccacatcaacttcatggccgccaagctgtag

SEQ ID NO: 151500 - protein, 605 aa, Artificial Sequence
  derived and/or modified sequence
MALRKGGLALALLLLSWVALGPRSLEGADPGTPGEAEGPACPAACVCSYDDDADELSVFCSSRNLTRLPDGVPGGTQALWLDGNNLSSVPPAAFQNLSSLGFLNLQGGQLGSLEPQALLGLENLCHLHLERNQLRSLALGTFAHTPALASLGLSNNRLSRLEDGLFEGLGSLWDLNLGWNSLAVLPDAAFRGLGSLRELVLAGNRLAYLQPALFSGLAELRELDLSRNALRAIKANVFVQLPRLQKLYLDRNLIAAVAPGAFLGLKALRWLDLSHNRVAGLLEDTFPGLLGLRVLRLSHNAIASLRPRTFKDLHFLEELQLGHNRIRQLAERSFEGLGQLEVLTLDHNQLQEVKAGAFLGLTNVAVMNLSGNCLRNLPEQVFRGLGKLHSLHLEGSCLGRIRPHTFTGLSGLRRLFLKDNGLVGIEEQSLWGLAELLELDLTSNQLTHLPHRLFQGLGKLEYLLLSRNRLAELPADALGPLQRAFWLDVSHNRLEALPNSLLAPLGRLRYLSLRNNSLRTFTPQPPGLERLWLEGNPWDCGCPLKALRDFALQNPSAVPRFVQAICEGDDCQPPAYTYNNITCASPPEVVGLDLRDLSEAHFAPC

SEQ ID NO: 151501 - protein, 1132 aa, Artificial Sequence
  derived and/or modified sequence
MGMACLTMTEMEGTSTSSIYQNGDISGNANSMKQIDPVLQVYLYHSLGKSEADYLTFPSGEYVAEEICIAASKACGITPVYHNMFALMSETERIWYPPNHVFHIDESTRHNVLYRIRFYFPRWYCSGSNRAYRHGISRGAEAPLLDDFVMSYLFAQWRHDFVHGWIKVPVTHETQEECLGMAVLDMMRIAKENDQTPLAIYNSISYKTFLPKCIRAKIQDYHILTRKRIRYRFRRFIQQFSQCKATARNLKLKYLINLETLQSAFYTEKFEVKEPGSGPSGEEIFATIIITGNGGIQWSRGKHKESETLTEQDLQLYCDFPNIIDVSIKQANQEGSNESRVVTIHKQDGKNLEIELSSLREALSFVSLIDGYYRLTADAHHYLCKEVAPPAVLENIQSNCHGPISMDFAISKLKKAGNQTGLYVLRCSPKDFNKYFLTFAVERENVIEYKHCLITKNENEEYNLSGTKKNFSSLKDLLNCYQMETVRSDNIIFQFTKCCPPKPKDKSNLLVFRTNGVSDVPTSPTLQRPTHMNQMVFHKIRNEDLIFNESLGQGTFTKIFKGVRREVGDYGQLHETEVLLKVLDKAHRNYSESFFEAASMMSKLSHKHLVLNYGVCVCGDENILVQEFVKFGSLDTYLKKNKNCINILWKLEVAKQLAWAMHFLEENTLIHGNVCAKNILLIREEDRKTGNPPFIKLSDPGISITVLPKDILQERIPWVPPECIENPKNLNLATDKWSFGTTLWEICSGGDKPLSALDSQRKLQFYEDRHQLPAPKWAELANLINNCMDYEPDFRPSFRAIIRDLNSLFTPDYELLTENDMLPNMRIGALGFSGAFEDRDPTQFEERHLKFLQQLGKGNFGSVEMCRYDPLQDNTGEVVAVKKLQHSTEEHLRDFEREIEILKSLQHDNIVKYKGVCYSAGRRNLKLIMEYLPYGSLRDYLQKHKERIDHIKLLQYTSQICKGMEYLGTKRYIHRDLATRNILVENENRVKIGDFGLTKVLPQDKEYYKVKEPGESPIFWYAPESLTESKFSVASDVWSFGVVLYELFTYIEKSKSPPAEFMRMIGNDKQGQMIVFHLIELLKNNGRLPRPDGCPDEIYMIMTECWNNNVNQRPSFRDLALRVDQIRDNMAG

SEQ ID NO: 151502 - protein, 983 aa, Artificial Sequence
  derived and/or modified sequence
MSYLFAQWRHDFVHGWIKVPVTHETQEECLGMAVLDMMRIAKENDQTPLAIYNSISYKTFLPKCIRAKIQDYHILTRKRIRYRFRRFIQQFSQCKATARNLKLKYLINLETLQSAFYTEKFEVKEPGSGPSGEEIFATIIITGNGGIQWSRGKHKESETLTEQDLQLYCDFPNIIDVSIKQANQEGSNESRVVTIHKQDGKNLEIELSSLREALSFVSLIDGYYRLTADAHHYLCKEVAPPAVLENIQSNCHGPISMDFAISKLKKAGNQTGLYVLRCSPKDFNKYFLTFAVERENVIEYKHCLITKNENEEYNLSGTKKNFSSLKDLLNCYQMETVRSDNIIFQFTKCCPPKPKDKSNLLVFRTNGVSDVPTSPTLQRPTHMNQMVFHKIRNEDLIFNESLGQGTFTKIFKGVRREVGDYGQLHETEVLLKVLDKAHRNYSESFFEAASMMSKLSHKHLVLNYGVCVCGDENILVQEFVKFGSLDTYLKKNKNCINILWKLEVAKQLAWAMHFLEENTLIHGNVCAKNILLIREEDRKTGNPPFIKLSDPGISITVLPKDILQERIPWVPPECIENPKNLNLATDKWSFGTTLWEICSGGDKPLSALDSQRKLQFYEDRHQLPAPKWAELANLINNCMDYEPDFRPSFRAIIRDLNSLFTPDYELLTENDMLPNMRIGALGFSGAFEDRDPTQFEERHLKFLQQLGKGNFGSVEMCRYDPLQDNTGEVVAVKKLQHSTEEHLRDFEREIEILKSLQHDNIVKYKGVCYSAGRRNLKLIMEYLPYGSLRDYLQKHKERIDHIKLLQYTSQICKGMEYLGTKRYIHRDLATRNILVENENRVKIGDFGLTKVLPQDKEYYKVKEPGESPIFWYAPESLTESKFSVASDVWSFGVVLYELFTYIEKSKSPPAEFMRMIGNDKQGQMIVFHLIELLKNNGRLPRPDGCPDEIYMIMTECWNNNVNQRPSFRDLALRVDQIRDNMAG

SEQ ID NO: 151503 - DNA, 3399 bp, Artificial Sequence
  derived and/or modified sequence
atgggcatggcctgcctgaccatgaccgagatggagggcaccagcaccagcagcatctaccagaacggcgacatcagcggcaacgccaacagcatgaagcagatcgaccccgtgctgcaggtgtacctgtaccacagcctgggcaagagcgaggccgactacctgaccttccccagcggcgagtacgtggccgaggagatctgcatcgccgccagcaaggcctgcggcatcacccccgtgtaccacaacatgttcgccctgatgagcgagaccgagagaatctggtacccccccaaccacgtgttccacatcgacgagagcaccagacacaacgtgctgtacagaatcagattctacttccccagatggtactgcagcggcagcaacagagcctacagacacggcatcagcagaggcgccgaggcccccctgctggacgacttcgtgatgagctacctgttcgcccagtggagacacgacttcgtgcacggctggatcaaggtgcccgtgacccacgagacccaggaggagtgcctgggcatggccgtgctggacatgatgagaatcgccaaggagaacgaccagacccccctggccatctacaacagcatcagctacaagaccttcctgcccaagtgcatcagagccaagatccaggactaccacatcctgaccagaaagagaatcagatacagattcagaagattcatccagcagttcagccagtgcaaggccaccgccagaaacctgaagctgaagtacctgatcaacctggagaccctgcagagcgccttctacaccgagaagttcgaggtgaaggagcccggcagcggccccagcggcgaggagatcttcgccaccatcatcatcaccggcaacggcggcatccagtggagcagaggcaagcacaaggagagcgagaccctgaccgagcaggacctgcagctgtactgcgacttccccaacatcatcgacgtgagcatcaagcaggccaaccaggagggcagcaacgagagcagagtggtgaccatccacaagcaggacggcaagaacctggagatcgagctgagcagcctgagagaggccctgagcttcgtgagcctgatcgacggctactacagactgaccgccgacgcccaccactacctgtgcaaggaggtggccccccccgccgtgctggagaacatccagagcaactgccacggccccatcagcatggacttcgccatcagcaagctgaagaaggccggcaaccagaccggcctgtacgtgctgagatgcagccccaaggacttcaacaagtacttcctgaccttcgccgtggagagagagaacgtgatcgagtacaagcactgcctgatcaccaagaacgagaacgaggagtacaacctgagcggcaccaagaagaacttcagcagcctgaaggacctgctgaactgctaccagatggagaccgtgagaagcgacaacatcatcttccagttcaccaagtgctgcccccccaagcccaaggacaagagcaacctgctggtgttcagaaccaacggcgtgagcgacgtgcccaccagccccaccctgcagagacccacccacatgaaccagatggtgttccacaagatcagaaacgaggacctgatcttcaacgagagcctgggccagggcaccttcaccaagatcttcaagggcgtgagaagagaggtgggcgactacggccagctgcacgagaccgaggtgctgctgaaggtgctggacaaggcccacagaaactacagcgagagcttcttcgaggccgccagcatgatgagcaagctgagccacaagcacctggtgctgaactacggcgtgtgcgtgtgcggcgacgagaacatcctggtgcaggagttcgtgaagttcggcagcctggacacctacctgaagaagaacaagaactgcatcaacatcctgtggaagctggaggtggccaagcagctggcctgggccatgcacttcctggaggagaacaccctgatccacggcaacgtgtgcgccaagaacatcctgctgatcagagaggaggacagaaagaccggcaacccccccttcatcaagctgagcgaccccggcatcagcatcaccgtgctgcccaaggacatcctgcaggagagaatcccctgggtgccccccgagtgcatcgagaaccccaagaacctgaacctggccaccgacaagtggagcttcggcaccaccctgtgggagatctgcagcggcggcgacaagcccctgagcgccctggacagccagagaaagctgcagttctacgaggacagacaccagctgcccgcccccaagtgggccgagctggccaacctgatcaacaactgcatggactacgagcccgacttcagacccagcttcagagccatcatcagagacctgaacagcctgttcacccccgactacgagctgctgaccgagaacgacatgctgcccaacatgagaatcggcgccctgggcttcagcggcgccttcgaggacagagaccccacccagttcgaggagagacacctgaagttcctgcagcagctgggcaagggcaacttcggcagcgtggagatgtgcagatacgaccccctgcaggacaacaccggcgaggtggtggccgtgaagaagctgcagcacagcaccgaggagcacctgagagacttcgagagagagatcgagatcctgaagagcctgcagcacgacaacatcgtgaagtacaagggcgtgtgctacagcgccggcagaagaaacctgaagctgatcatggagtacctgccctacggcagcctgagagactacctgcagaagcacaaggagagaatcgaccacatcaagctgctgcagtacaccagccagatctgcaagggcatggagtacctgggcaccaagagatacatccacagagacctggccaccagaaacatcctggtggagaacgagaacagagtgaagatcggcgacttcggcctgaccaaggtgctgccccaggacaaggagtactacaaggtgaaggagcccggcgagagccccatcttctggtacgcccccgagagcctgaccgagagcaagttcagcgtggccagcgacgtgtggagcttcggcgtggtgctgtacgagctgttcacctacatcgagaagagcaagagcccccccgccgagttcatgagaatgatcggcaacgacaagcagggccagatgatcgtgttccacctgatcgagctgctgaagaacaacggcagactgcccagacccgacggctgccccgacgagatctacatgatcatgaccgagtgctggaacaacaacgtgaaccagagacccagcttcagagacctggccctgagagtggaccagatcagagacaacatggccggctag

SEQ ID NO: 151504 - DNA, 2952 bp, Artificial Sequence
  derived and/or modified sequence
atgagctacctgttcgcccagtggagacacgacttcgtgcacggctggatcaaggtgcccgtgacccacgagacccaggaggagtgcctgggcatggccgtgctggacatgatgagaatcgccaaggagaacgaccagacccccctggccatctacaacagcatcagctacaagaccttcctgcccaagtgcatcagagccaagatccaggactaccacatcctgaccagaaagagaatcagatacagattcagaagattcatccagcagttcagccagtgcaaggccaccgccagaaacctgaagctgaagtacctgatcaacctggagaccctgcagagcgccttctacaccgagaagttcgaggtgaaggagcccggcagcggccccagcggcgaggagatcttcgccaccatcatcatcaccggcaacggcggcatccagtggagcagaggcaagcacaaggagagcgagaccctgaccgagcaggacctgcagctgtactgcgacttccccaacatcatcgacgtgagcatcaagcaggccaaccaggagggcagcaacgagagcagagtggtgaccatccacaagcaggacggcaagaacctggagatcgagctgagcagcctgagagaggccctgagcttcgtgagcctgatcgacggctactacagactgaccgccgacgcccaccactacctgtgcaaggaggtggccccccccgccgtgctggagaacatccagagcaactgccacggccccatcagcatggacttcgccatcagcaagctgaagaaggccggcaaccagaccggcctgtacgtgctgagatgcagccccaaggacttcaacaagtacttcctgaccttcgccgtggagagagagaacgtgatcgagtacaagcactgcctgatcaccaagaacgagaacgaggagtacaacctgagcggcaccaagaagaacttcagcagcctgaaggacctgctgaactgctaccagatggagaccgtgagaagcgacaacatcatcttccagttcaccaagtgctgcccccccaagcccaaggacaagagcaacctgctggtgttcagaaccaacggcgtgagcgacgtgcccaccagccccaccctgcagagacccacccacatgaaccagatggtgttccacaagatcagaaacgaggacctgatcttcaacgagagcctgggccagggcaccttcaccaagatcttcaagggcgtgagaagagaggtgggcgactacggccagctgcacgagaccgaggtgctgctgaaggtgctggacaaggcccacagaaactacagcgagagcttcttcgaggccgccagcatgatgagcaagctgagccacaagcacctggtgctgaactacggcgtgtgcgtgtgcggcgacgagaacatcctggtgcaggagttcgtgaagttcggcagcctggacacctacctgaagaagaacaagaactgcatcaacatcctgtggaagctggaggtggccaagcagctggcctgggccatgcacttcctggaggagaacaccctgatccacggcaacgtgtgcgccaagaacatcctgctgatcagagaggaggacagaaagaccggcaacccccccttcatcaagctgagcgaccccggcatcagcatcaccgtgctgcccaaggacatcctgcaggagagaatcccctgggtgccccccgagtgcatcgagaaccccaagaacctgaacctggccaccgacaagtggagcttcggcaccaccctgtgggagatctgcagcggcggcgacaagcccctgagcgccctggacagccagagaaagctgcagttctacgaggacagacaccagctgcccgcccccaagtgggccgagctggccaacctgatcaacaactgcatggactacgagcccgacttcagacccagcttcagagccatcatcagagacctgaacagcctgttcacccccgactacgagctgctgaccgagaacgacatgctgcccaacatgagaatcggcgccctgggcttcagcggcgccttcgaggacagagaccccacccagttcgaggagagacacctgaagttcctgcagcagctgggcaagggcaacttcggcagcgtggagatgtgcagatacgaccccctgcaggacaacaccggcgaggtggtggccgtgaagaagctgcagcacagcaccgaggagcacctgagagacttcgagagagagatcgagatcctgaagagcctgcagcacgacaacatcgtgaagtacaagggcgtgtgctacagcgccggcagaagaaacctgaagctgatcatggagtacctgccctacggcagcctgagagactacctgcagaagcacaaggagagaatcgaccacatcaagctgctgcagtacaccagccagatctgcaagggcatggagtacctgggcaccaagagatacatccacagagacctggccaccagaaacatcctggtggagaacgagaacagagtgaagatcggcgacttcggcctgaccaaggtgctgccccaggacaaggagtactacaaggtgaaggagcccggcgagagccccatcttctggtacgcccccgagagcctgaccgagagcaagttcagcgtggccagcgacgtgtggagcttcggcgtggtgctgtacgagctgttcacctacatcgagaagagcaagagcccccccgccgagttcatgagaatgatcggcaacgacaagcagggccagatgatcgtgttccacctgatcgagctgctgaagaacaacggcagactgcccagacccgacggctgccccgacgagatctacatgatcatgaccgagtgctggaacaacaacgtgaaccagagacccagcttcagagacctggccctgagagtggaccagatcagagacaacatggccggctag

SEQ ID NO: 151505 - DNA, 3399 bp, Artificial Sequence
  derived and/or modified sequence
atgggcatggcatgtctcacaatgaccgaaatggaagggacaagtacaagtagtatatatcaaaacggggatatcagtggaaacgccaattcaatgaagcagatcgaccccgttttacaagtgtacttgtaccactccctgggaaagtccgaggcagactatcttactttccctagcggcgagtacgtcgctgaggaaatttgtatcgccgccagcaaggcctgtggaataacacctgtttaccataatatgttcgcgctcatgagcgagaccgagcgcatctggtatcctcctaaccacgtttttcacatcgacgaatccactcggcacaatgtgctgtataggatcagattttacttcccaaggtggtattgctctgggtctaaccgtgcttataggcacggcattagcagaggcgccgaagcccctctgttggacgactttgtgatgtcatacctgttcgcccaatggcggcacgacttcgtccacgggtggatcaaggtccctgtgacacacgagacccaggaggagtgcttggggatggcagttttggacatgatgcgaattgccaaggaaaacgatcagactccactggcaatctacaattctataagttataaaacattcctgcctaagtgtatacgggctaagattcaggactaccatatacttacacgcaaacgtattaggtaccgcttcaggcgattcattcagcaattctctcaatgcaaggctactgccaggaaccttaagctgaaatatctcatcaatttggagacactccaatccgccttctacacggagaagttcgaggttaaagagcctggctccgggcccagcggggaggagatctttgctaccatcatcataaccgggaacgggggaatccagtggagtagaggcaagcataaggagagcgagaccctgacggagcaagatctgcaattgtattgtgattttcccaacatcatcgacgtgtctattaagcaggccaatcaggaggggtcaaatgaatctagagtcgtaactatccacaagcaagatggtaaaaatctagagatcgaactgagttctttaagggaagcactctctttcgtgtccctaattgacgggtactacagactgacagccgatgcgcaccattacctttgtaaggaggtggcaccacccgctgtactggaaaatatccagagtaactgtcatgggccaatcagtatggactttgcaatatccaaactgaagaaagctggaaatcagaccgggttgtacgtgctcaggtgctcccccaaggacttcaacaagtatttccttactttcgccgtggagagggaaaacgttatcgaatataagcattgcctgattaccaagaacgagaatgaggagtataacctgtccggcacaaagaagaattttagttctctgaaagatcttttaaattgttaccagatggagacagtcaggtcggacaatataatctttcagtttaccaagtgttgtccccctaaacccaaagacaagtccaacctcctggtgtttagaaccaacggcgtgtcagatgtgccgacgagtcctaccctccaacgcccaacccacatgaaccagatggtttttcataagattcggaacgaggatctcatctttaatgaatctctaggtcaggggacctttacaaagatctttaagggagttcggagggaagtgggggactatgggcagctgcacgagaccgaggtattattaaaagtgttggacaaagcgcacagaaactactccgagtcattcttcgaagccgcgagcatgatgtcaaaactgagccataagcacctggtgcttaattatggggtgtgtgtttgtggtgacgagaatatcctcgttcaggagtttgtaaaattcggctcacttgacacgtacttaaagaagaataagaactgcatcaacatcctgtggaaactggaagtcgccaagcaattggcatgggccatgcattttttggaggaaaatactctgatccacgggaatgtgtgcgcaaagaatatcctcctgattagagaggaggaccgtaagacaggaaaccccccttttataaagttgtccgaccccggaatctcaattaccgtgctgccgaaagacattctgcaggagagaattccttgggttcctccagagtgtatagaaaaccctaaaaatctgaacctggcaaccgataagtggtcatttggaaccacattgtgggagatctgtagtggcggtgataagccactttccgccctcgattctcaacgcaagctgcagttttacgaggacaggcatcagttgccagccccgaagtgggctgagctggcgaacctgattaataactgcatggactatgaacctgactttagaccctcctttagagcgattatccgcgaccttaactcactcttcacaccggattatgaactactaactgaaaatgatatgcttcccaatatgcgcataggtgctttagggtttagcggggcattcgaggatcgcgatccaacccagtttgaggagaggcatcttaagttcctgcaacaactcggaaaagggaattttggatcggtcgaaatgtgccggtacgatcccttgcaagataataccggcgaggtggtggcagtaaagaagttgcaacacagtacagaggagcacctgcgcgattttgaaagagaaattgagatcctaaaaagcctgcagcacgacaatattgtgaaatacaagggtgtctgttatagcgctggacgaagaaacctcaagttgattatggaatatttgccctatgggtccttgcgcgactacctgcaaaaacataaagaaaggatcgaccacatcaagctcctgcagtatacatctcagatttgtaagggaatggagtatcttggtactaagcgttatatccaccgggatttggctacacggaatatcctcgttgaaaatgagaatagagttaagatcggagacttcgggttgacaaaagtgctcccacaggataaggagtactataaagtcaaggaacccggcgagtctcccatcttttggtacgccccagagtctctgacagagtccaagttcagcgtcgctagcgacgtctggtcattcggtgtggtgctgtacgaattatttacctacattgagaaaagcaaatcgccacccgccgagttcatgcggatgataggcaacgacaagcaaggccagatgatagtgttccacctgattgagctcttaaagaataatggccgtctcccgcggcccgatggctgcccggatgagatctacatgataatgacggaatgttggaacaataatgtgaatcagcgccccagcttccgtgacctcgctctgcgcgtagaccagattagggataatatggccgggtag

SEQ ID NO: 151506 - DNA, 3399 bp, Artificial Sequence
  derived and/or modified sequence
atggggatggcgtgcctgacaatgactgagatggaagggacctcgacctcctccatctaccagaatggagacatttctgggaatgcaaattctatgaaacaaatagaccccgtccttcaggtatacttgtaccattcgcttgggaagagcgaggctgactacctgacgtttccatctggagaatacgtcgctgaagaaatctgcatcgctgcaagtaaagcatgtggtataacgccagtttatcataacatgttcgcgttgatgtccgagacggagcggatttggtatccccccaaccatgtgttccacattgacgagtcgacacgtcacaacgtcctctaccggatacggttctacttcccccggtggtattgcagtggctccaatcgggcatatagacacggcattagccgcggagcagaagccccactgttagacgacttcgtgatgagctacctttttgcacagtggcggcacgactttgtgcatggatggatcaaggtacctgtcacacatgagacacaggaagagtgccttggcatggccgtgctcgatatgatgagaatcgccaaggagaacgatcagactcccttggccatctacaactcaatctcttataagacattcctaccaaagtgcatccgagctaagattcaagattaccatattctaacccggaaacgcatacgctatcggttccgtagatttattcagcagttctcccagtgtaaagcaactgcacgaaaccttaaacttaaatacttgatcaatctggaaacactccagtccgctttctatacagagaaatttgaagtgaaagaacctggaagtggaccatctggagaggagatcttcgccacaattatcatcacgggaaatggtggtatccagtggagcagaggaaagcataaggagtccgaaactctgaccgagcaggatctgcagttgtactgtgacttccctaacatcattgatgtgagtatcaagcaggccaatcaagagggctctaacgagtctcgggtcgtcacaatccacaagcaggacggaaagaatctggaaatagaattgagttcactgagagaggctctctcgttcgtgtcattaatagacggctactatagactgaccgccgacgcccatcactacctttgtaaggaggtggctcctcccgctgtcctggaaaatatccagagcaactgccacgggccgatctctatggactttgccatttcaaaactgaagaaggccggaaatcagaccggtctgtacgtcttacggtgttcaccaaaggactttaataagtatttcctgacatttgcagtggaaagagagaatgtgatagagtacaaacactgcctaatcacaaaaaatgaaaacgaggagtataatctctctgggacgaaaaagaatttcagttcgctgaaagatctgctcaactgctaccagatggaaaccgttaggtccgataacatcatctttcaatttaccaagtgttgccctccgaaacccaaagacaaatcaaatctgctggtatttagaactaatggcgtcagtgacgtgcccacaagccctacattgcagcggccgacgcacatgaatcaaatggtgttccacaaaatccggaacgaggatctcatattcaatgagtccctaggacaagggacttttactaagatattcaagggagttcggcgggaggtcggagactacgggcaactccatgagacagaggtgctgttaaaagtgttggacaaggcccacagaaactattccgagtcctttttcgaggccgcctcaatgatgtccaagttgtctcataaacacctcgtcctcaactatggagtgtgcgtgtgtggagatgagaatattcttgtgcaggagttcgttaagttcgggagtctggatacgtaccttaagaaaaataaaaactgtatcaatattctctggaagttagaggtggccaaacaactggcttgggctatgcacttcctcgaggaaaatacgttgatacatggcaacgtgtgtgctaaaaatattttgctgattcgtgaggaagacaggaaaacgggaaatcctccatttattaaactgtccgatcccggcatctcgattacagtgctgcctaaggacattctgcaagagagaatcccctgggttccccccgaatgcatcgaaaatccgaagaacctcaacctggcaaccgataagtggtcattcggcacaactctgtgggagatctgctcgggaggcgataaaccgctgagcgcattggattcccagcggaaattacagttctatgaggaccggcaccaattgcctgctccaaagtgggccgagctggcaaacctaattaataactgcatggactacgagcccgacttcagacccagtttccgggcaattatcagagacctgaattccctcttcacacctgattatgagttgctgacagagaacgacatgctgccgaatatgcgcattggcgccttgggtttcagcggagcttttgaggatagggatccaacacagttcgaagaacgacacctgaagtttctgcaacagctcgggaagggcaatttcggaagcgtcgagatgtgtagatatgaccccctgcaggataacacaggcgaagttgtggctgtcaagaagctccagcactctacagaagagcacctgcgggacttcgaaagggagatcgaaattcttaagtctcttcagcatgataacatagtgaaatataaaggagtctgctacagcgccggtagacggaatttaaaactgatcatggagtatctgccttacggctctcttcgggactacttacagaaacataaagagaggattgatcacatcaagttactccagtatacttctcagatttgtaaggggatggaatacttagggacaaaacgatatattcatcgggacctagccacgagaaacatcctagttgagaacgagaacagagtgaaaattggggactttggcctgacaaaagtactgcctcaggacaaagagtactataaagtgaaagagcccggcgagtctccaatattttggtatgctcctgaaagtctgacagagtcaaagttcagtgttgcttctgatgtgtggtcattcggggttgtcctatacgagctttttacatacatcgaaaagtccaagagcccccctgctgaattcatgagaatgatcgggaacgacaaacaggggcagatgattgtctttcacctcatagaactgctcaaaaacaatggccgactgccaaggcctgacggctgtcccgatgaaatctatatgatcatgaccgagtgctggaacaacaacgtcaaccaaaggcctagttttcgggatctggctctaagggtggatcagataagagacaacatggcaggctag

SEQ ID NO: 151507 - DNA, 2952 bp, Artificial Sequence
  derived and/or modified sequence
atgagttacctcttcgcgcaatggagacatgacttcgttcatggctggataaaggtcccagtcacgcatgagactcaggaggaatgcctcggaatggcagtgcttgatatgatgcggattgctaaagaaaatgaccagacccctctggctatttataattcaatcagctataagacgttcctgccgaagtgtatccgggcaaagatccaagactaccatatcttaacgagaaagcggatcaggtatagatttagaagatttatccagcagttcagccagtgtaaggctacggccagaaatctcaaacttaagtacctgataaatctggaaacgctgcaatcggcattctacacggaaaagttcgaggtgaaagaacccggatcgggcccaagtggggaggagatctttgctactattatcattactggtaacggagggattcaatggtcccgggggaaacataaggagtcagaaacactaactgagcaggacctgcagttgtactgtgacttcccaaatataattgatgtaagtattaagcaggccaatcaggagggctccaacgaaagccgggtggtgacaatacacaagcaggacggtaagaatctggaaatagagctttcatctctaagagaggctctctcgtttgtgagcctgattgacggatactaccgattaacagctgatgctcaccactatctgtgtaaggaggtagccccacccgcggtgctcgaaaacatccaatctaattgtcatggtccgattagcatggattttgcaatttccaaactaaaaaaggcagggaaccagaccggcctgtacgtcctccgatgcagccccaaagacttcaataaatacttcctgacgttcgcagtggagagagagaacgtgatcgaatacaaacactgtcttattactaagaatgaaaacgaagaatacaacctatctggtaccaaaaaaaacttttcctctctgaaggatttactgaactgttatcaaatggagaccgttcgatccgataacatcatttttcagtttacgaagtgctgtcctcccaaaccaaaggataaatctaatctacttgtgtttcgcacaaacggggtgagtgacgtgccaactagtcccaccctgcaacgtccaacccacatgaatcagatggtgttccataagatccggaatgaggatctcatctttaacgagtccctaggccagggaacttttacaaagattttcaagggagttcgaagagaggtaggggactatggccagttgcacgaaaccgaagtacttctcaaggtgctggataaggcccaccggaactattctgagagcttcttcgaggcagccagcatgatgtcaaaactcagccacaagcacctcgtattgaactacggtgtatgcgtttgcggtgacgagaatatccttgtccaggagttcgtcaagttcggctcgcttgatacttatcttaaaaagaacaaaaactgcattaacattctgtggaagctggaagtcgctaagcagcttgcatgggccatgcatttcctcgaagagaacacgctgattcacggcaacgtctgcgccaagaatatacttttaatccgcgaagaagatcgtaagaccggcaaccctcccttcatcaagctcagtgatcccggcatcagtatcactgtcttgcctaaggacatcctccaggagcggatcccctgggtgccaccagagtgtattgaaaacccaaaaaaccttaacctggcaacagataaatggtcattcggcactacactgtgggagatttgctctggtggcgataaacccttaagcgctctcgacagtcaacggaagctgcagttttatgaggaccggcatcaactgccagcacctaagtgggctgaactggccaacctaatcaataactgcatggactacgagcccgatttcagaccttccttccgagcgattattagagatctaaacagtctattcacccctgactatgagttgctcacggagaatgacatgttgcccaatatgcgaatcggcgcacttgggttctcaggggccttcgaggacagagacccaacacagtttgaagaaaggcacctcaagtttcttcagcaactggggaaaggtaactttggctcagtagagatgtgccgctatgacccactccaggacaatactggggaggtggtggccgtgaagaaattacaacacagtacggaagagcatctccgtgattttgagcgagaaatagaaattctgaaaagtcttcaacacgacaatatcgtcaaatataagggagtctgttattccgctgggagaagaaatctcaagctgatcatggaatatctgccgtacggtagccttcgggattacttgcaaaaacacaaggagcgcatcgaccatattaagctgctccaatatacgagtcaaatttgcaagggaatggaatacctcggaactaaacgctacatccaccgagatctggccacacggaacattctggtcgagaacgaaaatagagtgaagatcggagattttgggctgaccaaagttctgccacaagataaggagtactataaggtcaaggagccaggggagtcgcctattttctggtacgcccctgagagtctgactgagagtaaattctccgtggcctcggatgtatggagcttcggcgtagtcttgtatgaactcttcacttatatagagaagagtaaatctcccccggctgagtttatgcggatgataggtaatgacaagcaggggcagatgattgtcttccatctcatcgagctcttgaaaaataacggcagactcccaaggccagatgggtgcccagacgaaatatacatgattatgaccgaatgctggaacaataacgtgaatcagcggccaagtttccgggatctggcgctgagggttgaccaaatcagagataatatggccggatag

SEQ ID NO: 151508 - DNA, 3399 bp, Artificial Sequence
  derived and/or modified sequence
atgggcatggcctgcctgaccatgacagagatggagggcaccagcaccagcagcatctaccagaatggagacatctctggaaatgccaacagcatgaagcagattgatcctgtgctgcaggtgtacctgtaccacagcctgggcaagtctgaggccgactacctgaccttccccagcggggagtatgtggccgaggagatctgcatcgccgccagcaaggcctgtggcatcacccctgtgtaccacaacatgtttgccctgatgtctgaaacagagcgcatctggtacccacccaaccacgtgttccacattgatgagagcaccaggcacaacgtgctgtaccgcatccgcttctacttcccccgctggtactgcagcggcagcaacagagcctaccgccacggcatcagcagaggagctgaggcccccctgctggatgactttgtgatgagctacctgtttgcccagtggaggcatgactttgtgcacggctggatcaaggtgcctgtgacccatgagacccaggaggagtgcctgggcatggctgtgctggacatgatgagaattgccaaggaaaatgaccagacccccctggccatctacaacagcatctcctacaagaccttcctgcccaagtgcatccgggccaagatccaggactaccacatcctgaccaggaagaggatccgctaccgcttccgccgcttcatccagcagttcagccagtgcaaggccacagccaggaacctgaagctgaagtacctgatcaacctggagaccctgcagagcgccttctacacagagaagtttgaggtgaaggagcccggcagcggccccagcggggaggagatctttgccaccatcatcatcactggaaatggaggcatccagtggagccggggcaagcacaaggagagcgagaccctgacagagcaggacctgcagctgtactgtgacttccccaacatcattgatgtgtccatcaagcaggccaaccaggagggcagcaatgaaagccgggtggtgaccatccacaagcaggacggcaagaacctggagattgagctgagcagcctgcgggaggccctgagctttgtgtccctgattgatggctactaccgcctgacagcagatgcccaccactacctgtgcaaggaggtggcccctcctgctgtgctggagaacatccagagcaactgccacggccccatctccatggactttgccatcagcaagctgaagaaggccggcaaccagacaggcctgtatgtgctgcgctgcagccccaaggacttcaacaagtacttcctgacctttgctgtggagcgggagaatgtgattgagtacaagcactgcctgatcaccaagaatgaaaatgaggagtacaacctgagcggcaccaagaagaacttcagcagcctgaaggacctgctgaactgctaccagatggagaccgtgcggagtgacaacatcatcttccagttcaccaagtgctgcccccccaagcccaaggacaagagcaacctgctggtgttccgcaccaatggagtgtctgatgtgcccaccagccccaccctgcagaggcccacccacatgaaccagatggtgttccacaagatcagaaatgaagatctcatcttcaatgaaagcctgggccagggcaccttcaccaagatcttcaagggcgtgcggcgggaggtgggggactatggccagctgcacgagacagaggtgctgctgaaggtgctggacaaggcccacaggaactacagcgagagcttctttgaagctgcctccatgatgagcaagctgagccacaagcacctggtgctgaactatggagtgtgtgtgtgtggagatgagaacatcctggtgcaggagtttgtgaagtttggcagcctggacacctacctgaagaagaacaagaactgcatcaacatcctgtggaagctggaggtggccaagcagctggcctgggccatgcacttcctggaggagaacaccctcatccatggaaatgtgtgtgccaagaacatcctgctgatccgggaggaggacaggaagacaggcaacccccccttcatcaagctgagtgaccccggcatcagcatcaccgtgctgcccaaggacatcctgcaggagcgcatcccctgggtgcccccagagtgcatcgagaaccccaagaacctgaacctggccacagacaagtggagctttggcaccaccctgtgggagatctgcagcggcggggacaagcccctgagcgccctggacagccagaggaagctgcagttctatgaagatagacaccagctgcctgcccccaagtgggccgagctggccaacctgatcaacaactgcatggactatgagccagacttccggcccagcttccgggccatcatccgggacctgaacagcctcttcaccccagactatgagctgctgacagaaaatgacatgctgcccaacatgagaattggagccctgggcttcagcggggcctttgaagatcgggaccccacccagtttgaggagcggcacctgaagttcctgcagcagctgggcaaaggaaactttggatctgtggagatgtgccgctatgaccccctgcaggacaacacaggagaggtggtggccgtgaagaagctgcagcacagcacagaggagcacctgcgggactttgagcgggagattgagatcctgaagagcctgcagcacgacaacatcgtgaagtacaagggcgtgtgctacagcgctggaagaagaaacctgaagctgatcatggagtacctgccctacggcagcctgcgggactacctgcagaagcacaaggagagaattgaccacatcaagctgctgcagtacaccagccagatctgcaagggcatggagtacctgggcaccaagcgctacatccaccgggacctggccaccaggaacatcctggtggagaatgaaaatagagtgaagatcggggactttggcctgaccaaggtgctgccccaggacaaggagtactacaaggtgaaggagcctggagagagccccatcttctggtacgcccctgagagcctgacagagagcaagttctctgtggccagtgatgtgtggagctttggagtggtgctgtatgagctgttcacctacatcgagaagagcaagagccccccagctgagttcatgaggatgattggaaatgacaagcagggccagatgattgtgttccacctgattgagctgctgaagaacaacggccgcctgcccaggccagatggctgcccagatgagatctacatgatcatgacagagtgctggaacaacaacgtgaaccagaggcccagcttccgggacctggccctgcgggtggaccagatccgggacaacatggccggctag

SEQ ID NO: 151509 - DNA, 2952 bp, Artificial Sequence
  derived and/or modified sequence
atgagctacctgtttgcccagtggaggcatgactttgtgcacggctggatcaaggtgcctgtgacccatgagacccaggaggagtgcctgggcatggctgtgctggacatgatgagaattgccaaggaaaatgaccagacccccctggccatctacaacagcatctcctacaagaccttcctgcccaagtgcatccgggccaagatccaggactaccacatcctgaccaggaagaggatccgctaccgcttccgccgcttcatccagcagttcagccagtgcaaggccacagccaggaacctgaagctgaagtacctgatcaacctggagaccctgcagagcgccttctacacagagaagtttgaggtgaaggagcccggcagcggccccagcggggaggagatctttgccaccatcatcatcactggaaatggaggcatccagtggagccggggcaagcacaaggagagcgagaccctgacagagcaggacctgcagctgtactgtgacttccccaacatcattgatgtgtccatcaagcaggccaaccaggagggcagcaatgaaagccgggtggtgaccatccacaagcaggacggcaagaacctggagattgagctgagcagcctgcgggaggccctgagctttgtgtccctgattgatggctactaccgcctgacagcagatgcccaccactacctgtgcaaggaggtggcccccccagctgtgctggagaacatccagagcaactgccacggccccatctccatggactttgccatcagcaagctgaagaaggccggcaaccagacaggcctgtatgtgctgcgctgcagccccaaggacttcaacaagtacttcctgacctttgctgtggagagagaaaatgtcatcgagtacaagcactgcctgatcaccaagaatgaaaatgaggagtacaacctgagcggcaccaagaagaacttcagcagcctgaaggacctgctgaactgctaccagatggagaccgtgcggagtgacaacatcatcttccagttcaccaagtgctgcccccccaagcccaaggacaagagcaacctgctggtgttccgcaccaacggggtgtctgatgtgcccaccagccccaccctgcagaggcccacccacatgaaccagatggtgttccacaagatcagaaatgaagacctgatcttcaatgaaagcctgggccagggcaccttcaccaagatcttcaagggcgtgagaagagaggtgggggactatggccagctgcatgaaacagaggtgctgctgaaggtgctggacaaggcccacaggaactacagcgagagcttctttgaggccgcctccatgatgagcaagctgagccacaagcacctggtgctgaactacggcgtgtgtgtgtgtggagatgagaacatcctggtgcaggagtttgtgaagtttggcagcctggacacctacctgaagaagaacaagaactgcatcaacatcctgtggaagctggaggtggccaagcagctggcctgggccatgcacttcctggaggagaacaccctcatccacggcaatgtgtgtgccaagaacatcctgctgatccgggaggaggacaggaagacaggcaacccccccttcatcaagctgagtgaccccggcatcagcatcaccgtgctgcccaaggacatcctgcaggagcgcatcccctgggtgcccccagaatgtattgagaaccccaagaacctgaacctggccacagacaagtggagctttggcaccaccctgtgggagatctgcagcggcggggacaagcccctgagcgccctggacagccagaggaagctgcagttctatgaggacagacaccagctgcctgcccccaagtgggccgagctggccaacctgatcaacaactgcatggactatgagccagacttccggcccagcttccgggccatcatccgggacctgaacagcctcttcaccccagactatgagctgctgacagaaaatgacatgctgcccaacatgagaattggagccctgggcttcagcggggcctttgaggaccgggaccccacccagtttgaggagcggcacctgaagttcctgcagcagctgggcaagggcaactttggatctgtggagatgtgccgctatgaccccctgcaggacaacacaggagaggtggtggccgtgaagaagctgcagcacagcacagaggagcacctgcgggactttgagcgggagattgagatcctgaagagcctgcagcacgacaacatcgtgaagtacaagggcgtgtgctacagcgctggaagaagaaacctgaagctgatcatggagtacctgccctacggcagcctgcgggactacctgcagaagcacaaggagagaattgaccacatcaagctgctgcagtacaccagccagatctgcaagggcatggagtacctgggcaccaagcgctacatccaccgggacctggccaccaggaacatcctggtggagaatgaaaatagagtgaagattggagactttggcctgaccaaggtgctgccccaggacaaggagtactacaaggtgaaggagcccggggagagccccatcttctggtacgcccctgagagcctgacagagagcaagttctctgtggccagtgatgtgtggagctttggagtggtgctgtatgagctgttcacctacatcgagaagagcaagagccccccagctgagttcatgaggatgattggaaatgacaagcagggccagatgattgtgttccacctgattgagctgctgaagaacaacggccgcctgcccaggccagatggctgcccagatgagatctacatgatcatgacagagtgctggaacaacaacgtgaaccagaggcccagcttccgggacctggccctgcgggtggaccagatccgggacaacatggccggctag

SEQ ID NO: 151510 - DNA, 5285 bp, Artificial Sequence
  derived and/or modified sequence
ctgcaggaaggagagaggaagaggagcagaagggggcagcagcggacgccgctaacggcctccctcggcgctgacaggctgggccggcgcccggctcgcttgggtgttcgcgtcgccacttcggcttctcggccggtcgggcccctcggcccgggcttgcggcgcgcgtcggggctgagggctgctgcggcgcagggagaggcctggtcctcgctgccgagggatgtgagtgggagctgagcccacactggagggcccccgagggcccagcctggaggtcgttcagagccgtgcccgtcccggggcttcgcagaccttgacccgccgggtaggagccgcccctgcgggctcgagggcgcgctctggtcgcccgatctgtgtagccggtttcagaagcaggcaacaggaacaagatgtgaactgtttctcttctgcagaaaaagaggctcttcctcctcctcccgcgacggcaaatgttctgaaaaagactctgcatgggaatggcctgccttacgatgacagaaatggagggaacatccacctcttctatatatcagaatggtgatatttctggaaatgccaattctatgaagcaaatagatccagttcttcaggtgtatctttaccattcccttgggaaatctgaggcagattatctgacctttccatctggggagtatgttgcagaagaaatctgtattgctgcttctaaagcttgtggtatcacacctgtgtatcataatatgtttgctttaatgagtgaaacagaaaggatctggtatccacccaaccatgtcttccatatagatgagtcaaccaggcataatgtactctacagaataagattttactttcctcgttggtattgcagtggcagcaacagagcctatcggcatggaatatctcgaggtgctgaagctcctcttcttgatgactttgtcatgtcttacctctttgctcagtggcggcatgattttgtgcacggatggataaaagtacctgtgactcatgaaacacaggaagaatgtcttgggatggcagtgttagatatgatgagaatagccaaagaaaacgatcaaaccccactggccatctataactctatcagctacaagacattcttaccaaaatgtattcgagcaaagatccaagactatcatattttgacaaggaagcgaataaggtacagatttcgcagatttattcagcaattcagccaatgcaaagccactgccagaaacttgaaacttaagtatcttataaatctggaaactctgcagtctgccttctacacagagaaatttgaagtaaaagaacctggaagtggtccttcaggtgaggagatttttgcaaccattataataactggaaacggtggaattcagtggtcaagagggaaacataaagaaagtgagacactgacagaacaggatttacagttatattgcgattttcctaatattattgatgtcagtattaagcaagcaaaccaagagggttcaaatgaaagccgagttgtaactatccataagcaagatggtaaaaatctggaaattgaacttagctcattaagggaagctttgtctttcgtgtcattaattgatggatattatagattaactgcagatgcacatcattacctctgtaaagaagtagcacctccagccgtgcttgaaaatatacaaagcaactgtcatggcccaatttcgatggattttgccattagtaaactgaagaaagcaggtaatcagactggactgtatgtacttcgatgcagtcctaaggactttaataaatattttttgacttttgctgtcgagcgagaaaatgtcattgaatataaacactgtttgattacaaaaaatgagaatgaagagtacaacctcagtgggacaaagaagaacttcagcagtcttaaagatcttttgaattgttaccagatggaaactgttcgctcagacaatataattttccagtttactaaatgctgtcccccaaagccaaaagataaatcaaaccttctagtcttcagaacgaatggtgtttctgatgtaccaacctcaccaacattacagaggcctactcatatgaaccaaatggtgtttcacaaaatcagaaatgaagatttgatatttaatgaaagccttggccaaggcacttttacaaagatttttaaaggcgtacgaagagaagtaggagactacggtcaactgcatgaaacagaagttcttttaaaagttctggataaagcacacagaaactattcagagtctttctttgaagcagcaagtatgatgagcaagctttctcacaagcatttggttttaaattatggagtatgtgtctgtggagacgagaatattctggttcaggagtttgtaaaatttggatcactagatacatatctgaaaaagaataaaaattgtataaatatattatggaaacttgaagttgctaaacagttggcatgggccatgcattttctagaagaaaacacccttattcatgggaatgtatgtgccaaaaatattctgcttatcagagaagaagacaggaagacaggaaatcctcctttcatcaaacttagtgatcctggcattagtattacagttttgccaaaggacattcttcaggagagaataccatgggtaccacctgaatgcattgaaaatcctaaaaatttaaatttggcaacagacaaatggagttttggtaccactttgtgggaaatctgcagtggaggagataaacctctaagtgctctggattctcaaagaaagctacaattttatgaagataggcatcagcttcctgcaccaaagtgggcagaattagcaaaccttataaataattgtatggattatgaaccagatttcaggccttctttcagagccatcatacgagatcttaacagtttgtttactccagattatgaactattaacagaaaatgacatgttaccaaatatgaggataggtgccctggggttttctggtgcctttgaagaccgggatcctacacagtttgaagagagacatttgaaatttctacagcaacttggcaagggtaattttgggagtgtggagatgtgccggtatgaccctctacaggacaacactggggaggtggtcgctgtaaaaaagcttcagcatagtactgaagagcacctaagagactttgaaagggaaattgaaatcctgaaatccctacagcatgacaacattgtaaagtacaagggagtgtgctacagtgctggtcggcgtaatctaaaattaattatggaatatttaccatatggaagtttacgagactatcttcaaaaacataaagaacggatagatcacataaaacttctgcagtacacatctcagatatgcaagggtatggagtatcttggtacaaaaaggtatatccacagggatctggcaacgagaaatatattggtggagaacgagaacagagttaaaattggagattttgggttaaccaaagtcttgccacaagacaaagaatactataaagtaaaagaacctggtgaaagtcccatattctggtatgctccagaatcactgacagagagcaagttttctgtggcctcagatgtttggagctttggagtggttctgtatgaacttttcacatacattgagaagagtaaaagtccaccagcggaatttatgcgtatgattggcaatgacaaacaaggacagatgatcgtgttccatttgatagaacttttgaagaataatggaagattaccaagaccagatggatgcccagatgagatctatatgatcatgacagaatgctggaacaataatgtaaatcaacgcccctcctttagggatctagctcttcgagtggatcaaataagggataacatggctggatgaaagaaatgaccttcattctgagaccaaagtagatttacagaacaaagttttatatttcacattgctgtggactattattacatatatcattattatataaatcatgatgctagccagcaaagatgtgaaaatatctgctcaaaactttcaaagtttagtaagtttttcttcatgaggccaccagtaaaagacattaatgagaattccttagcaaggattttgtaagaagtttcttaaacattgtcagttaacatcactcttgtctggcaaaagaaaaaaaatagactttttcaactcagctttttgagacctgaaaaaattattatgtaaattttgcaatgttaaagatgcacagaatatgtatgtatagtttttaccacagtggatgtataataccttggcatcttgtgtgatgttttacacacatgagggctggtgttcattaatactgttttctaatttttccatagttaatctataattaattacttcactatacaaacaaattaagatgttcagataattgaataagtacctttgtgtccttgttcatttatatcgctggccagcattataagcaggtgtatacttttagcttgtagttccatgtactgtaaatatttttcacataaagggaacaaatgtctagttttatttgtataggaaatttccctgaccctaaataatacattttgaaatgaaacaagcttacaaagatataatctattttattatggtttcccttgtatctatttgtggtgaatgtgttttttaaatggaactatctccaaatttttctaagactactatgaacagttttcttttaaaattttgagattaagaatgccaggaatattgtcatcctttgagctgctgactgccaataacattcttcgatctctgggatttatgctcatgaactaaatttaagcttaagccataaaatagattagattgttttttaaaaatggatagctcattaagaagtgcagcaggttaagaattttttcctaaagactgtatatttgaggggtttcagaattttgcattgcagtcatagaagagatttatttcctttttagaggggaaatgaggtaaataagtaaaaaagtatgcttgttaattttattcaagaatgccagtagaaaattcataacgtgtatctttaagaaaaatgagcatacatcttaaatcttttcaattaagtataaggggttgttcgttgttgtcatttgttatagtgctactccactttagacaccatagctaaaataaaatatggtgggttttgtgtgtgtgtgtgtgtgtgtgtgtgtgtgtgtgtgtgtgttatttatacaaaacttaaaatacttgctgttttgattaaaaagaaaatagtttcttacttta

SEQ ID NO: 151511 - DNA, 3535 bp, Artificial Sequence
  derived and/or modified sequence
attcggggagactgcaggccaaccgggaggctgagttcgaagctagcagggcggcgaagccagtgtcgcccgcggcgttgagaagacggcaaatgttctgaaaaagactctgcatgggaatggcctgccttacgatgacagaaatggagggaacatccacctcttctatatatcagaatggtgatatttctggaaatgccaattctatgaagcaaatagatccagttcttcaggtgtatctttaccattcccttgggaaatctgaggcagattatctgacctttccatctggggagtatgttgcagaagaaatctgtattgctgcttctaaagcttgtggtatcacacctgtgtatcataatatgtttgctttaatgagtgaaacagaaaggatctggtatccacccaaccatgtcttccatatagatgagtcaaccaggcataatgtactctacagaataagattttactttcctcgttggtattgcagtggcagcaacagagcctatcggcatggaatatctcgaggtgctgaagctcctcttcttgatgactttgtcatgtcttacctctttgctcagtggcggcatgattttgtgcacggatggataaaagtacctgtgactcatgaaacacaggaagaatgtcttgggatggcagtgttagatatgatgagaatagccaaagaaaacgatcaaaccccactggccatctataactctatcagctacaagacattcttaccaaaatgtattcgagcaaagatccaagactatcatattttgacaaggaagcgaataaggtacagatttcgcagatttattcagcaattcagccaatgcaaagccactgccagaaacttgaaacttaagtatcttataaatctggaaactctgcagtctgccttctacacagagaaatttgaagtaaaagaacctggaagtggtccttcaggtgaggagatttttgcaaccattataataactggaaacggtggaattcagtggtcaagagggaaacataaagaaagtgagacactgacagaacaggatttacagttatattgcgattttcctaatattattgatgtcagtattaagcaagcaaaccaagagggttcaaatgaaagccgagttgtaactatccataagcaagatggtaaaaatctggaaattgaacttagctcattaagggaagctttgtctttcgtgtcattaattgatggatattatagattaactgcagatgcacatcattacctctgtaaagaagtagcacctccagccgtgcttgaaaatatacaaagcaactgtcatggcccaatttcgatggattttgccattagtaaactgaagaaagcaggtaatcagactggactgtatgtacttcgatgcagtcctaaggactttaataaatattttttgacttttgctgtcgagcgagaaaatgtcattgaatataaacactgtttgattacaaaaaatgagaatgaagagtacaacctcagtgggacaaagaagaacttcagcagtcttaaagatcttttgaattgttaccagatggaaactgttcgctcagacaatataattttccagtttactaaatgctgtcccccaaagccaaaagataaatcaaaccttctagtcttcagaacgaatggtgtttctgatgtaccaacctcaccaacattacagaggcctactcatatgaaccaaatggtgtttcacaaaatcagaaatgaagatttgatatttaatgaaagccttggccaaggcacttttacaaagatttttaaaggcgtacgaagagaagtaggagactacggtcaactgcatgaaacagaagttcttttaaaagttctggataaagcacacagaaactattcagagtctttctttgaagcagcaagtatgatgagcaagctttctcacaagcatttggttttaaattatggagtatgtgtctgtggagacgagaatattctggttcaggagtttgtaaaatttggatcactagatacatatctgaaaaagaataaaaattgtataaatatattatggaaacttgaagttgctaaacagttggcatgggccatgcattttctagaagaaaacacccttattcatgggaatgtatgtgccaaaaatattctgcttatcagagaagaagacaggaagacaggaaatcctcctttcatcaaacttagtgatcctggcattagtattacagttttgccaaaggacattcttcaggagagaataccatgggtaccacctgaatgcattgaaaatcctaaaaatttaaatttggcaacagacaaatggagttttggtaccactttgtgggaaatctgcagtggaggagataaacctctaagtgctctggattctcaaagaaagctacaattttatgaagataggcatcagcttcctgcaccaaagtgggcagaattagcaaaccttataaataattgtatggattatgaaccagatttcaggccttctttcagagccatcatacgagatcttaacagtttgtttactccagattatgaactattaacagaaaatgacatgttaccaaatatgaggataggtgccctggggttttctggtgcctttgaagaccgggatcctacacagtttgaagagagacatttgaaatttctacagcaacttggcaagggtaattttgggagtgtggagatgtgccggtatgaccctctacaggacaacactggggaggtggtcgctgtaaaaaagcttcagcatagtactgaagagcacctaagagactttgaaagggaaattgaaatcctgaaatccctacagcatgacaacattgtaaagtacaagggagtgtgctacagtgctggtcggcgtaatctaaaattaattatggaatatttaccatatggaagtttacgagactatcttcaaaaacataaagaacggatagatcacataaaacttctgcagtacacatctcagatatgcaagggtatggagtatcttggtacaaaaaggtatatccacagggatctggcaacgagaaatatattggtggagaacgagaacagagttaaaattggagattttgggttaaccaaagtcttgccacaagacaaagaatactataaagtaaaagaacctggtgaaagtcccatattctggtatgctccagaatcactgacagagagcaagttttctgtggcctcagatgtttggagctttggagtggttctgtatgaacttttcacatacattgagaagagtaaaagtccaccagcggaatttatgcgtatgattggcaatgacaaacaaggacagatgatcgtgttccatttgatagaacttttgaagaataatggaagattaccaagaccagatggatgcccagatgagatctatatgatcatgacagaatgctggaacaataatgtaaatcaacgcccctcctttagggatctagctcttcgagtggatcaaataagggataacatggctggatgaaagaaatgaccttcattctgaga

SEQ ID NO: 151512 - DNA, 3381 bp, Artificial Sequence
  derived and/or modified sequence
gagaagctcgactacgactacctgcggaagctctccagctacctcttcgaccgaagcggcttcgtgttcgactctgagtacgaggggctcgggaagcccttggcgacccccatcagcagtgtccacaccgacctgccctcccagcctcagcttcgggacaaagatcagccgcacagcaaaaaccaggcgctgaactccaccaatggggagctgaacgcggacgaccccatggccggccactccagcgcccatcagggcgcctgcagagatggagattttactttcctcgttggtattgcagtggcagcaacagagcctatcggcatggaatatctcgaggtgctgaagctcctcttcttgatgactttgtcatgtcttacctctttgctcagtggcggcatgattttgtgcacggatggataaaagtacctgtgactcatgaaacacaggaagaatgtcttgggatggcagtgttagatatgatgagaatagccaaagaaaacgatcaaaccccactggccatctataactctatcagctacaagacattcttaccaaaatgtattcgagcaaagatccaagactatcatattttgacaaggaagcgaataaggtacagatttcgcagatttattcagcaattcagccaatgcaaagccactgccagaaacttgaaacttaagtatcttataaatctggaaactctgcagtctgccttctacacagagaaatttgaagtaaaagaacctggaagtggtccttcaggtgaggagatttttgcaaccattataataactggaaacggtggaattcagtggtcaagagggaaacataaagaaagtgagacactgacagaacaggatttacagttatattgcgattttcctaatattattgatgtcagtattaagcaagcaaaccaagagggttcaaatgaaagccgagttgtaactatccataagcaagatggtaaaaatctggaaattgaacttagctcattaagggaagctttgtctttcgtgtcattaattgatggatattatagattaactgcagatgcacatcattacctctgtaaagaagtagcacctccagccgtgcttgaaaatatacaaagcaactgtcatggcccaatttcgatggattttgccattagtaaactgaagaaagcaggtaatcagactggactgtatgtacttcgatgcagtcctaaggactttaataaatattttttgacttttgctgtcgagcgagaaaatgtcattgaatataaacactgtttgattacaaaaaatgagaatgaagagtacaacctcagtgggacaaagaagaacttcagcagtcttaaagatcttttgaattgttaccagatggaaactgttcgctcagacaatataattttccagtttactaaatgctgtcccccaaagccaaaagataaatcaaaccttctagtcttcagaacgaatggtgtttctgatgtaccaacctcaccaacattacagaggcctactcatatgaaccaaatggtgtttcacaaaatcagaaatgaagatttgatatttaatgaaagccttggccaaggcacttttacaaagatttttaaaggcgtacgaagagaagtaggagactacggtcaactgcatgaaacagaagttcttttaaaagttctggataaagcacacagaaactattcagagtctttctttgaagcagcaagtatgatgagcaagctttctcacaagcatttggttttaaattatggagtatgtgtctgtggagacgagaatattctggttcaggagtttgtaaaatttggatcactagatacatatctgaaaaagaataaaaattgtataaatatattatggaaacttgaagttgctaaacagttggcatgggccatgcattttctagaagaaaacacccttattcatgggaatgtatgtgccaaaaatattctgcttatcagagaagaagacaggaagacaggaaatcctcctttcatcaaacttagtgatcctggcattagtattacagttttgccaaaggacattcttcaggagagaataccatgggtaccacctgaatgcattgaaaatcctaaaaatttaaatttggcaacagacaaatggagttttggtaccactttgtgggaaatctgcagtggaggagataaacctctaagtgctctggattctcaaagaaagctacaattttatgaagataggcatcagcttcctgcaccaaagtgggcagaattagcaaaccttataaataattgtatggattatgaaccagatttcaggccttctttcagagccatcatacgagatcttaacagtttgtttactccagattatgaactattaacagaaaatgacatgttaccaaatatgaggataggtgccctggggttttctggtgcctttgaagaccgggatcctacacagtttgaagagagacatttgaaatttctacagcaacttggcaagggtaattttgggagtgtggagatgtgccggtatgaccctctacaggacaacactggggaggtggtcgctgtaaaaaagcttcagcatagtactgaagagcacctaagagactttgaaagggaaattgaaatcctgaaatccctacagcatgacaacattgtaaagtacaagggagtgtgctacagtgctggtcggcgtaatctaaaattaattatggaatatttaccatatggaagtttacgagactatcttcaaaaacataaagaacggatagatcacataaaacttctgcagtacacatctcagatatgcaagggtatggagtatcttggtacaaaaaggtatatccacagggatctggcaacgagaaatatattggtggagaacgagaacagagttaaaattggagattttgggttaaccaaagtcttgccacaagacaaagaatactataaagtaaaagaacctggtgaaagtcccatattctggtatgctccagaatcactgacagagagcaagttttctgtggcctcagatgtttggagctttggagtggttctgtatgaacttttcacatacattgagaagagtaaaagtccaccagcggaatttatgcgtatgattggcaatgacaaacaaggacagatgatcgtgttccatttgatagaacttttgaagaataatggaagattaccaagaccagatggatgcccagatgagatctatatgatcatgacagaatgctggaacaataatgtaaatcaacgcccctcctttagggatctagctcttcgagtggatcaaataagggataacatggctggatgaaagaaatgaccttcattctgagaccaaagtagatttacagaacaaagttttatatttc

SEQ ID NO: 151513 - DNA, 3399 bp, Artificial Sequence
  derived and/or modified sequence
atgggcatggcctgcctgaccatgaccgagatggagggcaccagcaccagctctatctaccagaatggagacatctccggcaacgcaaattccatgaaacagatcgaccctgtgttgcaagtttatctctatcacagccttggcaaaagcgaagctgattatcttacattccccagcggagaatacgtggccgaggaaatctgtatcgccgcctcaaaggcctgtggcatcactccggtctaccataacatgttcgccctcatgtcagagacagaacggatttggtatccgcctaaccatgtgtttcacattgatgaatctactcgacacaacgtcttgtacagaatccgcttctacttcccacgctggtactgctccggtagcaaccgggcttaccgtcacggtatcagccgcggtgccgaagcgcctttgttggacgactttgtaatgtcctatttgttcgcccagtggagacacgatttcgtccatgggtggattaaggttcccgttacgcacgaaactcaggaggagtgcctcggcatggctgttctggacatgatgcggatcgctaaggaaaatgatcaaactccactggctatctacaactctatcagttacaagaccttccttcctaaatgtattcgagccaagattcaggattatcatattctgacccgcaagaggattcgatatcgtttcagacgcttcatacagcagttcagccagtgcaaagcaaccgcaaggaatctgaagctaaagtatctgatcaatctcgagaccctccagagcgccttctacacagagaagttcgaggtgaaggaacctgggagcggtccctcaggtgaggagatatttgcaaccatcatcatcactggtaacggcgggattcagtggtccaggggcaagcacaaagaaagtgaaaccctgacagagcaggatcttcaactttattgcgacttcccgaatatcatcgatgtgagcatcaagcaggccaaccaggagggcagcaacgagtcaagggtcgtgaccattcacaagcaagatgggaaaaacttagaaattgaactgtccagcttgcgcgaagccctctcttttgtgtccttgatagacggatactataggctaactgctgacgctcatcattacctatgcaaggaggtcgctcctcctgcagttctggagaacatccaatccaattgtcacggtcccatctccatggactttgccatctcaaaactcaagaaggctgggaaccagacaggtctctacgtactgagatgctctcctaaagactttaacaaatactttctcactttcgctgtggagagggaaaacgttatcgaatacaaacactgtctgatcactaagaatgagaatgaggaatacaacttgagtggcactaagaaaaacttcagctcattaaaggatcttttaaactgctaccagatggagacagttcgcagcgacaacatcatttttcaattcactaaatgctgtcctccaaaacccaaagataaatctaacttgcttgtcttccggacaaatggggtgagtgacgtgccaacttcgcccaccctgcaacgtcctacccacatgaatcagatggtgtttcacaagatccgcaatgaagacctcattttcaacgagagcctggggcagggaacctttaccaagatcttcaagggagtacggcgcgaagtgggggattacgggcagcttcacgagaccgaagtcttgctgaaggttcttgacaaggcccatcgcaactactcagagtctttcttcgaggcagctagcatgatgagcaaactttctcataagcatctggtgctcaattacggagtatgcgtctgcggagacgaaaacattctggtgcaagaatttgtcaagtttgggtcattggacacatacctcaagaaaaacaaaaattgcatcaatatcctttggaagctcgaggtggctaagcagctcgcttgggcaatgcactttctcgaagaaaatactcttattcacgggaacgtgtgcgcaaagaacattttgcttatccgcgaagaagatcggaagactggaaatccgcccttcattaaattatctgatcctggcattagtatcaccgtgcttccaaaggacattttgcaggagcgaatcccctgggtccccccggagtgtattgagaaccccaagaacttgaatttggccactgataaatggagctttggaacaaccctgtgggaaatttgctcaggcggcgataaaccactcagtgcgctggactcccaacgcaagctgcagttctatgaggaccgacaccagcttcctgctccaaaatgggccgagttagcgaacctgatcaacaattgcatggattacgagccggattttaggcccagcttccgggccattatccgcgacctgaatagcctttttactcccgactacgaactgctgacagagaatgatatgctgccaaatatgcggataggtgcactcggattctcaggcgctttcgaagacagagaccctacacaatttgaggagcggcacctgaagtttctgcagcagctgggaaagggaaattttggaagcgttgaaatgtgccggtacgacccactccaggacaataccggagaggtggtcgccgtgaagaagctgcagcacagtacggaagagcacttacgtgacttcgaacgcgaaatcgagattctgaagagtttacagcacgataacatcgtaaagtacaagggggtgtgttacagtgcgggacggcggaacctgaagctgattatggagtacttgccctatggttctttgagagactacctccagaagcacaaggagcggatcgaccacattaagcttttgcaatatacttcgcagatctgtaaaggtatggagtacctggggactaagagatatatccacagggacctggccacaagaaatatcctggtcgaaaacgagaaccgggtgaagattggggattttggactcaccaaggtactaccacaggacaaggaatactacaaggtgaaggagccgggtgaaagtccaatcttttggtacgctcccgagagcctcaccgaatctaagttctccgtcgcctctgacgtatggagttttggcgtggttctttacgaactgttcacatacattgagaagagtaaatctccacctgccgaatttatgcggatgatcgggaatgacaagcaaggccagatgatagtttttcacctgatcgagttacttaaaaataatggacggttaccgaggcccgatggttgtcccgatgaaatttatatgatcatgaccgaatgttggaacaataacgtgaaccaaaggccctcatttcgcgatctggctttgcgcgtagatcaaatccgagataacatggctggttag

SEQ ID NO: 151514 - DNA, 3399 bp, Artificial Sequence
  derived and/or modified sequence
atgggcatggcctgcctgaccatgaccgagatggagggcaccagcacttcttctatttatcagaacggcgatatttctggcaacgccaactccatgaagcaaatcgatccggtactgcaggtttatctgtaccacagtcttggcaagagtgaagcggactatctcacgttcccttcaggggaatatgtggctgaggaaatatgcatagccgctagtaaagcctgtggcataaccccagtatatcacaacatgtttgctctgatgagtgaaactgaacggatttggtacccaccaaaccacgtcttccacatagacgagagtacaaggcacaacgtcttgtaccggatccggttctacttcccacgttggtactgcagcggcagcaatcgagcctaccggcacggaattagtagaggcgccgaggctcccctgctggacgatttcgtgatgtcctacctctttgcccaatggcgccatgacttcgttcatggatggataaaagtgcctgttacacatgagactcaggaggagtgcctcgggatggctgtcctggatatgatgcgaatcgctaaggaaaacgaccaaactccgctagcaatctacaatagcatttcatacaagaccttcctgcccaagtgtatcagggcaaagatccaggattaccatattctgacaagaaaacgtatcaggtacaggttccggcggttcatccagcagttctctcagtgtaaagccacagccaggaacctaaagctgaagtatcttattaatttggagactttgcaatcagctttctatacagagaaatttgaggtgaaggaacctggttccgggccatcaggcgaggaaattttcgccacaatcatcatcacgggaaatggagggatacagtggagccgcggcaaacacaaagagtctgaaactcttaccgagcaagacctgcagttatattgtgattttccgaacattatagatgtgagcatcaagcaggccaatcaagaaggttctaatgagtcccgggtggttactatccataaacaggatggcaagaatcttgagatagagctctcctcgttgcgggaggctctcagctttgtatccctcattgatggttattacaggctgacagccgatgcccaccattatctctgtaaggaggtggcacctccagctgtgctggagaacatccagtcgaactgtcatggtccgatctccatggatttcgccatctctaaactcaagaaggctggcaaccagacaggcttatacgtcctgagatgctctccaaaggacttcaacaagtactttctgactttcgccgtggaacgtgagaacgtgattgagtacaaacactgcttaattaccaagaacgagaacgaggagtacaacttgtcaggaacaaaaaaaaacttcagttcccttaaagatctgctaaattgttaccagatggaaactgttcggagcgataatataatcttccaatttactaagtgttgtccgccaaaacccaaagacaagtcgaatctcctggtgttccggacaaatggcgttagcgatgtgcccacatctcccacactccagcgccccactcatatgaatcagatggtgtttcataaaatcaggaacgaagatctcatctttaacgagagtctcggccaaggtacatttactaagatcttcaaaggagtgcggcgcgaggtgggcgactacggacagctgcacgagaccgaggtcttgctgaaagtattggataaggcgcaccggaattactcagaaagcttcttcgaggcagccagcatgatgtccaagttgagccataagcacttggttctgaactatggggtttgtgtttgcggagacgaaaatattctggttcaagaattcgtgaaattcggctccctggacacatacctcaagaagaacaaaaactgtattaacatattatggaagctggaggtggcaaaacagttagcgtgggccatgcacttcttagaggaaaacactcttatccatgggaacgtctgcgccaagaatatcctgctcatcagggaggaggaccgaaagacgggcaatccaccctttataaaactgtctgaccccggcatctcaatcacggtcctgcctaaggatatcctccaggaacggatcccctgggtccctccagagtgtattgagaacccaaagaacctcaatctggcaacggataagtggagcttcgggacaactctgtgggagatatgttctgggggcgataaacctctgtcagcgctcgatagtcagcgaaagctgcagttttatgaagatcgccatcaactgccagcacctaagtgggcggagttggcgaatctgataaataactgcatggactatgaacccgatttccggccctcttttagggccattatcagagacctgaacagtttgttcaccccagattatgaattattaaccgaaaacgatatgctgccgaatatgagaattggcgccctcggattcagtggagcctttgaggacagagaccccacccaatttgaagaacgacatctgaaatttttacagcagttagggaaaggtaacttcggctcagtggagatgtgccgttacgaccccctccaggataacactggggaagtggtcgctgttaagaagttacagcactcaaccgaagagcacttgcgcgatttcgagagggagattgagatcctgaagtccctacagcatgataacatcgtgaaatacaagggggtgtgctacagcgccggacgaagaaatttgaagctgatcatggagtacttaccttatgggagtctgcgggattatcttcagaaacacaaggagaggattgaccatattaagctgctgcaatacacatcccagatctgcaagggaatggaatatctcgggactaaacggtacattcatcgcgacttggcaacgaggaacatcctggtggaaaacgaaaatagggtgaaaattggcgacttcggcttaacgaaggtgttaccgcaagataaggagtattataaggtgaaggaacccggggagagcccgatcttttggtatgctcctgagtccctgaccgaatcaaaattctcagtggcatccgatgtctggagttttggggtggtgttgtatgaactttttacttacatcgagaagtcgaaatccccccccgcagagttcatgagaatgattggcaatgacaaacaaggccagatgattgtttttcaccttatcgagctcctcaaaaacaatggacgcctgccacgtccagacgggtgcccagatgagatctacatgataatgacagagtgctggaacaataatgtaaaccagcggccctcttttcgagaccttgcactgagagtggaccagattagggacaacatggcaggatag

SEQ ID NO: 151515 - DNA, 2952 bp, Artificial Sequence
  derived and/or modified sequence
atgagctacctgttcgcccagtggcggcacgacttcgtgcacggctggattaaggtgccagttacgcatgagacccaggaagagtgtttaggaatggccgtcctggacatgatgcggatcgccaaagaaaacgaccagacgccactggccatctataacagtattagctacaaaaccttccttccgaagtgtattcgagcaaaaatccaggattaccacattctcaccaggaagaggatcaggtatcgattcaggcgctttatacagcagttttctcagtgtaaggccacagccaggaacctgaaactgaagtacctcatcaatctcgaaacgcttcagtcagctttctataccgagaaatttgaggtcaaggaacccggctctggccctagcggagaggagattttcgctaccattatcatcacaggtaatggaggcattcaatggtcccgaggtaaacataaggagagcgaaactctgaccgagcaggatctgcagctctactgtgatttcccgaatatcatagacgtgagtattaagcaggctaatcaggaaggatctaatgaatcaagggtggtcacaattcacaagcaggacggcaaaaacttggagatcgaattgtccagtctgcgggaggctcttagctttgtttctctgattgacggatattacaggctcactgccgacgcccaccattacctgtgcaaagaggtggcgcccccagccgtactcgaaaatatccagtccaactgtcacggcccgatttctatggactttgcaattagtaagttaaagaaggccggcaatcaaaccggtctatacgtgctccggtgttcccccaaagactttaacaagtactttctgacattcgcagttgaacgggagaatgttatagaatacaaacactgtctcatcacaaagaacgaaaatgaggagtacaacctctcagggactaaaaagaacttctcctcattaaaggatctcctgaattgctaccagatggagactgtgaggtcggataacataattttccagttcaccaagtgctgtccccccaagcccaaggacaagagcaatttgctagtgttccgaacaaatggggttagcgatgtgcccactagccccaccttacaaaggccgacccatatgaatcaaatggtgttccacaagattaggaacgaggaccttatctttaatgagtctctcggccagggcaccttcacgaagatatttaaaggagtgcggagggaggtcggcgattacggacagcttcatgaaaccgaggtcctgttaaaggtgcttgacaaagctcacagaaattacagtgagagttttttcgaggccgcatccatgatgtcgaagctatcacataagcatcttgtgctgaattatggagtctgcgtgtgtggcgacgaaaacatcctcgtgcaggagtttgtgaagtttggatcattggacacctaccttaagaaaaataagaactgtatcaacatcttatggaaattggaagtggccaaacagctggcttgggccatgcattttctggaagagaatacattgatccacggcaacgtatgtgcgaagaatatcctgctgattcgggaggaagatcggaaaacaggcaatcctccttttataaaactgtcagacccgggtattagtatcacggtcctccccaaagacattttgcaggagcgcattccgtgggtccctccagagtgcattgaaaaccccaagaatctcaacctcgctaccgacaagtggtcctttgggacaacgctgtgggagatttgtagcgggggcgataagcctctcagcgccttggattctcaaaggaagctccagttttatgaagataggcaccagctccccgccccgaagtgggccgagctcgccaacctcatcaataactgtatggattacgaaccagattttaggccctcttttcgggccataatcagggatctaaatagcctcttcacaccagattatgaattgctgaccgagaacgacatgctgcccaatatgagaattggtgctttgggtttttctggcgcgttcgaggatagggacccaacgcagtttgaggagaggcacctgaaattcctgcagcagctggggaaaggaaatttcggctccgttgagatgtgcaggtatgatcccctgcaagataataccggggaggtcgtagccgtgaagaaactccagcacagcaccgaggaacatctacgcgactttgagagagaaatagaaattctaaagtctctccagcatgacaacattgttaagtataaaggagtgtgctacagcgccgggagaagaaatcttaaattgatcatggagtatctcccttatggcagcctaagagattatttgcagaagcataaggagaggattgaccacatcaagcttctccagtatacttctcaaatctgcaagggcatggagtatttgggaacgaagcggtatatacaccgggatctcgccacacggaacattctcgtggagaatgagaatcgcgtcaagattggagactttggcctgacaaaagtcttgccacaggacaaagagtattataaggtaaaagagccgggcgaatctcccattttctggtatgcccccgaatcccttactgaaagtaagtttagcgtagcatctgatgtgtggtcatttggtgtggttctgtacgagttgtttacctatatagagaagtccaaaagcccgcctgctgaattcatgcgtatgattggtaatgataagcagggccaaatgattgtgttccacttaatagaacttctgaaaaacaacggccgtcttccacggcccgatggctgtcccgacgaaatttacatgataatgactgagtgttggaataataacgtcaaccagcgcccatcttttagagatctcgccctccgggtggaccaaatccgggacaacatggccggttag

SEQ ID NO: 151516 - DNA, 3399 bp, Artificial Sequence
  derived and/or modified sequence
atgggtatggcatgtctaactatgacagagatggagggtacatccacaagttcgatctaccaaaacggagatatctcggggaacgctaacagcatgaagcaaatcgatcccgttctgcaggtctatctttaccacagtctgggcaaaagcgaagccgattaccttacttttccatctggagagtatgtggccgaagaaatttgcatcgcagctagtaaggcgtgcggaatcactccagtctaccataacatgtttgccctgatgtctgagacggaaaggatctggtacccccctaaccatgtctttcatatcgatgagagcaccagacacaacgtcttgtatagaattcgcttctacttccccagatggtactgcagcggaagcaatcgggcttacaggcatggcatatcccgcggagctgaggctcccctgctcgatgattttgtcatgtcgtatcttttcgctcaatggagacacgacttcgtgcacggctggatcaaggtccctgtaacacatgagacacaggaagagtgcctcggcatggctgtgctggatatgatgcggatcgcaaaggagaacgatcaaacacctctcgcgatctataactccattagctataaaactttcttacccaaatgtatacgtgctaagatacaggactatcacattttgactcggaaaagaatcaggtatagattccgacggtttattcagcaattctcccaatgcaaagctacagcacgtaacctcaagttgaaatatttaataaatttggaaacactgcagagtgcattttatactgaaaagtttgaggttaaggagcctggttctggtccatctggcgaggaaattttcgcaactatcatcatcaccggcaacggaggaatccagtggagccggggtaagcacaaggagtctgagactcttacggagcaggatttgcagctttactgtgactttcctaacattattgatgtttctatcaaacaagcgaaccaggagggttccaatgaatcaagagttgtaactatacacaagcaagacggcaaaaatctggagatcgagctatctagtttgagggaagctctgtcatttgtgtcattgatagatggttactaccgactgaccgcagacgctcaccattatctttgtaaagaagtcgcccctccagccgttctagagaacattcaatctaactgtcacggccctatatccatggatttcgctatctctaaattgaaaaaggctgggaaccagacaggcctttatgtgctccggtgcagccctaaagacttcaataagtactttcttacttttgcagtggaacgcgaaaacgtcatagaatataaacactgtctcattaccaagaacgagaatgaggagtataatctttccggaacaaagaaaaatttttccagcttaaaagatctattaaattgttaccagatggaaactgtgaggagtgacaatatcattttccagtttaccaagtgttgtccccctaaaccaaaggacaagtctaatctgctggtgtttcggaccaatggcgtatcagacgtgcctacctccccgacactgcagcgccctacacatatgaatcagatggtgtttcataaaatcagaaatgaggatctgatctttaatgagagcttggggcagggaacttttacgaaaatatttaagggcgtgcggagagaagtaggcgattacggccagctccatgagactgaggtcctgctgaaggtcctcgacaaggcacataggaactacagtgagtcattctttgaggccgctagcatgatgtccaaactgtctcacaaacatctcgtgttaaattacggcgtgtgcgtgtgtggggacgaaaatatcctggtgcaggagtttgtgaagttcgggagtctggacacttatctgaaaaaaaacaagaactgcatcaacatactttggaaattagaggttgccaaacagctcgcctgggctatgcacttcctggaggagaacacccttatccatggtaatgtatgcgcaaagaatattctgctgatccgggaagaggataggaaaacgggcaatcccccattcatcaaactgtccgatcctggaatctccatcacggtcctccccaaagacatcctgcaagagaggatcccctgggttcctccagagtgtatagagaaccctaagaacctgaacttggcaaccgacaagtggtctttcggaacaacactatgggagatttgctctggtggcgataagccactcagcgctctcgactctcagcgcaagctccagttttatgaggacaggcatcagctgcctgcccctaagtgggctgaactcgcaaatctgatcaacaattgcatggattatgagcccgacttccgaccatcattccgcgctattataagagacctgaatagcctgttcacccccgactatgagttgttgactgagaacgacatgttgccaaatatgcgaatcggggctttagggttctcgggggcatttgaggaccgtgacccaacccagtttgaagagcgccacttgaagtttttgcagcaactgggaaaggggaactttggctctgtggaaatgtgtcgttatgaccctttgcaggataataccggcgaggtagtggctgttaaaaaattgcagcacagcaccgaagagcacctccgggattttgaacgagaaatcgagatcctcaaatcattgcagcatgataacatcgtgaagtacaaaggcgtctgctactccgccggaagacgaaacctcaaactgatcatggaatatctcccgtatggctctcttcgggattacttgcagaagcacaaggaacgtatcgaccatattaaattgctgcagtacacaagccagatatgtaaaggtatggagtacctcggcaccaaacggtacatccaccgcgacctggccaccagaaacatcctcgttgaaaacgagaatcgggtcaagattggcgattttggcctgaccaaagtcctcccgcaggacaaagaatattacaaagtcaaagagccgggtgagagccccatcttctggtatgctcctgagtcccttaccgagtctaaattttccgttgccagtgacgtgtggtcgtttggggtggtcctgtatgagctgttcacctacatcgagaaatctaagtccccacctgctgaattcatgcggatgattggcaacgataagcagggccaaatgattgtgttccatcttatcgaattgttgaaaaacaacggcagattaccacgacccgatggttgtcccgacgagatctacatgattatgaccgagtgttggaataacaatgtgaaccagaggccatcatttagagacctggcccttcgggtggaccagatcagggacaacatggcgggatag

SEQ ID NO: 151517 - DNA, 3399 bp, Artificial Sequence
  derived and/or modified sequence
atgggcatggcttgtctgaccatgacggagatggagggcacctccacctcttctatttatcagaacggtgacatctcggggaatgccaacagtatgaagcagatcgatcccgttctgcaggtgtacctgtatcatagccttggaaaaagtgaagctgactacctgacgttccccagcggtgagtacgtcgctgaggagatttgcatcgcggctagtaaagcatgtgggattactcctgtttaccacaacatgttcgccttgatgagtgagactgagcgaatttggtatccacctaaccacgttttccacatcgacgagagcacgagacataacgtgctctacaggataagattttactttccgaggtggtattgctctggctccaatcgggcatataggcacgggatttcacgaggagcagaagcacctctgctggacgattttgtcatgtcctacctgttcgcccaatggaggcatgactttgtgcacggctggattaaggtcccagttacacacgaaactcaggaagagtgtctggggatggcggtgttagacatgatgaggatcgcgaaggagaacgatcagacccccttagccatctataactcaatatcgtataagacttttctgccgaagtgcattcgcgcaaagattcaggactaccatatcctcacacggaaacgcatccgctacaggttccggagattcattcaacagttttcccagtgcaaggcgacagccaggaatctcaaattgaaatacctgattaatctggagacacttcaaagcgccttttataccgaaaagtttgaggtgaaagaacctgggtctggcccaagcggcgaagagatttttgccacaataattatcacaggcaatgggggtattcaatggagccgcggaaagcacaaggagagcgagactctgacagagcaggacttgcagctgtactgcgattttccgaacataattgacgtgtcaattaaacaggcaaatcaggaagggagtaacgagtctcgagtggtcacgatccataagcaggacggcaagaacctagagatagagctatcatccttgcgggaggccctgagcttcgtttcccttattgatggttattaccgactgacggctgatgcccatcactacctgtgtaaagaggtggcgccaccggcagtgttagaaaacattcaatctaattgccacggaccaattagcatggactttgccatatcaaagctgaagaaggcgggtaaccagacaggtttgtacgttctgcgctgctccccaaaagatttcaataagtatttcctcacgtttgccgtggaaagagaaaatgtaattgaatacaagcactgcctaatcactaaaaacgagaacgaagagtacaatctttcaggcacgaaaaagaacttttccagcctgaaggatctcctgaattgctatcagatggagacagtgcgcagtgataatataatctttcagtttactaagtgctgcccccctaaacctaaggataagtccaacttactggtgttcaggacgaacggggtgtcagatgtccctacatctccaactctgcagaggcctacccacatgaatcagatggtgtttcacaagatcagaaatgaggacctgatctttaatgagagccttgggcaggggacctttaccaagattttcaagggagtgaggagggaagtaggcgattatggtcaacttcatgagacagaggttctgctcaaggtgctcgataaagcacatcggaattattctgaatctttctttgaggctgcttctatgatgagcaaactgtcccacaagcatctggtgctgaattatggcgtgtgtgtgtgcggtgacgagaacattctggtgcaagaatttgtgaagttcggctcactcgatacatacctgaagaaaaacaaaaactgtataaacatcctatggaaactcgaggtggccaagcagcttgcttgggcaatgcactttctggaagaaaacactctcatccacggaaacgtctgtgccaagaatatactgcttatcagagaggaggataggaagacaggcaatcctcccttcatcaagctgtccgatcccggaatcagcatcactgtgctccccaaagacatactccaagagagaattccatgggttccacccgagtgcatcgaaaacccgaaaaatctgaacctggccactgacaagtggagttttgggacgactctctgggagatatgttctggaggggataagccactctcagctttagactcccagcgtaaattacagttttacgaggatcgccatcagctgcctgctccgaagtgggctgaactcgctaatctgattaacaattgtatggattacgaaccagactttcggccttccttccgcgctatcatacgggacctcaactcactctttacccctgattacgagctcctgacagagaacgacatgctcccaaacatgcgcatcggcgctctggggttctcaggcgcttttgaggatagagacccgactcagtttgaagagcgacaccttaaattcttgcagcagttggggaagggaaacttcggttccgtcgagatgtgtcggtatgatcccctgcaggataataccggggaagtcgtggctgttaaaaagctacaacacagcactgaagagcacctccgagactttgaacgggaaatcgagattctgaagtccctacaacacgacaacattgtgaagtataaaggggtgtgctactccgcgggacgcaggaatttaaagctgataatggagtacctgccttatggatctctacgagactatctgcagaagcacaaggagagaatcgatcatattaagttgctgcagtacacatcacagatttgcaaaggcatggaatacttgggaactaaacgctacattcatcgagacttagctactcgaaacatactggtggagaatgaaaatcgcgtaaaaattggtgactttggtcttacaaaagttctgcctcaggacaaggaatattacaaagtcaaggagcccggtgaaagccccatcttttggtacgcaccagagagcctgacagagagtaaattttccgtggcctcagatgtgtggtcctttggggtagtgttatacgagctgttcacatatatcgaaaagtctaaatcgcctcccgctgaatttatgcggatgatcgggaacgacaagcaggggcaaatgattgtatttcatctgatcgagctacttaagaacaatggcagactccctagacctgatggttgcccagacgagatttatatgataatgaccgagtgctggaataacaatgttaaccagcgacctagttttcgcgatttggcactgagagtggaccagatcagagataatatggctggctag

SEQ ID NO: 151518 - DNA, 2952 bp, Artificial Sequence
  derived and/or modified sequence
atgtcatatctgtttgcccaatggcgccatgacttcgtgcacgggtggatcaaagtacccgtcacccacgagacccaggaggagtgtctgggcatggccgtcctggacatgatgcgcatcgccaaggagaatgatcagacacctctcgcaatctacaattcaataagctataagacatttttgccgaaatgtattagagccaaaatccaggattatcatatcttaaccaggaaaaggatcagatatcggttccgtcggtttattcagcagttctcccagtgcaaggcgacagccaggaacctgaagttaaaatatctgattaatctggagaccctacagtccgcattttacacggagaaattcgaggttaaagagcccggatcaggtccaagcggggaggaaatcttcgctaccattatcattacgggcaacgggggaatccagtggtcacgcggaaagcataaagagtcagagaccctaaccgaacaagatctgcagttgtattgcgactttccgaatatcattgatgtgtccatcaagcaggccaaccaggagggtagtaatgaatcacgcgtcgtgacaatccacaaacaagacggaaaaaacctggaaattgaactcagcagcctgagggaagctctgagttttgtctctctgattgatggatactatagattaaccgccgacgcccaccactatttatgcaaggaagttgcaccccctgctgttctcgagaatattcagtctaactgccatggacctatttcaatggacttcgccatcagcaaacttaagaaagcgggaaaccagactggtctgtatgtgctgcggtgttcccccaaggattttaacaagtacttcctcacgttcgcggtagaaagggagaatgtgatcgaatataagcattgtctgataaccaaaaacgaaaacgaggaatataacctctcaggcacgaagaagaatttcagtagcctgaaggatctcctgaattgctaccaaatggagacagtcagatccgataacattatatttcagttcactaaatgctgtccacctaagcccaaagataagagcaaccttctggtctttcggaccaatggtgtgagcgatgtgcccacatcacccacactccagcgccctacacatatgaatcagatggttttccacaaaatccgcaacgaggaccttattttcaatgagtcactgggccaggggaccttcaccaaaatctttaaaggtgttcgcagagaagtcggcgactatggacagctccacgaaaccgaggtgttgttaaaggtgttggataaggcgcacaggaactattccgaatccttttttgaggccgcatcaatgatgagcaagctcagtcacaagcacctggttcttaactacggagtatgcgtgtgcggtgatgagaacatcttagtgcaagagtttgtgaaatttgggtccctcgacacatatcttaaaaagaataaaaattgtattaatatcctgtggaagctggaagtggccaaacaactggcctgggcgatgcacttcctggaagagaatacgctgatacacggcaatgtctgcgccaaaaatattctgctcatccgggaagaggatcgaaaaacgggcaatcctccttttatcaaactctccgaccccggtatttctatcacagttttgccaaaggatattctacaagaacggatcccttgggtgccaccagagtgtatcgagaacccgaagaatctaaacctggcgaccgacaagtggagcttcggaacaactctgtgggaaatctgttccggcggagacaagccgttgagcgcgttagattcacaacggaaactccaattttacgaggacagacaccagcttcccgctcctaagtgggccgagctggcaaatctaatcaataactgcatggattatgagcctgatttcaggccaagcttcagagcaatcatccgggaccttaactccttattcaccccagactacgaactgctgacagaaaacgatatgctccctaacatgcgaatcggagcactcggctttagcggggcttttgaggaccgcgatcctactcagtttgaggagcgccatttaaagtttttacagcagttgggaaaaggtaattttggaagcgtggagatgtgtcgctatgacccgcttcaggacaataccggggaggttgtggctgtcaagaaattacagcactctaccgaagaacacctaagagacttcgaacgggaaatcgagatcttgaaaagcctgcagcacgacaacatcgttaaatataagggagtctgctactctgccggtaggcgaaatcttaagcttatcatggagtacctgccttacggcagcctaagggattacctccaaaagcataaggagcggattgaccatattaagcttcttcagtacacctctcagatttgtaagggaatggagtatttaggcaccaaacgttatattcatagagatctggctacaaggaatatcctggtcgagaatgaaaaccgagttaaaattggggattttggcttgacgaaggttctacctcaggacaaagagtattacaaggtcaaggagccaggagagtccccgatcttctggtatgcacctgagagcctcaccgaaagcaaattttctgtggccagtgacgtatggtctttcggagtggtcctgtacgagctgttcacctacatcgagaaatctaagtcgcctccggctgaatttatgcgcatgattgggaacgataagcaggggcagatgatagtgtttcacctcatcgagctcctcaagaataatggcaggctgcccaggccggacgggtgtcctgatgaaatatacatgattatgacagaatgttggaataacaacgtgaaccagagacctagttttcgcgatctcgccctccgggtcgatcaaatacgggacaatatggccggatag

SEQ ID NO: 151519 - protein, 1246 aa, Artificial Sequence [sequence omitted]

SEQ ID NO: 151520 - protein, 960 aa, Artificial Sequence
  derived and/or modified sequence
MAAPRVCQVQFLVAYLEEPGIEGLLGNDQSKGLGPASEQSENEKDDASQVSSTSNDVSSSDFEEGPSRKRPRLQAQRKFAQSQPNSPSTTPVKIVEPLLPPPATQISDLSKRKPKTEDFLTFLCLRGSPALPNSMVYFGSSQDEEEVEEEDDETEDVKTATNNASSSCQSTPRKGKTHKHVHNGHVFNGSSRSTREKEPVQKHKSKEATPAKEKHSDHRADSRREQASANHPAAAPSTGSSAKGLAATHHHPPLHRSAQDLRKQVSKVNGVTRMSSLGAGVTSAKKMREVRPSPSKTVKYTATVTKGAVTYTKAKRELVKDTKPNHHKPSSAVNHTISGKTESSNAKTRKQVLSLGGASKSTGPAVNGLKVSGRLNPKSCTKEVGGRQLREGLQLREGLRNSKRRLEEAHQAEKPQSPPKKMKGAAGPAEGPGKKAPAERGLLNGHVKKEVPERSLERNRPKRATAGKSTPGRQAHGKADSASCENRSTSQPESVHKPQDSGKAEKGGGKAGWAAMDEIPVLRPSAKEFHDPLIYIESVRAQVEKFGMCRVIPPPDWRPECKLNDEMRFVTQIQHIHKLGRRWGPNVQRLACIKKHLKSQGITMDELPLIGGCELDLACFFRLINEMGGMQQVTDLKKWNKLADMLRIPRTAQDRLAKLQEAYCQYLLSYDSLSPEEHRRLEKEVLMEKEILEKRKGPLEGHTENDHHKFHPLPRFEPKNGLIHGVAPRNGFRSKLKEVGQAQLKTGRRRLFAQEKEVVKEEEEDKGVLNDFHKCIYKGRSVSLTTFYRTARNIMSMCFSKEPAPAEIEQEYWRLVEEKDCHVAVHCGKVDTNTHGSGFPVGKSEPFSRHGWNLTVLPNNTGSILRHLGAVPGVTIPWLNIGMVFSTSCWSRDQNHLPYIDYLHTGADCICLSVEPVFPHLSVAVGSRVDLGISFLPCGDTRVMYPVESVAWRGVLGPRL

SEQ ID NO: 151521 - DNA, 5756 bp, Artificial Sequence
  derived and/or modified sequence
gttttactaaagtgaatttttttttgtttgcttcgttcgtctttggctctttttttttccttcccaatttcggatttatttcaaggcgaatctggctttgggggaagaggaagaaaagtcggattacaagatcaaccaccaccaacaacaataaaaaccaccaggatatttttttgcaaatttctgacggctttaaattcatgaagcaattgtccccttttgcaatcagcatttggatctcagaatgagcaaggaaagacccaagaggaatatcattcagaagaaatacgatgacagtgatgggattccgtggtcagaagaacgggtggtacgtaaagtcctttatttgtctctgaaggagttcaagaattcccagaagaggcagcatgcggaaggcattgctgggagcctgaaaactgtgaatgggctccttggtaatgaccagtctaagggattaggaccagcatcagaacagtcagagaatgaaaaggacgatgcatcccaagtgtcctccactagcaacgatgttagttcttcagattttgaagaagggccgtcgaggaaaaggcccaggctgcaagcacaaaggaagtttgctcagtctcagccgaatagtcccagcacaactccagtaaagatagtggagccattgctaccccctccagctactcagatatcagacctctctaaaaggaagcctaagacagaagattttcttacctttctctgccttcgaggttctcctgcgctgcccaacagcatggtgtattttggaagctctcaggatgaggaggaagtcgaggaggaagatgatgagacagaagacgtcaaaacagccaccaacaatgcttcatcttcatgccagtcgacccccaggaaaggaaaaacccacaaacatgttcacaacgggcatgttttcaatggttccagcaggtcaacacgggagaaggaacctgttcaaaaacacaaaagcaaagaggccactcccgcaaaggagaagcacagcgatcaccgggctgacagccgccgggagcaggcttcagctaaccaccccgcagcggccccctccacgggttcctcggccaaggggcttgctgccacccatcaccacccccctctgcatcggtcggctcaggacttacggaaacaggtttctaaggtaaacggagtcactcgaatgtcatctctgggtgcaggtgtaaccagtgccaaaaagatgcgcgaggtcagaccttcaccatccaaaactgtgaagtacactgccacggtgacgaagggggctgtcacatacaccaaagccaagagagaactggtcaaggacaccaaacccaatcaccacaagcccagttccgctgtcaaccacacaatctcagggaaaactgaaagtagcaatgcaaaaacccgcaaacaggtgctatccctcgggggggcgtccaagtccactgggcccgccgtcaatggcctcaaggtcagtggcaggttgaacccaaagtcatgcactaaggaggtgggggggcggcagctgcgggagggcctgcagctgcgggaggggctgcggaactccaagaggagactggaagaggcacaccaggcggagaagccgcagtcgccccccaagaagatgaaaggggcggctggccccgccgaaggccctggcaagaaggccccggccgagagaggtctgctgaacggacacgtgaagaaggaagtgccggagcgcagtctggagaggaatcggccgaagcgggccacggccgggaagagcacgccaggcagacaagcacatggcaaggcggacagcgcctcctgtgaaaatcgttctacctcgcaaccggagtccgtgcacaagccgcaggactcgggcaaggccgagaagggcggcggcaaggccgggtgggcggccatggacgagatccccgtcctcaggccctccgccaaggagttccacgatccgctcatctacatcgagtcggtccgcgctcaggtggagaagttcgggatgtgcagggtgatcccccctccggactggcggcccgagtgcaagctcaacgatgagatgcggtttgtcacgcagattcagcacatccacaagctgggccggcgctggggccccaacgtgcagcggctggcctgcatcaagaagcacctcaaatctcagggcatcaccatggacgagctcccgctcatagggggctgtgagctcgacctggcctgctttttccggctgattaatgagatgggcggcatgcagcaagtgactgacctcaaaaaatggaacaaactagcagacatgctgcgcatccccagaactgcccaggaccggctggccaagctgcaggaggcctactgccagtacctactctcctacgactccctgtccccagaggagcaccggcggctggagaaggaggtgctgatggagaaggagatcctggagaagcgcaaggggccgctggaaggccacacagagaacgaccaccacaagttccaccctctgccccgcttcgagcccaagaatgggctcatccacggcgtggcccccaggaacggcttccgcagcaagctcaaggaggtgggccaggcccagttgaagactggccggcggcgactcttcgctcaggaaaaagaagtggtcaaggaagaggaggaggacaaaggcgtcctcaatgacttccacaagtgcatctataagggaaggtctgtttctctaacaactttttatcgaacagcgaggaatatcatgagcatgtgtttcagcaaggagcctgccccagccgaaatcgagcaagagtactggaggctagtggaagagaaggactgccacgtggcagtgcactgcggcaaggtggacaccaacactcacggcagtggattcccagtaggaaaatcagaacccttttcgaggcatggatggaacctcaccgtcctccccaataacacagggtccatcctgcgtcacctcggtgctgtgcctggagtgactattccctggctaaatattggcatggtcttttctacctcatgctggtctcgagaccaaaatcaccttccatacattgactacttacacactggtgctgactgcatttggtattgcattcctgctgaggaggagaacaagctggaagatgtggtccacaccctgctgcaagccaatggcaccccagggctgcagatgctggaaagcaacgtcatgatctccccggaggtgctgtgcaaagaggggatcaaggtgcacaggaccgtgcagcagagtggccagtttgtcgtctgcttcccgggatcctttgtgtccaaagtgtgctgtgggtacagcgtgtctgaaaccgtgcactttgctaccacccagtggacaagtatgggctttgagaccgccaaggaaatgaagcgtcgccatatagctaagccattctccatggagaagttactctaccagattgcacaagcagaagcaaaaaaagaaaacggtcccactctcagtaccatctcagccctcctggatgagctcagggatacagagctgcggcagcgcaggcagctgttcgaggctggcctccactcctccgcacgctatggcagccacgatggcagcagcacggtggcggacgggaagaaaaagcctcgaaagtggctgcagttggagacgtcagagaggaggtgtcagatctgccagcacctgtgctacctgtccatggtggtacaagagaacgaaaacgtcgtgttctgtctggagtgtgctctgcgccacgtggagaaacagaagtcctgccgagggctgaagttgatgtaccgctacgatgaggaacagattatcagtctggtcaatcagatctgcggcaaagtgtctggtaaaaacggcagcattgagaactgtctcagtaaacccacaccaaaaagaggtccccgcaagagagcgacagtggacgtgcccccctcccgtctgtcagcctccagttcatccaaaagtgcttcgagctcatcatgaagatgccaacgcccgtggtcgatttatatatatttttttgtaattattatattctagtttggagtacttgctgtaggattcaagctgtctttgcactagctctaaagaagattttcttctggttttagagaactaattttgttttagcattaaactgttgaacttttttttgtacttagaaaacctagatactgcagtcagattttggaaactgccgtatagtcactgttttaaaaaccccggaggggctgtattaatttgtattgccccatggctgacaaaagcctttttttttggttttgatttttttttttttgtaactgttggggggaaaaaggctttttaacccatttttgaagagggtgaagtttggagaacaaatttaaaaaccatcagtcatgtgagcagattttttagaagggataggagacacacgcgcacacacacacacacacgaaacttgaaatggctttgctttggctgtcgtcttctgccgtgtgccagatgagcttgtgatctgggaagccggggcacccccgttttgtttctctgggcggttgtggcagctgaaggcggacgttgtttcctaaccataggtggaacgaggagacgggagcgagtgggctctccaccagcacatcactatgcatctgttccaggaaagaagaaaagcgagcgaggaagacggaaaagactgcctgccttggaggggtcacatgagggagacctgtgcctgatttcattaggaaatccattctgttattttttggtgctgttggctactttatcaaaaaacccttcaatagcatccttaagatttaaaaaaaaaaaaaaaaaaaaggaaaaaaaagtgatggaagccgtaagtgcttctttgtcatcgacgtgcaatctttctaacattccatctccatctcaccgcttcttgtttgacaccttcacaagtcagcattaatctttcttttaaaacttgtttcatttatgatcatgtagagagccactaggaggcctgcagttatttttgaatgtgaaaatgcatttgcgttcatcttgtctattttttctcttcatgttgtaacaaaaaggaaaaaagaaaaaaaaatcccatcccttttgtacatatgcctgtaaattgttttaaatacttgagcctttttctcggtggggggtggggaggggggtgagaagacaagatgaagaaaagccttacatttcagtttcttcatcggttggattggatgcttacagggtttttcttgtaacatttataagtgctgcttacatcactgaacaacaacaaaaaaataataatggagtagctgttgcccttctccggttgtgtgtacagtatgtgtggaataaaaaagggaaactgttttcacaagctgttctttgtttcataattggattcatcaatcccgtagctacccatattgcactgagcttgccagtggtgactgccaggaacgtcctatgatccactttgttggttgttgttgcagaagactgaactgttttggaatatttaacaattacagaaacagtcaagtgttttccaatgtggttgtccggtttctatggccttgctgtgtactttccctctttttgacagtaaacttctgcctatggcttacagtttgacatttaatttattagcgctgctctgcacccctcccttgggagggagacttcatgtggtttattgcgagttttttgtttacttttcaggtttgtactacaaggtttaataataaaaacaaagttttttgga

SEQ ID NO: 151522 - DNA, 5755 bp, Artificial Sequence
  derived and/or modified sequence
gttttactaaagtgaatttttttttgtttgcttcgttcgtctttggctctttttttttccttcccaatttcggatttatttcaaggcgaatctggctttgggggaagaggaagaaaagtcggattacaagatcaaccaccaccaacaacaataaaaaccaccaggatatttttttgcaaatttctgacggctttaaattcatgaagcaattgtccccttttgcaatcagcatttggatctcagaatgagcaaggaaagacccaagaggaatatcattcagaagaaatacgatgacagtgatgggattccgtggtcagaagaacgggtggtacgtaaagtcctttatttgtctctgaaggagttcaagaattcccagaagaggcagcatgcggaaggcattgctgggagcctgaaaactgtgaatgggctccttggtaatgaccagtctaagggattaggaccagcatcagaacagtcagagaatgaaaaggacgatgcatcccaagtgtcctccactagcaacgatgttagttcttcagattttgaagaagggccgtcgaggaaaaggcccaggctgcaagcacaaaggaagtttgctcagtctcagccgaatagtcccagcacaactccagtaaagatagtggagccattgctaccccctccagctactcagatatcagacctctctaaaaggaagcctaagacagaagattttcttacctttctctgccttcgaggttctcctgcgctgcccaacagcatggtgtattttggaagctctcaggatgaggaggaagtcgaggaggaagatgatgagacagaagacgtcaaaacagccaccaacaatgcttcatcttcatgccagtcgacccccaggaaaggaaaaacccacaaacatgttcacaacgggcatgttttcaatggttccagcaggtcaacacgggagaaggaacctgttcaaaaacacaaaagcaaagaggccactcccgcaaaggagaagcacagcgatcaccgggctgacagccgccgggagcaggcttcagctaaccaccccgcagcggccccctccacgggttcctcggccaaggggcttgctgccacccatcaccacccccctctgcatcggtcggctcaggacttacggaaacaggtttctaaggtaaacggagtcactcgaatgtcatctctgggtgcaggtgtaaccagtgccaaaaagatgcgcgaggtcagaccttcaccatccaaaactgtgaagtacactgccacggtgacgaagggggctgtcacatacaccaaagccaagagagaactggtcaaggacaccaaacccaatcaccacaagcccagttccgctgtcaaccacacaatctcagggaaaactgaaagtagcaatgcaaaaacccgcaaacaggtgctatccctcgggggggcgtccaagtccactgggcccgccgtcaatggcctcaaggtcagtggcaggttgaacccaaagtcatgcactaaggaggtgggggggcggcagctgcgggagggcctgcagctgcgggaggggctgcggaactccaagaggagactggaagaggcacaccaggcggagaagccgcagtcgccccccaagaagatgaaaggggcggctggccccgccgaaggccctggcaagaaggccccggccgagagaggtctgctgaacggacacgtgaagaaggaagtgccggagcgcagtctggagaggaatcggccgaagcgggccacggccgggaagagcacgccaggcagacaagcacatggcaaggcggacagcgcctcctgtgaaaatcgttctacctcgcaaccggagtccgtgcacaagccgcaggactcgggcaaggccgagaagggcggcggcaaggccgggtgggcggccatggacgagatccccgtcctcaggccctccgccaaggagttccacgatccgctcatctacatcgagtcggtccgcgctcaggtggagaagttcgggatgtgcagggtgatcccccctccggactggcggcccgagtgcaagctcaacgatgagatgcggtttgtcacgcagattcagcacatccacaagctgggccggcgctggggccccaacgtgcagcggctggcctgcatcaagaagcacctcaaatctcagggcatcaccatggacgagctcccgctcatagggggctgtgagctcgacctggcctgctttttccggctgattaatgagatgggcggcatgcagcaagtgactgacctcaaaaaatggaacaaactagcagacatgctgcgcatccccagaactgcccaggaccggctggccaagctgcaggaggcctactgccagtacctactctcctacgactccctgtccccagaggagcaccggcggctggagaaggaggtgctgatggagaaggagatcctggagaagcgcaaggggccgctggaaggccacacagagaacgaccaccacaagttccaccctctgccccgcttcgagcccaagaatgggctcatccacggcgtggcccccaggaacggcttccgcagcaagctcaaggaggtgggccaggcccagttgaagactggccggcggcgactcttcgctcaggaaaaagaagtggtcaaggaagaggaggaggacaaaggcgtcctcaatgacttccacaagtgcatctataagggaaggtctgtttctctaacaactttttatcgaacagcgaggaatatcatgagcatgtgtttcagcaaggagcctgccccagccgaaatcgagcaagagtactggaggctagtggaagagaaggactgccacgtggcagtgcactgcggcaaggtggacaccaacactcacggcagtggattcccagtaggaaaatcagaacccttttcgaggcatggatggaacctcaccgtcctccccaataacacagggtccatcctgcgtcacctcggtgctgtgcctggagtgactattccctggctaaatattggcatggtcttttctacctcatgctggtctcgagaccaaaatcaccttccatacattgactacttacacactggtgctgactgcatttggtattgcattcctgctgaggaggagaacaagctggaagatgtggtccacaccctgctgcaagccaatggcaccccagggctgcagatgctggaaagcaacgtcatgatctccccggaggtgctgtgcaaagaggggatcaaggtgcacaggaccgtgcagcagagtggccagtttgtcgtctgcttcccgggatcctttgtgtccaaagtgtgctgtgggtacagcgtgtctgaaaccgtgcactttgctaccacccagtggacaagtatgggctttgagaccgccaaggaaatgaagcgtcgccatatagctaagccattctccatggagaagttactctaccagattgcacaagcagaagcaaaaaaagaaaacggtcccactctcagtaccatctcagccctcctggatgagctcagggatacagagctgcggcagcgcaggcagctgttcgaggctggcctccactcctccgcacgctatggcagccacgatggcagcagcacggtggcggacgggaagaaaaagcctcgaaagtggctgcagttggagacgtcagagaggaggtgtcagatctgccagcacctgtgctacctgtccatggtggtacaagagaacgaaaacgtcgtgttctgtctggagtgtgctctgcgccacgtggagaaacagaagtcctgccgagggctgaagttgatgtaccgctacgatgaggaacagattatcagtctggtcaatcagatctgcggcaaagtgtctggtaaaaacggcagcattgagaactgtctcagtaaacccacaccaaaaagaggtccccgcaagagagcgacagtggacgtgcccccctcccgtctgtcagcctccagttcatccaaaagtgcttcgagctcatcatgaagatgccaacgcccgtggtcgatttatatatatttttttgtaattattatattctagtttggagtacttgctgtaggattcaagctgtctttgcactagctctaaagaagattttcttctggttttagagaactaattttgttttagcattaaactgttgaacttttttttgtacttagaaaacctagatactgcagtcagattttggaaactgccgtatagtcactgttttaaaaaccccggaggggctgtattaatttgtattgccccatggctgacaaaagcctttttttttggttttgatttttttttttttgtaactgttggggggaaaaaggctttttaacccatttttgaagagggtgaagtttggagaacaaatttaaaaaccatcagtcatgtgagcagattttttagaagggataggagacacacgcgcacacacacacacacacgaaacttgaaatggctttgctttggctgtcgtcttctgccgtgtgccagatgagcttgtgatctgggaagccggggcacccccgttttgtttctctgggcggttgtggcagctgaaggcggacgttgtttcctaaccataggtggaacgaggagacgggagcgagtgggctctccaccagcacatcactatgcatctgttccaggaaagaagaaaagcgagcgaggaagacggaaaagactgcctgccttggaggggtcacatgagggagacctgtgcctgatttcattaggaaatccattctgttattttttggtgctgttggctactttatcaaaaaacccttcaatagcatccttaagatttaaaaaaaaaaaaaaaaaaaaggaaaaaaaagtgatggaagccgtaagtgcttctttgtcatcgacgtgcaatctttctaacattccatctccatctcaccgcttcttgtttgacaccttcacaagtcagcattaatctttcttttaaaacttgtttcatttatgatcatgtagagagccactaggaggcctgcagttatttttgaatgtgaaaatgcatttgcgttcatcttgtctattttttctcttcatgttgtaacaaaaaggaaaaaagaaaaaaaaatcccatcccttttgtacatatgcctgtaaattgttttaaatacttgagcctttttctcggtggggggtggggaggggggtgagaagacaagatgaagaaaagccttacatttcagtttcttcatcggttggattggatgcttacagggtttttcttgtaacatttataagtgctgcttacatcactgaacaacaacaaaaaaataataatggagtagctgttgcccttctccggttgtgtgtacagtatgtgtggaataaaaaagggaaactgttttcacaagctgttctttgtttcataattggattcatcaatcccgtagctacccatattgcactgagcttgccagtggtgactgccaggaacgtcctatgatccactttgttggttgttgttgcagaagactgaactgttttggaatatttaacaattacagaaacagtcaagtgttttccaatgtggttgtccggtttctatggccttgctgtgtactttccctctttttgacagtaaacttctgcctatggcttacagtttgacatttaatttattagcgctgctctgcacccctcccttgggagggagacttcatgtggtttattgcgagttttttgtttacttttcaggtttgtactacaaggtttaataataaaaacaaagttttttgg

SEQ ID NO: 151523 - DNA, 3864 bp, Artificial Sequence
  derived and/or modified sequence
gaagatgcgctcggcctctgccttccgctccggagcgtcgcgcttcccaccaggatgacagtgatgggattccgtggtcagaagaacgggtggtacgtaaagtcctttatttgtctctgaaggagttcaagaattcccagaagaggcagcatgcggaaggcattgctgggagcctgaaaactgtgaatgggctccttggtaatgaccagtctaagggattaggaccagcatcagaacagtcagagaatgaaaaggacgatgcatcccaagtgtcctccactagcaacgatgttagttcttcagattttgaagaagggccgtcgaggaaaaggcccaggctgcaagcacaaaggaagtttgctcagtctcagccgaatagtcccagcacaactccagtaaagatagtggagccattgctaccccctccagctactcagatatcagacctctctaaaaggaagcctaagacagaagattttcttacctttctctgccttcgaggttctcctgcgctgcccaacagcatggtgtattttggaagctctcaggatgaggaggaagtcgaggaggaagatgatgagacagaagacgtcaaaacagccaccaacaatgcttcatcttcatgccagtcgacccccaggaaaggaaaaacccacaaacatgttcacaacgggcatgttttcaatggttccagcaggtcaacacgggagaaggaacctgttcaaaaacacaaaagcaaagaggccactcccgcaaaggagaagcacagcgatcaccgggctgacagccgccgggagcaggcttcagctaaccaccccgcagcggccccctccacgggttcctcggccaaggggcttgctgccacccatcaccacccccctctgcatcggtcggctcaggacttacggaaacaggtttctaaggtaaacggagtcactcgaatgtcatctctgggtgcaggtgtaaccagtgccaaaaagatgcgcgaggtcagaccttcaccatccaaaactgtgaagtacactgccacggtgacgaagggggctgtcacatacaccaaagccaagagagaactggtcaaggacaccaaacccaatcaccacaagcccagttccgctgtcaaccacacaatctcagggaaaactgaaagtagcaatgcaaaaacccgcaaacaggtgctatccctcgggggggcgtccaagtccactgggcccgccgtcaatggcctcaaggtcagtggcaggttgaacccaaagtcatgcactaaggaggtgggggggcggcagctgcgggagggcctgcagctgcgggaggggctgcggaactccaagaggagactggaagaggcacaccaggcggagaagccgcagtcgccccccaagaagatgaaaggggcggctggccccgccgaaggccctggcaagaaggccccggccgagagaggtctgctgaacggacacgtgaagaaggaagtgccggagcgcagtctggagaggaatcggccgaagcgggccacggccgggaagagcacgccaggcagacaagcacatggcaaggcggacagcgcctcctgtgaaaatcgttctacctcgcaaccggagtccgtgcacaagccgcaggactcgggcaaggccgagaagggcggcggcaaggccgggtgggcggccatggacgagatccccgtcctcaggccctccgccaaggagttccacgatccgctcatctacatcgagtcggtccgcgctcaggtggagaagttcgggatgtgcagggtgatcccccctccggactggcggcccgagtgcaagctcaacgatgagatgcggtttgtcacgcagattcagcacatccacaagctgggccggcgctggggccccaacgtgcagcggctggcctgcatcaagaagcacctcaaatctcagggcatcaccatggacgagctcccgctcatagggggctgtgagctcgacctggcctgctttttccggctgattaatgagatgggcggcatgcagcaagtgactgacctcaaaaaatggaacaaactagcagacatgctgcgcatccccagaactgcccaggaccggctggccaagctgcaggaggcctactgccagtacctactctcctacgactccctgtccccagaggagcaccggcggctggagaaggaggtgctgatggagaaggagatcctggagaagcgcaaggggccgctggaaggccacacagagaacgaccaccacaagttccaccctctgccccgcttcgagcccaagaatgggctcatccacggcgtggcccccaggaacggcttccgcagcaagctcaaggaggtgggccaggcccagttgaagactggccggcggcgactcttcgctcaggaaaaagaagtggtcaaggaagaggaggaggacaaaggcgtcctcaatgacttccacaagtgcatctataagggaaggtctgtttctctaacaactttttatcgaacagcgaggaatatcatgagcatgtgtttcagcaaggagcctgccccagccgaaatcgagcaagagtactggaggctagtggaagagaaggactgccacgtggcagtgcactgcggcaaggtggacaccaacactcacggcagtggattcccagtaggaaaatcagaacccttttcgaggcatggatggaacctcaccgtcctccccaataacacagggtccatcctgcgtcacctcggtgctgtgcctggagtgactattccctggctaaatattggcatggtcttttctacctcatgctggtctcgagaccaaaatcaccttccatacattgactacttacacactggtgctgactgcatttggtattgcattcctgctgaggaggagaacaagctggaagatgtggtccacaccctgctgcaagccaatggcaccccagggctgcagatgctggaaagcaacgtcatgatctccccggaggtgctgtgcaaagaggggatcaaggtgcacaggaccgtgcagcagagtggccagtttgtcgtctgcttcccgggatcctttgtgtccaaagtgtgctgtgggtacagcgtgtctgaaaccgtgcactttgctaccacccagtggacaagtatgggctttgagaccgccaaggaaatgaagcgtcgccatatagctaagccattctccatggagaagttactctaccagattgcacaagcagaagcaaaaaaagaaaacggtcccactctcagtaccatctcagccctcctggatgagctcagggatacagagctgcggcagcgcaggcagctgttcgaggctggcctccactcctccgcacgctatggcagccacgatggcagcagcacggtggcggacgggaagaaaaagcctcgaaagtggctgcagttggagacgtcagagaggaggtgtcagatctgccagcacctgtgctacctgtccatggtggtacaagagaacgaaaacgtcgtgttctgtctggagtgtgctctgcgccacgtggagaaacagaagtcctgccgagggctgaagttgatgtaccgctacgatgaggaacagattatcagtctggtcaatcagatctgcggcaaagtgtctggtaaaaacggcagcattgagaactgtctcagtaaacccacaccaaaaagaggtccccgcaagagagcgacagtggacgtgcccccctcccgtctgtcagcctccagttcatccaaaagtgcttcgagctcatcatgaagatgccaacgcccgtggtcgatttatatatatttttttgtaattattatattctagtttggagtacttgctgtaggattcaagctgtctttgcactagctctaaagaagatttt

SEQ ID NO: 151524 - DNA, 3216 bp, Artificial Sequence
  derived and/or modified sequence
aagtgctccggagcctgcctcactgcgctcttcctccctccctccctctgtccttcttcctctctgtctctctgcaatgatccggctctgaggatggctgctccacgggtctgtcaggtgcagtttttggtggcttatcttgaggaacctgggatagaagggctccttggtaatgaccagtctaagggattaggaccagcatcagaacagtcagagaatgaaaaggacgatgcatcccaagtgtcctccactagcaacgatgttagttcttcagattttgaagaagggccgtcgaggaaaaggcccaggctgcaagcacaaaggaagtttgctcagtctcagccgaatagtcccagcacaactccagtaaagatagtggagccattgctaccccctccagctactcagatatcagacctctctaaaaggaagcctaagacagaagattttcttacctttctctgccttcgaggttctcctgcgctgcccaacagcatggtgtattttggaagctctcaggatgaggaggaagtcgaggaggaagatgatgagacagaagacgtcaaaacagccaccaacaatgcttcatcttcatgccagtcgacccccaggaaaggaaaaacccacaaacatgttcacaacgggcatgttttcaatggttccagcaggtcaacacgggagaaggaacctgttcaaaaacacaaaagcaaagaggccactcccgcaaaggagaagcacagcgatcaccgggctgacagccgccgggagcaggcttcagctaaccaccccgcagcggccccctccacgggttcctcggccaaggggcttgctgccacccatcaccacccccctctgcatcggtcggctcaggacttacggaaacaggtttctaaggtaaacggagtcactcgaatgtcatctctgggtgcaggtgtaaccagtgccaaaaagatgcgcgaggtcagaccttcaccatccaaaactgtgaagtacactgccacggtgacgaagggggctgtcacatacaccaaagccaagagagaactggtcaaggacaccaaacccaatcaccacaagcccagttccgctgtcaaccacacaatctcagggaaaactgaaagtagcaatgcaaaaacccgcaaacaggtgctatccctcgggggggcgtccaagtccactgggcccgccgtcaatggcctcaaggtcagtggcaggttgaacccaaagtcatgcactaaggaggtgggggggcggcagctgcgggagggcctgcagctgcgggaggggctgcggaactccaagaggagactggaagaggcacaccaggcggagaagccgcagtcgccccccaagaagatgaaaggggcggctggccccgccgaaggccctggcaagaaggccccggccgagagaggtctgctgaacggacacgtgaagaaggaagtgccggagcgcagtctggagaggaatcggccgaagcgggccacggccgggaagagcacgccaggcagacaagcacatggcaaggcggacagcgcctcctgtgaaaatcgttctacctcgcaaccggagtccgtgcacaagccgcaggactcgggcaaggccgagaagggcggcggcaaggccgggtgggcggccatggacgagatccccgtcctcaggccctccgccaaggagttccacgatccgctcatctacatcgagtcggtccgcgctcaggtggagaagttcgggatgtgcagggtgatcccccctccggactggcggcccgagtgcaagctcaacgatgagatgcggtttgtcacgcagattcagcacatccacaagctgggccggcgctggggccccaacgtgcagcggctggcctgcatcaagaagcacctcaaatctcagggcatcaccatggacgagctcccgctcatagggggctgtgagctcgacctggcctgctttttccggctgattaatgagatgggcggcatgcagcaagtgactgacctcaaaaaatggaacaaactagcagacatgctgcgcatccccagaactgcccaggaccggctggccaagctgcaggaggcctactgccagtacctactctcctacgactccctgtccccagaggagcaccggcggctggagaaggaggtgctgatggagaaggagatcctggagaagcgcaaggggccgctggaaggccacacagagaacgaccaccacaagttccaccctctgccccgcttcgagcccaagaatgggctcatccacggcgtggcccccaggaacggcttccgcagcaagctcaaggaggtgggccaggcccagttgaagactggccggcggcgactcttcgctcaggaaaaagaagtggtcaaggaagaggaggaggacaaaggcgtcctcaatgacttccacaagtgcatctataagggaaggtctgtttctctaacaactttttatcgaacagcgaggaatatcatgagcatgtgtttcagcaaggagcctgccccagccgaaatcgagcaagagtactggaggctagtggaagagaaggactgccacgtggcagtgcactgcggcaaggtggacaccaacactcacggcagtggattcccagtaggaaaatcagaacccttttcgaggcatggatggaacctcaccgtcctccccaataacacagggtccatcctgcgtcacctcggtgctgtgcctggagtgactattccctggctaaatattggcatggtcttttctacctcatgctggtctcgagaccaaaatcaccttccatacattgactacttacacactggtgctgactgcatttgcctctctgtagagccagtgtttcctcatctatcggtggctgtggggagtagagttgacttgggaatctcgttcctgccatgtggagacacgcgcgttatgtaccctgtggagtctgttgcctggcgaggtgttctgggtccccgcctgtaatctgactctcactgtagccatccctgattgaggctgggtccccgcctgtaatcctgactctcactgcacccatccctgatcgaggctggactctttggtgtctttgtttacggcggcagatgggaaatgactacaaataatcagatgtcttgtcgtctgatcgtttaccggcatgctgttcatgccatgctgactgtgtttattgccctaatggggtgattaaacattctttattaaaat

SEQ ID NO: 151525 - DNA, 3741 bp, Artificial Sequence
  derived and/or modified sequence
atgtctaaggaaaggccaaagcgcaacatcatacagaaaaagtatgacgactccgatgggattccctggtccgaagagagggtcgtgaggaaggtcctgtatctgagcctcaaagagttcaaaaattcccagaaaaggcagcatgcagagggcatagcgggctccctgaaaaccgttaacgggttgctggggaatgatcaatcaaagggattgggtcctgcctccgagcaaagcgaaaacgagaaggacgacgcttcccaggtatccagcacctccaatgacgtgtcttcatcggactttgaggagggcccatcacgaaaaaggccgcgtctccaggcgcagcgaaagtttgcacagtcacagcccaactcacccagcacaacccccgtgaagattgtggaacccctgttgcctccccctgctactcagatctccgatctgtctaaacgaaaaccaaagactgaagattttttgaccttcttgtgcctgagaggatctcctgccctaccaaatagtatggtttattttggttcttcccaggacgaggaggaggtggaggaggaagacgacgagactgaggacgtcaagacagccaccaataacgcgtccagcagttgccagtccacgccgaggaaaggcaagacacataaacacgtgcataatggtcatgtcttcaacggtagcagccgatcaactagggagaaagagcccgtccagaaacataaatccaaggaggccacaccagccaaggaaaagcactcagatcaccgagccgattcccggcgcgaacaagcgagcgccaatcatccggccgcagcaccctctacaggaagcagcgctaaagggcttgcggcaacccatcatcacccaccgctgcaccgaagcgctcaagatctgagaaagcaggtgtctaaggttaacggcgtaacacggatgagttctctgggtgctggagtgactagcgccaagaagatgcgcgaggttcggcccagtccctccaaaaccgttaagtatactgctactgtaaccaagggtgccgtgacgtacaccaaggctaagagggagctggttaaggacaccaaacctaaccatcataagccgagcagtgctgttaatcacaccatctctggaaaaaccgagtcatctaacgccaagacccggaagcaggtgctgagtctgggtggagcatccaaatcaaccggtcccgctgtgaacggattgaaagtttccggcaggctgaatcccaagtcttgcactaaggaagtgggaggtcgacagcttcgcgaggggctccagctgcgagagggccttagaaactctaaacgtcggctggaggaggcccaccaagccgagaaaccacagagtccaccgaagaagatgaaaggcgcagctgggcctgctgagggccctgggaaaaaggctcccgctgaacgcggactgctaaatgggcacgttaagaaggaggtgcccgaacggtccttggaacgcaatcgtcctaaacgggccacagcaggcaagtctaccccgggtcggcaggcgcacgggaaggcagactccgcctcatgcgaaaatcgctccacctcacagccagagtccgtccataagccgcaggattccggaaaagcagagaaggggggaggaaaggccggatgggctgcaatggacgaaatcccggtcctgcggccgtctgcaaaagagttccacgatcccctgatttatatcgagtctgttcgagcccaggttgagaagttcggcatgtgccgagttattccacctccagattggcgtcccgaatgtaagcttaacgacgagatgcgctttgtaacccaaatccagcatattcacaaattgggtagacgatggggtcctaatgtccagaggctggcctgcataaagaagcacctaaaatcccaggggattaccatggacgaactgccactaattggcggctgcgagttggaccttgcctgctttttccgcctgataaatgaaatgggcgggatgcagcaggtgaccgacctgaagaaatggaacaaacttgccgatatgctccggattccacgtaccgcacaggatcgcctagcaaagttgcaggaggcctattgccagtacctgttgtcatacgattccttgtcacctgaggagcatcggcgacttgagaaagaggtacttatggagaaagagatactagagaagaggaaagggcctttggaaggccacaccgagaacgaccaccacaagtttcaccctctcccacgatttgagcctaagaacggacttatccacggcgttgcccctcgcaatgggtttcggagtaagcttaaagaggttggacaagcccaattaaagaccgggcgaagaagattgttcgcccaggaaaaggaggtggtgaaggaagaggaggaagacaagggggttcttaatgatttccacaaatgtatctacaaaggacgctcagtgtccctcacaaccttttatagaacagcaaggaatatcatgagtatgtgtttcagcaaggagcccgcaccggctgagatcgagcaggaatactggcgcctcgttgaggagaaggattgccacgtcgccgtgcattgcggcaaggtggacaccaacacccatggatctgggtttcccgtcggcaagagcgagccttttagcaggcacgggtggaatctaaccgtgcttcctaacaacactggctccatcctccgacatctcggcgccgtcccaggagtgactatcccctggttgaacatcggcatggtgttttcaactagctgctggagccgagatcagaaccacctcccttacattgactacttgcacaccggcgccgactgcatttggtactgcatcccagctgaagaggagaataagctggaggacgtcgtgcatactttattacaggccaatgggacgccaggactgcagatgctggagagtaacgtcatgatcagccccgaggttctgtgtaaggaagggatcaaagtccacaggaccgtgcagcaaagcggccagtttgtggtatgctttccaggttcgttcgttagcaaagtgtgctgcggatatagcgtaagcgaaaccgttcatttcgctacaacgcagtggacaagcatgggtttcgagacagcaaaagagatgaaacggcggcacatcgccaaaccattttctatggaaaaactgctgtaccagatcgctcaggctgaggcgaagaaagagaatgggcccacactctcaactatttctgctctgctcgacgaacttcgcgacacggagctgcggcaaagacggcagttgttcgaggccggactgcatagttcggcgaggtacgggtcacacgacggtagctccacagtagcagacggcaagaagaaaccacgcaagtggctccagctggagacttccgagcgaaggtgccaaatctgccagcacttgtgctacttgtccatggtggtccaagagaatgaaaacgtcgtgttttgcctagagtgcgcgctacgacatgtggagaagcaaaagtcatgtagagggctgaagctcatgtaccgctacgatgaggagcagatcatatctctggtcaaccagatttgtggtaaggtttccggcaaaaatggaagtatcgaaaactgcctgtccaaacctacaccaaaacggggtcctagaaagagagcgacagtagacgttccaccctctcggttaagcgcatccagctcatctaagtccgcgtctagctctagctag

SEQ ID NO: 151526 - DNA, 2883 bp, Artificial Sequence
  derived and/or modified sequence
atggcagctcctagggtgtgtcaggtgcagttcctggtagcctacctggaagaacccggcatagagggcctactgggtaatgaccagagtaagggtctcggcccagcatctgagcagtcagagaacgagaaggacgacgcttcccaggtctcgtcaacctcaaatgacgtcagcagctccgactttgaggagggtccctccaggaagcgcccaagactccaggctcaacggaaattcgcccagagccaacccaatagtccctctacaactccagtgaagatcgtcgagccactgctgccccctcccgcaactcagatttctgatctcagtaaacggaagccaaagaccgaggatttcttgacattcctgtgtctgaggggttcccctgcccttcctaatagcatggtatatttcggatcctcccaggatgaagaggaggtcgaagaggaagatgatgagactgaggacgtgaaaactgccaccaataacgcaagctcctcatgtcagtccacgccccgaaaggggaagacccacaaacatgtacacaacggccacgtatttaacggatcaagtaggtccacgagagagaaggagcccgtgcagaagcacaagagcaaagaggccacacctgcgaaagagaaacacagcgaccaccgggccgactcacgcagagaacaagctagtgccaatcatcctgccgctgccccttcaacagggagctctgccaaaggtcttgccgccacccatcaccacccaccactgcaccggtccgctcaggacctgagaaagcaggtcagtaaagtgaacggggtcactcgcatgtcctccctgggcgccggagtgaccagtgcgaaaaagatgcgggaggttcggcccagtccaagcaagactgttaagtacactgcaacagtgactaaaggcgctgtgacatacaccaaggccaagcgggagcttgtcaaagacaccaagcccaatcatcataagccatcaagcgcggttaatcacaccatcagtggtaagactgagagcagcaacgccaagaccaggaagcaagttttgagcctcggaggcgcctcaaaatcaaccggtccagcagtgaatggcctgaaagtctctgggcgacttaatccaaagagctgcactaaggaggtgggtgggcgacagctgcgggaaggattgcagttgagggagggcctgcgaaacagcaagcggagactcgaagaggcccatcaggccgagaaacctcagtcgccgcccaaaaaaatgaagggcgccgcggggccagccgagggaccgggaaagaaggccccggcagaacgtggactgctcaacggccacgtcaaaaaagaagtccctgaacgctctttggagagaaatagacccaagcgagccactgcagggaaaagcactcccggccggcaggctcacggaaaggctgactcagcctcatgtgagaatcgcagtacaagccaacccgagagcgtgcacaaaccacaagacagtgggaaagccgagaagggaggcggaaaggccggatgggctgctatggatgaaattcctgtgctccggcccagcgctaaagagttccacgacccattgatctacattgagagtgtccgggcccaggtcgagaagtttggcatgtgcagggtgattccaccacctgattggcgccctgagtgtaagcttaatgacgaaatgaggttcgtaactcaaatccagcatatccacaaactggggcgccgatggggaccaaacgtgcagcggttggcctgtatcaaaaagcatctgaagtctcagggcattaccatggatgagctgcccttgattggaggctgcgagctcgacctcgcatgcttctttcggcttattaatgagatgggaggtatgcagcaggtgacagatctgaagaaatggaataagctggcagacatgctgagaattccacgaacagcccaagatagactcgccaagttacaggaggcttattgtcagtatcttctcagctatgatagtctctcccctgaagagcaccgtcgcctggagaaagaagttctcatggaaaaagagattttggaaaagaggaaaggccccctcgagggccatactgaaaatgatcaccacaaatttcacccgttaccacggttcgagccaaagaacggtttgatccatggcgtggcccccagaaacggattccgatcaaaattaaaggaagtgggccaggctcagcttaaaacggggcgcagacgcctgttcgcccaggaaaaagaagtggtgaaagaggaggaagaggataaaggtgttctcaacgattttcacaagtgcatctataaaggccggtctgtgtcgttgaccactttttatagaaccgcccgtaacattatgtctatgtgctttagtaaagaacccgcaccagccgaaattgaacaggagtattggcgactggtggaagagaaagactgccacgtcgccgtgcattgcggaaaggtggacactaacactcacgggagcggcttcccagtgggcaaatcagaacctttcagccgacacggatggaacctgaccgtactgcctaacaatacaggctcaatcctcagacacttgggcgccgtgcccggggtaacaattccctggcttaacatcggtatggtgttcagtactagttgttggtcacgcgatcagaatcatctgccttacattgattacctgcacacaggtgccgactgtatctgcctgtcagtcgagccagtgttcccccacctctcagtggccgtcggctccagggtggacctcggtatcagctttcttccctgtggggacaccagagtgatgtacccagtggagtctgtcgcgtggaggggagtgctgggccccagactctag

SEQ ID NO: 151527 - DNA, 3741 bp, Artificial Sequence
  derived and/or modified sequence
atgagcaaggagcggcccaagaggaacatcatccagaagaagtatgatgacagtgatggcatcccctggagcgaggagcgggtggtgaggaaggtgctgtacctgagcctgaaggagttcaagaacagccagaagaggcagcacgccgagggcattgctggcagcctgaagacagtgaatggcctgctgggcaatgaccagagcaagggcctgggccctgccagcgagcagagtgaaaatgagaaggatgatgccagccaggtgagcagcaccagcaatgatgtgagcagcagtgactttgaggagggccccagcaggaagaggccccggctgcaggcccagaggaagtttgcccagagccagcccaacagccccagcaccacccctgtgaagatcgtggagcccctgctgcccccaccagccacccagatcagtgacctgagcaagaggaagcccaagacagaggacttcctgaccttcctgtgcctgcggggcagccctgccctgcccaacagcatggtgtacttcggcagcagccaggatgaggaggaggtggaggaggaggatgatgaaacagaagatgtgaagacagccaccaacaatgccagcagcagctgccagagcacccccaggaagggcaagacccacaagcacgtgcacaatggacatgtgttcaacggcagcagccgcagcacccgggagaaggagcctgtgcagaagcacaagagcaaggaggccaccccagccaaggagaagcacagcgaccacagagctgacagcagaagagagcaggccagcgccaaccaccctgctgctgcccccagcacaggcagcagcgccaagggcctggccgccacccaccaccacccccccctgcacaggtctgcccaggacctgaggaagcaggtgtccaaggtgaatggagtgaccaggatgagcagcctgggcgctggggtgaccagcgccaagaagatgagggaggtgcggcccagccccagcaagacagtgaagtacacagccaccgtgaccaagggagctgtgacctacaccaaggccaagcgggagctggtgaaggacaccaagcccaaccaccacaagcccagcagcgctgtgaaccacaccatcagcggcaagacagagagcagcaatgccaagaccaggaagcaggtgctgagcctgggcggggccagcaagagcacaggccctgctgtgaatggcctgaaggtgtctggccgcctgaaccccaagagctgcaccaaggaggtgggcggccggcagctgcgggagggcctgcagctgcgggagggcctgaggaacagcaagaggcggctggaggaggcccaccaggccgagaagccccagagcccccccaagaagatgaagggagctgctggccctgctgagggccctgggaagaaggccccagctgagcggggcctgctgaatggccacgtgaagaaggaggtgcctgagaggagcctggagaggaaccggcccaagagggccacagctgggaagagcaccccaggccggcaggcccacggcaaggctgacagcgccagctgtgaaaatagaagcaccagccagcctgagagcgtgcacaagccccaggacagcggcaaggccgagaagggcggcggcaaggccggctgggccgccatggatgagatccctgtgctgcggcccagcgccaaggagttccatgaccccctcatctacatcgagagcgtgcgggcccaggtggagaagtttggcatgtgcagggtcatccccccaccagactggaggcctgagtgcaagctgaatgatgagatgagatttgtgacccagatccagcacatccacaagctgggccgccgctggggccccaacgtgcagaggctggcctgcatcaagaagcacctgaagagccagggcatcaccatggatgagctgcccctcatcggcggctgtgagctggacctggcctgcttcttccgcctcatcaatgagatgggcggcatgcagcaggtgacagacctgaagaagtggaacaagctggccgacatgctgcgcatccccaggacagcccaggaccggctggccaagctgcaggaggcctactgccagtacctgctgtcctatgacagcctgagccctgaggagcaccggcggctggagaaggaggtgctgatggagaaggagatcctggagaagaggaagggccccctggagggccacacagaaaatgaccaccacaagttccaccccctgcccaggtttgagcccaagaatggcctcatccacggcgtggcccccagaaatggcttccgcagcaagctgaaggaggtgggccaggcccagctgaagacaggaagaagaagactctttgcccaggagaaggaggtggtgaaggaggaggaggaggacaagggcgtgctgaatgacttccacaagtgcatctacaagggccgctctgtgtccctgaccaccttctacagaacagccaggaacatcatgtccatgtgcttcagcaaggagcccgccccagctgagattgagcaggagtactggaggctggtggaggagaaggactgccacgtggccgtgcactgcggcaaggtggacaccaacacccacggcagcggcttccctgtgggcaagtctgagcccttcagccgccacggctggaacctgactgtgctgcccaacaacacaggcagcatcctgcggcacctgggcgctgtgcctggggtgaccatcccctggctgaacatcggcatggtgttcagcaccagctgctggagccgggaccagaaccacctgccctacatcgactacctgcacactggagctgactgcatctggtactgcatcccagctgaggaggagaacaagctggaggatgtggtgcacaccctgctgcaggccaacggcaccccaggcctgcagatgctggagagcaatgtgatgatcagccctgaggtgctgtgcaaggagggcatcaaggtgcacaggacagtgcagcagagcggccagtttgtggtgtgcttccctggcagctttgtgtccaaggtgtgctgcggctacagcgtgtctgagaccgtgcactttgccaccacccagtggacctccatgggctttgaaacagccaaggagatgaagagaagacacatcgccaagcccttctccatggagaagctgctgtaccagatcgcccaggccgaggccaagaaggaaaatggccccaccctgagcaccatcagcgccctgctggatgagctgcgggacacagagctgcggcagaggcggcagctgtttgaggccggcctgcacagcagcgcccgctatggcagccatgatggcagcagcacagtggctgatggcaagaagaagcccaggaagtggctgcagctggagaccagcgagcggcgctgccagatctgccagcacctgtgctacctgtccatggtggtgcaggagaatgaaaatgtggtgttctgcctggagtgtgccctgcggcacgtggagaagcagaagagctgccggggcctgaagctgatgtaccgctatgatgaggagcagatcatcagcctggtgaaccagatctgtgggaaggtgtctgggaagaatggcagcattgagaactgcctgagcaagcccacccccaagaggggccccaggaagagggccaccgtggatgtgccccccagccggctgagcgccagcagcagcagcaagagcgccagcagcagcagctag

SEQ ID NO: 151528 - DNA, 2883 bp, Artificial Sequence
  derived and/or modified sequence
atggccgccccccgggtgtgccaggtgcagttcctggtggcctacctggaggagcccggcatcgagggcctgctgggcaatgaccagagcaagggcctgggccctgccagcgagcagagtgaaaatgagaaggatgatgccagccaggtgagcagcaccagcaatgatgtgagcagcagtgactttgaggagggccccagcaggaagaggccccggctgcaggcccagaggaagtttgcccagagccagcccaacagccccagcaccacccctgtgaagatcgtggagcccctgctgcccccaccagccacccagatcagtgacctgagcaagaggaagcccaagacagaggacttcctgaccttcctgtgcctgcggggcagccctgccctgcccaacagcatggtgtacttcggcagcagccaggatgaggaggaggtggaggaggaggatgatgaaacagaagatgtgaagacagccaccaacaatgccagcagcagctgccagagcacccccaggaagggcaagacccacaagcacgtgcacaatggacatgtgttcaacggcagcagccgcagcacccgggagaaggagcctgtgcagaagcacaagagcaaggaggccaccccagccaaggagaagcacagcgaccacagagctgacagcagaagagagcaggccagcgccaaccaccctgctgctgcccccagcacaggcagcagcgccaagggcctggccgccacccaccaccacccccccctgcacaggtctgcccaggacctgaggaagcaggtgtccaaggtgaatggagtgaccaggatgagcagcctgggcgctggggtgaccagcgccaagaagatgagggaggtgcggcccagccccagcaagacagtgaagtacacagccaccgtgaccaagggagctgtgacctacaccaaggccaagcgggagctggtgaaggacaccaagcccaaccaccacaagcccagcagcgctgtgaaccacaccatcagcggcaagacagagagcagcaatgccaagaccaggaagcaggtgctgagcctgggcggggccagcaagagcacaggccctgctgtgaatggcctgaaggtgtctggccgcctgaaccccaagagctgcaccaaggaggtgggcggccggcagctgcgggagggcctgcagctgcgggagggcctgaggaacagcaagaggcggctggaggaggcccaccaggccgagaagccccagagcccccccaagaagatgaagggagctgctggccctgctgagggccctgggaagaaggccccagctgagcggggcctgctgaatggccacgtgaagaaggaggtgcctgagaggagcctggagaggaaccggcccaagagggccacagctgggaagagcaccccaggccggcaggcccacggcaaggctgacagcgccagctgtgaaaatagaagcaccagccagcctgagagcgtgcacaagccccaggacagcggcaaggccgagaagggcggcggcaaggccggctgggccgccatggatgagatccctgtgctgcggcccagcgccaaggagttccatgaccccctcatctacatcgagagcgtgcgggcccaggtggagaagtttggcatgtgcagggtcatccccccaccagactggaggcctgagtgcaagctgaatgatgagatgagatttgtgacccagatccagcacatccacaagctgggccgccgctggggccccaacgtgcagaggctggcctgcatcaagaagcacctgaagagccagggcatcaccatggatgagctgcccctcatcggcggctgtgagctggacctggcctgcttcttccgcctcatcaatgagatgggcggcatgcagcaggtgacagacctgaagaagtggaacaagctggccgacatgctgcgcatccccaggacagcccaggaccggctggccaagctgcaggaggcctactgccagtacctgctgtcctatgacagcctgagccctgaggagcaccggcggctggagaaggaggtgctgatggagaaggagatcctggagaagaggaagggccccctggagggccacacagaaaatgaccaccacaagttccaccccctgcccaggtttgagcccaagaatggcctcatccacggcgtggcccccagaaatggcttccgcagcaagctgaaggaggtgggccaggcccagctgaagacaggaagaagaagactctttgcccaggagaaggaggtggtgaaggaggaggaggaggacaagggcgtgctgaatgacttccacaagtgcatctacaagggccgctctgtgtccctgaccaccttctacagaacagccaggaacatcatgtccatgtgcttcagcaaggagcccgccccagctgagattgagcaggagtactggaggctggtggaggagaaggactgccacgtggccgtgcactgcggcaaggtggacaccaacacccacggcagcggcttccctgtgggcaagtctgagcccttcagccgccacggctggaacctgactgtgctgcccaacaacacaggcagcatcctgcggcacctgggcgctgtgcctggggtgaccatcccctggctgaacatcggcatggtgttcagcaccagctgctggagccgggaccagaaccacctgccctacatcgactacctgcacactggagctgactgcatctgcctgtctgtggagcccgtcttcccccacctgtctgtggccgtgggcagccgggtggacctgggcatctccttcctgccctgtggggacaccagggtgatgtaccctgtggagagcgtggcctggaggggcgtgctgggcccccggctgtag

SEQ ID NO: 151529 - DNA, 3741 bp, Artificial Sequence
  derived and/or modified sequence
atgagcaaggagcggcccaagcggaacatcatccagaagaagtacgacgattcagacggtattccatggtccgaggaacgcgtggtccgcaaagtgctgtatctgtctttaaaagaattcaagaactcacagaagcggcagcatgccgaggggattgccgggagcctgaagactgtcaatgggctcttaggtaatgatcagtctaaaggcctgggccctgccagcgagcaatcagaaaatgagaaagacgacgctagtcaagtctctagtacctccaatgacgtgtcatccagtgacttcgaggaaggaccgtcacggaagcggcctaggctgcaggcccagcggaagtttgcacaatcccagcccaatagtccttccaccactccagttaagatcgtcgagcccctattacctcccccggctactcagatttcagatctatcaaagagaaagcctaagacggaggattttttgactttcctatgcctgcgcgggagccccgctctgccaaacagcatggtatatttcggaagttctcaggatgaggaggaagtcgaggaagaagatgacgagacggaagatgttaagaccgcgactaacaacgccagctcttcttgccagtctaccccccgaaagggcaagacccataaacatgtgcataatggccacgttttcaatggttcgtcccgaagcacaagagagaaggagccggtgcagaaacacaaaagcaaagaggccacgcctgcaaaagagaagcattcagatcacagggctgacagccgccgggaacaggctagcgccaaccacccggccgccgcaccctccacaggctctagtgctaagggattagccgccacccaccaccaccccccactgcaccgatctgcccaggatctgcgcaaacaggtgagcaaggtaaacggagtaacccgcatgagctcactcggcgccggcgtcacttccgccaaaaagatgagagaagtccggccctcgccttctaaaactgtgaagtacacagccaccgttacaaagggcgccgtcacctatacgaaggctaagcgggaactcgtgaaggatactaaacctaatcaccacaaacctagttcggcggtgaaccacacaatttcaggtaaaacagaatcatctaacgctaaaacacgaaagcaggtgctctctctcggaggcgctagcaagagcacaggtccagccgtgaatggattaaaggtgagcggacggctaaatccgaagtcatgtacaaaagaggtaggaggtcgtcagctcagggaagggctccagctgcgagagggcctcaggaattccaaacgcagactggaagaggcccaccaggccgagaagccacagagccctcctaagaaaatgaaaggtgctgcaggccctgccgagggcccgggcaaaaaagcgccagcagagcgtggtctgttgaatggtcacgtgaagaaggaagtccctgaacggtccctggaacggaaccgccctaagcgcgccacagctggcaagagcacacctgggcgccaggcacatggtaaggccgacagcgcctcctgcgagaaccggtctacttcccagcccgaaagcgttcacaagcctcaagattcgggcaaagcggagaaaggcggagggaaagccggatgggccgccatggatgagattccagtgctccgccctagtgcgaaggagttccatgaccccctcatatatatcgaatcagtccgggcgcaggtcgaaaagtttggtatgtgcagagtgatccccccgcccgactggcgccctgaatgtaagctgaatgacgagatgcggttcgtgacgcagatacagcacattcataaactgggaagacgatgggggccaaatgtgcagaggctcgcctgcatcaagaagcacctgaagtcccagggtatcacaatggatgagctgccgttgattggaggctgcgaattggatttagcctgcttctttcgacttattaacgaaatgggtgggatgcagcaagtgacagacctcaagaaatggaataaacttgccgacatgctccgtattccacgaactgcccaggaccgactcgccaaattgcaggaagcttattgccagtacctattgtcatacgattctctgtcgcccgaagagcatagaagactggaaaaggaggtgctgatggagaaggagatcctggaaaagcgaaaaggcccactggaaggacacacagagaatgaccatcataagtttcacccgctgccaagattcgaacccaaaaatggactcatccatggggtggctccccgtaacggatttcggtcaaaactgaaggaagtggggcaggctcagctaaaaaccggccgtcgacgtcttttcgctcaggagaaagaggtggtgaaggaagaagaagaggataaaggtgtgctgaacgatttccataaatgtatctacaaggggagatcagtcagcttgaccacgttctaccgaactgccagaaacattatgtctatgtgcttcagcaaggagcctgcccctgccgaaatcgaacaggaatactggaggctggtggaagaaaaagactgccatgtggccgtgcattgtgggaaggtcgacactaacacacatggatctgggttccccgtcggaaaatcagagccattctcacgtcatgggtggaacctcaccgtgcttcctaacaataccgggagcatcctcagacatcttggcgcagtcccaggggtcacgataccttggttgaatattggcatggtgtttagcacatcttgttggagccgcgaccagaatcacctcccctatatcgattacttacacacaggcgcggattgtatttggtactgcatccctgcagaggaagaaaataaattggaggacgtagtgcacacattactccaggcaaatgggacacccggcctgcagatgctcgaatccaatgtgatgatttctcctgaagttctttgtaaagagggtatcaaagtccatcggaccgtccagcagtcaggtcagtttgtggtttgtttcccgggatcctttgtaagtaaagtgtgttgtgggtactctgtctctgaaacggttcacttcgccactactcagtggacctctatgggattcgagaccgccaaggaaatgaaacggcgccacatagcgaagcctttcagtatggaaaaactgctgtaccagatcgcccaggccgaggccaagaaagaaaacggacccacactatctacgatttccgccctcctcgatgagctacgagacaccgagctgagacagagacgccagctcttcgaggccggtctgcattcctctgcgcggtatgggtctcatgacgggtcgagtactgtggcagatggcaaaaagaaaccaagaaagtggctgcagttggaaacatcggaacggaggtgtcagatctgtcagcacctttgctatctttcaatggtagtgcaagagaacgagaacgtcgtattttgcctagagtgtgcgctgcggcacgtggaaaagcagaaatcctgtaggggactgaagctaatgtaccgctatgacgaagaacagattatcagcttggtgaatcagatttgcggaaaggtgtcgggaaagaacggttctattgagaattgcctgagtaagccaacgccaaaaaggggacccaggaagagagccacggttgatgtgcctcccagccgactgagtgcaagtagcagtagcaagagtgcgtcttcttcttcatag

SEQ ID NO: 151530 - DNA, 2883 bp, Artificial Sequence
  derived and/or modified sequence
atggccgccccccgggtgtgccaggtgcagttcctggtggcctaccttgaggaaccaggtattgagggcctgctgggaaatgaccagagcaagggcctggggcccgcatccgagcagagtgaaaacgagaaagacgacgccagtcaagtaagtagcacctctaatgacgtgtccagctctgacttcgaagaaggtccatcgagaaagcggccccggctccaggctcagcggaagtttgcccaaagtcaacctaattctccaagtaccactcccgtcaaaatagttgagccgttacttcctcctccagcaacacaaatctcagatctctctaagagaaagcccaagacggaggatttcctgacatttctatgtttgagaggatcacctgcattaccgaactcaatggtatatttcggaagcagtcaggatgaggaggaggttgaagaggaggacgacgaaaccgaagacgtcaaaacagctactaacaatgctagtagcagctgtcaaagtacgccccgcaaaggaaagacccataagcacgtccacaatggacacgttttcaatggatcaagtcggtccacccgcgagaaagaaccagttcaaaaacataaaagtaaagaggctacccccgcgaaagagaagcactccgaccatagggcagactctaggcgggaacaagcttccgccaatcaccctgccgctgccccttccacagggtccagcgctaagggactggctgctactcatcaccatcccccactacacagatcagcccaggacctgaggaagcaggtctccaaggtcaacggagtgacaagaatgagctctctcggtgccggggtaacgtcagctaagaaaatgagggaggtaaggccaagcccgtccaaaactgtcaagtacactgcgactgtaacaaaaggagctgttacctacaccaaggcaaaacgcgaacttgtgaaagatactaaacctaaccaccacaaaccttcttcggcagtgaaccataccatttcaggcaaaactgagtcctccaacgccaaaaccagaaaacaggtgctgtctctgggcggcgcttcaaagtctacaggacctgccgtaaatggtctaaaggtgagtggccgcctgaacccaaagagttgtactaaagaggtcgggggtcggcagctgcgcgaggggctgcagttgcgggaaggtctaagaaactccaagcgtaggcttgaggaagcacaccaggctgaaaagcctcaaagtccgccgaaaaagatgaagggtgcagctgggccagcagaggggccaggcaaaaaagccccggctgaacggggacttctgaatggacacgtgaagaaagaggtaccggagcgctctctggagcgcaatcgtcccaaacgcgctaccgctggcaagtctacaccaggccgtcaagcccacggcaaagccgacagcgctagttgcgagaacagatctacctcccagcccgaaagcgtgcataagccacaggacagtggaaaggcggaaaagggcgggggaaaagccggctgggcagctatggacgagattcccgtgctacgtccctcagccaaggaatttcatgaccccctgatctatatcgagagcgtcagagctcaggtggagaagtttggaatgtgccgagtcatccctccaccagattggcggcctgaatgtaagctgaatgatgaaatgcggtttgtcacccaaatccaacacatacacaaactgggcagaaggtggggtccaaatgtacagagactcgcctgcatcaaaaagcacctgaagtcgcaaggcattaccatggacgagctccctctcatcggcgggtgcgagctggacctcgcttgcttcttccgattgataaacgagatgggcggtatgcagcaagtaactgacctcaagaagtggaacaagctggccgacatgctacgcattccccgcacagcccaggacaggcttgctaaattacaggaggcttactgccagtacctactgagctacgatagtctttcccctgaggagcacagacggctggaaaaagaggttctgatggaaaaggaaatactggaaaagcggaaggggcctctggaagggcatacggagaacgaccaccacaagtttcatccgcttccacgattcgaaccaaagaatggattgatccacggagtggccccaagaaatgggttcagatcgaaactgaaagaggtgggccaggcccaactcaagaccggcagaagacgcttgttcgcccaggagaaagaggttgtcaaggaggaggaagaggataaaggggtcttaaacgacttccacaaatgtatatacaaaggaagatcagtgtccctgaccacattttataggacagccaggaatattatgagcatgtgcttcagtaaagagcccgctccggccgagatagaacaggagtattggcgcctggttgaggagaaagattgccatgtggcagtgcattgcggcaaagttgatactaacactcatggaagtggatttcctgtcggtaaaagcgagcctttcagcaggcacggttggaacctgaccgtgctgccaaataatacagggagtatcctgcggcatctgggcgcagtgccaggcgtgacaattccctggctgaatatcggaatggtatttagtacgtcgtgctggtctagagaccagaatcatctcccctatatcgactatctgcacaccggcgccgattgtatttgcctgagtgtggagccggtgtttccgcacctctccgtggccgtggggagcagagtggacctgggaatctcttttctcccttgcggagacactcgggtgatgtaccctgtggaatcggtcgcatggcgcggcgtgttagggcctcggctgtag

SEQ ID NO: 151531 - DNA, 3741 bp, Artificial Sequence
  derived and/or modified sequence
atgtcgaaagagcgccctaagagaaacatcatccaaaaaaaatacgatgattctgacgggatcccttggagcgaggagcgggtggttaggaaagtgctttacctgtccctgaaagaattcaagaattcacagaaaaggcaacacgcagaggggatcgccggatcgctcaagacagtgaacggcctgctgggtaatgaccagtctaagggcctgggcccagcatcagagcagtctgaaaacgaaaaggatgacgccagccaggtttcatccacatccaacgatgtgagtagcagcgattttgaagaggggcctagccgaaaaaggccaagactgcaagcccagcggaaatttgcccagagccagcccaattccccttccacaacacccgtaaaaattgtcgagcctctgctgcctccgcctgcaacccagatcagcgacctctctaagaggaagcccaaaaccgaggacttcctgacattcctgtgcctccgaggcagtcccgctctgcctaactcgatggtttattttgggagctcacaggacgaggaggaggtggaggaggaagatgatgagacagaagacgtaaaaacagccacaaacaatgcctccagttcctgccagagcacaccacgaaagggaaaaactcataagcacgtgcacaatggccacgtgttcaacggttcttctcggtcaacaagagagaaagagcccgtccagaagcataagtctaaggaggccaccccagctaaagaaaagcattccgatcatagggcagactctcggcgtgagcaggcctccgccaaccatccggctgccgctccgtccactggtagctctgcgaagggattggccgcaacacatcaccacccccctctgcacaggagcgctcaagatcttcgaaagcaggtttccaaggtaaacggcgtgacacgcatgtcttccctgggggcaggcgttacgtcggcaaagaaaatgagagaagtccggccatcaccgagcaaaactgtgaagtacacagcaaccgtgaccaagggagctgttacatacaccaaggccaagcgcgaattggtcaaggacacaaaaccgaatcaccacaagccaagcagcgccgtgaaccacaccatcagcgggaaaacagaaagtagtaatgcgaaaacccggaagcaagtactaagccttgggggagcaagtaagtcaacagggccagctgtgaacggtcttaaagtgtccggccgattaaatcccaagtcatgcaccaaggaggtgggtgggagacagctccgggagggcctacagctcagggagggcctcaggaattctaagcggcgtcttgaagaggcacatcaggctgaaaaacctcagtctcccccaaagaagatgaaaggcgctgcgggacccgctgagggaccaggcaaaaaggctccggcagagcggggactactgaacggacacgtgaagaaagaggtgcccgagcgaagtctggagcgcaatagaccaaagcgagccactgcgggaaaatctacccccggacggcaggcccatggtaaggcagactctgccagctgtgagaacaggtctacgagccagcctgagagtgtgcataagccacaggattcaggcaaagccgagaagggcggtgggaaagcaggttgggccgcaatggacgagattcctgtgttgcgcccttcggcaaaagagtttcatgaccccctgatatacatagaatcagtccgggctcaggttgaaaagtttggcatgtgtcgtgtgattcctcctccggactggcgccctgagtgtaagctcaatgacgagatgcggtttgtgacccagatccagcacatacacaagttgggcagaagatgggggcctaatgtgcagcgattagcttgtattaaaaagcatctgaagtcccagggaatcacaatggatgaactgcccctcattggcggttgcgagctggacctcgcctgctttttccggctgataaacgaaatgggcggaatgcagcaggtgaccgatctgaagaagtggaataagctggccgacatgctcagaatccctcggaccgctcaagatcgcctcgctaagttacaagaggcctactgccaatatctcctgagctacgacagtctgagtcccgaggaacatagaagactcgaaaaggaggttctcatggaaaaagaaatcctggaaaaaaggaaaggtccattagagggccacaccgagaacgaccatcataagttccacccactccctaggttcgagccgaagaacggtttgattcacggcgtcgcccctcgaaacggcttccgaagcaagttaaaagaagttggccaggctcaattgaagactgggaggcgcagactatttgcccaggaaaaggaggttgtgaaggaagaagaagaggacaagggcgtattgaatgatttccacaagtgtatctacaagggtcggtctgtcagcctcaccacattttataggactgcaagaaatattatgtcaatgtgttttagtaaggagccagccccagctgaaatagagcaagagtactggagattagtcgaagaaaaggattgccatgttgctgttcactgtgggaaggtggatacaaacactcatggctccggatttccggttgggaagagcgagccctttagccggcacggctggaatctcaccgtgcttcccaataatacaggttctatactgcgccacctgggggctgtacccggagtcaccataccatggctgaacataggtatggtcttctcaaccagctgctggagccgggatcagaaccacctgccttatatcgattatctccatacaggagcagactgtatttggtattgcatccctgccgaagaagagaacaagctcgaagatgtggtgcacaccctactgcaagccaacggaactccgggactgcaaatgctcgagtccaatgtcatgatcagtcccgaggtattgtgtaaggaggggattaaagttcataggacggtgcagcagtctggtcagtttgtggtgtgttttccagggtcttttgtgtccaaagtgtgttgcggatattccgtctctgaaaccgtgcattttgcaaccactcagtggacttccatgggctttgaaacggccaaagaaatgaaacggcgacacattgcaaagcctttttcaatggaaaagctgctgtaccaaatagcgcaggctgaggccaagaaagaaaacggaccaaccttaagcacaatatcagctctgttagacgaactgcgggacaccgagcttaggcagcgtaggcaattgtttgaagctggcctgcattcctccgccaggtatggaagtcacgatggctcatctacagtggcagacggcaaaaaaaagcctcgcaagtggcttcaacttgaaacctccgagcgtcggtgccagatctgccagcacctttgctatttgtcaatggttgtgcaggaaaatgaaaacgtcgtcttctgccttgagtgcgcactgaggcatgtagaaaagcagaaatcatgtcgaggcctcaaactgatgtaccggtacgacgaggagcagattatcagtttggtgaaccagatctgcggcaaggtgagtggaaagaatgggtccattgagaactgcttaagtaagcctacccccaagcgcggacccaggaagcgggcaactgtggatgttcctcctagcaggctgagcgcaagtagctcttccaagtcggcaagcagttcctcttag

SEQ ID NO: 151532 - DNA, 2883 bp, Artificial Sequence
  derived and/or modified sequence
atggctgcgcctcgtgtgtgccaggttcagttcctggtggcctatctcgaggaaccaggcattgagggcctccttggcaatgatcagtcaaaagggcttggtccagcgagcgagcagagtgaaaatgaaaaggacgacgcttcccaagtatccagcacctctaacgatgtatcaagctctgattttgaagagggtcctagtcggaaaagacctaggctccaggcccagcgaaaattcgcccaaagtcagcccaatagcccctcaaccacacccgtgaagatagtggaacctctcctcccacctcccgcaactcaaatctcagacctgtcaaagcggaagcccaaaaccgaagatttcctcacatttctgtgtctccgaggctcccctgccctgcccaactctatggtgtactttggaagctcccaggacgaagaagaagtcgaagaggaggacgacgagactgaggatgtgaagactgccaccaacaacgcctcttctagctgtcaatctacccctaggaagggcaagactcataaacatgtccacaatggtcacgtgtttaatggctcatcaagatccactagggaaaaggagccagtgcagaaacacaaatctaaagaagcaactcccgcaaaagagaagcattccgatcacagagccgatagccgcagggagcaggcgagcgccaatcatccagccgcagcaccaagtacaggatcaagcgccaagggcctcgccgcaactcatcaccatcctccactgcacaggtccgcccaagacctcaggaagcaggtgagcaaggtgaacggagttactcgaatgtcctccctgggtgccggtgtgacctctgctaaaaaaatgcgggaggtacgcccttctccctcaaaaaccgtcaagtacactgcaacggtgactaagggggctgtcacatacaccaaggcaaagagggagctggtgaaagacactaagcctaaccatcacaagccgagcagcgccgtaaaccatacgatttccggcaagacagagtcatctaatgcaaagaccagaaagcaggttctttcactgggaggagcgtccaagtccacaggccctgccgtgaatggcctgaaggtcagcggccgattgaaccccaaatcctgtaccaaggaagtaggcggacggcagttacgggaaggcctacagctgagagaaggccttcgtaacagtaaaagacggctggaggaggcacaccaagctgagaagccacagagtcctcccaagaaaatgaagggagcagctggcccagctgaaggcccaggaaagaaggctcccgcagaaagaggtctcctgaatgggcatgtcaaaaaggaagtgccagaacggagtctggagcgcaatcgacccaagagggctaccgcaggaaaatctactcccggtcgacaagctcacgggaaagccgacagcgcctcctgcgaaaaccgaagcacttctcaacccgagtctgtacacaaacctcaagactcaggcaaggcggagaaggggggtggaaaagccggatgggccgctatggatgaaatccccgtgctgcgtccttctgctaaggagtttcatgacccattgatctacatagagagcgtaagggcacaagtcgagaagtttggaatgtgtagagtgataccaccacccgattggaggcctgagtgtaagctgaatgatgaaatgaggtttgtgacacaaattcagcatatacacaagcttggacggaggtggggcccaaacgtgcagcgcctggcctgtattaagaagcatctcaaatcccaggggattacgatggacgaactgcctcttatcggtgggtgcgagctggacttggcctgcttttttaggctcattaacgagatgggaggaatgcagcaagtcactgatttgaagaagtggaataagttggcagacatgctgagaatccccaggactgcccaggatcggcttgcaaaactgcaggaggcatactgccagtacctattgtcctacgattctctgtcccctgaggagcacaggaggctggagaaagaggtactgatggaaaaagagattttagagaagcgcaagggcccactggaaggacatacagagaacgatcaccacaagtttcatcctctgcctagattcgagccgaaaaacgggctcatccatggggtcgctcccagaaatgggtttaggagtaagttgaaagaggtgggccaagcccaattaaaaacaggcaggcgacgtctgtttgcccaggagaaagaggtagtaaaagaggaagaggaggataagggcgtcctcaacgactttcacaaatgtatttataagggtcgcagcgtttccctgacaacattctaccggacagccaggaacattatgagcatgtgctttagtaaagagccagccccagcggagatcgaacaggaatattggagactggtggaagagaaagactgccatgtggccgtgcactgcggtaaggtggataccaatactcatggcagtggattcccggtgggcaaaagcgaaccattctccaggcacggttggaacctgacggttctgcctaataacacaggatctatactacggcatcttggcgctgttccaggagtcacaataccttggctgaatatcgggatggttttctcgacatcgtgctggtccagagaccaaaaccacctgccttacatagactacctgcataccggcgctgattgtatatgcctgtctgtggaacccgtgtttccccatctatcagtggcggtgggttctagagtagacctggggattagctttcttccatgcggggatacgcgggtgatgtatcccgtagaaagtgtagcatggcggggagtgcttggtcctcgtctttag

SEQ ID NO: 151533 - DNA, 3741 bp, Artificial Sequence
  derived and/or modified sequence
atgagcaaggagagacccaagagaaacatcatccagaagaagtacgacgacagcgacggcatcccctggagcgaggagagagtggtgagaaaggtgctgtacctgagcctgaaggagttcaagaacagccagaagagacagcacgccgagggcatcgccggcagcctgaagaccgtgaacggcctgctgggcaacgaccagagcaagggcctgggccccgccagcgagcagagcgagaacgagaaggacgacgccagccaggtgagcagcaccagcaacgacgtgagcagcagcgacttcgaggagggccccagcagaaagagacccagactgcaggcccagagaaagttcgcccagagccagcccaacagccccagcaccacccccgtgaagatcgtggagcccctgctgcccccccccgccacccagatcagcgacctgagcaagagaaagcccaagaccgaggacttcctgaccttcctgtgcctgagaggcagccccgccctgcccaacagcatggtgtacttcggcagcagccaggacgaggaggaggtggaggaggaggacgacgagaccgaggacgtgaagaccgccaccaacaacgccagcagcagctgccagagcacccccagaaagggcaagacccacaagcacgtgcacaacggccacgtgttcaacggcagcagcagaagcaccagagagaaggagcccgtgcagaagcacaagagcaaggaggccacccccgccaaggagaagcacagcgaccacagagccgacagcagaagagagcaggccagcgccaaccaccccgccgccgcccccagcaccggcagcagcgccaagggcctggccgccacccaccaccacccccccctgcacagaagcgcccaggacctgagaaagcaggtgagcaaggtgaacggcgtgaccagaatgagcagcctgggcgccggcgtgaccagcgccaagaagatgagagaggtgagacccagccccagcaagaccgtgaagtacaccgccaccgtgaccaagggcgccgtgacctacaccaaggccaagagagagctggtgaaggacaccaagcccaaccaccacaagcccagcagcgccgtgaaccacaccatcagcggcaagaccgagagcagcaacgccaagaccagaaagcaggtgctgagcctgggcggcgccagcaagagcaccggccccgccgtgaacggcctgaaggtgagcggcagactgaaccccaagagctgcaccaaggaggtgggcggcagacagctgagagagggcctgcagctgagagagggcctgagaaacagcaagagaagactggaggaggcccaccaggccgagaagccccagagcccccccaagaagatgaagggcgccgccggccccgccgagggccccggcaagaaggcccccgccgagagaggcctgctgaacggccacgtgaagaaggaggtgcccgagagaagcctggagagaaacagacccaagagagccaccgccggcaagagcacccccggcagacaggcccacggcaaggccgacagcgccagctgcgagaacagaagcaccagccagcccgagagcgtgcacaagccccaggacagcggcaaggccgagaagggcggcggcaaggccggctgggccgccatggacgagatccccgtgctgagacccagcgccaaggagttccacgaccccctgatctacatcgagagcgtgagagcccaggtggagaagttcggcatgtgcagagtgatccccccccccgactggagacccgagtgcaagctgaacgacgagatgagattcgtgacccagatccagcacatccacaagctgggcagaagatggggccccaacgtgcagagactggcctgcatcaagaagcacctgaagagccagggcatcaccatggacgagctgcccctgatcggcggctgcgagctggacctggcctgcttcttcagactgatcaacgagatgggcggcatgcagcaggtgaccgacctgaagaagtggaacaagctggccgacatgctgagaatccccagaaccgcccaggacagactggccaagctgcaggaggcctactgccagtacctgctgagctacgacagcctgagccccgaggagcacagaagactggagaaggaggtgctgatggagaaggagatcctggagaagagaaagggccccctggagggccacaccgagaacgaccaccacaagttccaccccctgcccagattcgagcccaagaacggcctgatccacggcgtggcccccagaaacggcttcagaagcaagctgaaggaggtgggccaggcccagctgaagaccggcagaagaagactgttcgcccaggagaaggaggtggtgaaggaggaggaggaggacaagggcgtgctgaacgacttccacaagtgcatctacaagggcagaagcgtgagcctgaccaccttctacagaaccgccagaaacatcatgagcatgtgcttcagcaaggagcccgcccccgccgagatcgagcaggagtactggagactggtggaggagaaggactgccacgtggccgtgcactgcggcaaggtggacaccaacacccacggcagcggcttccccgtgggcaagagcgagcccttcagcagacacggctggaacctgaccgtgctgcccaacaacaccggcagcatcctgagacacctgggcgccgtgcccggcgtgaccatcccctggctgaacatcggcatggtgttcagcaccagctgctggagcagagaccagaaccacctgccctacatcgactacctgcacaccggcgccgactgcatctggtactgcatccccgccgaggaggagaacaagctggaggacgtggtgcacaccctgctgcaggccaacggcacccccggcctgcagatgctggagagcaacgtgatgatcagccccgaggtgctgtgcaaggagggcatcaaggtgcacagaaccgtgcagcagagcggccagttcgtggtgtgcttccccggcagcttcgtgagcaaggtgtgctgcggctacagcgtgagcgagaccgtgcacttcgccaccacccagtggaccagcatgggcttcgagaccgccaaggagatgaagagaagacacatcgccaagcccttcagcatggagaagctgctgtaccagatcgcccaggccgaggccaagaaggagaacggccccaccctgagcaccatcagcgccctgctggacgagctgagagacaccgagctgagacagagaagacagctgttcgaggccggcctgcacagcagcgccagatacggcagccacgacggcagcagcaccgtggccgacggcaagaagaagcccagaaagtggctgcagctggagaccagcgagagaagatgccagatctgccagcacctgtgctacctgagcatggtggtgcaggagaacgagaacgtggtgttctgcctggagtgcgccctgagacacgtggagaagcagaagagctgcagaggcctgaagctgatgtacagatacgacgaggagcagatcatcagcctggtgaaccagatctgcggcaaggtgagcggcaagaacggcagcatcgagaactgcctgagcaagcccacccccaagagaggccccagaaagagagccaccgtggacgtgccccccagcagactgagcgccagcagcagcagcaagagcgccagcagcagcagctag

SEQ ID NO: 151534 - DNA, 2883 bp, Artificial Sequence
  derived and/or modified sequence
atggccgcccccagagtgtgccaggtgcagttcctggtggcctacctggaggagcccggcatcgagggcctgctgggcaacgaccagagcaagggcctgggccccgccagcgagcagagcgagaacgagaaggacgacgccagccaggtgagcagcaccagcaacgacgtgagcagcagcgacttcgaggagggccccagcagaaagagacccagactgcaggcccagagaaagttcgcccagagccagcccaacagccccagcaccacccccgtgaagatcgtggagcccctgctgcccccccccgccacccagatcagcgacctgagcaagagaaagcccaagaccgaggacttcctgaccttcctgtgcctgagaggcagccccgccctgcccaacagcatggtgtacttcggcagcagccaggacgaggaggaggtggaggaggaggacgacgagaccgaggacgtgaagaccgccaccaacaacgccagcagcagctgccagagcacccccagaaagggcaagacccacaagcacgtgcacaacggccacgtgttcaacggcagcagcagaagcaccagagagaaggagcccgtgcagaagcacaagagcaaggaggccacccccgccaaggagaagcacagcgaccacagagccgacagcagaagagagcaggccagcgccaaccaccccgccgccgcccccagcaccggcagcagcgccaagggcctggccgccacccaccaccacccccccctgcacagaagcgcccaggacctgagaaagcaggtgagcaaggtgaacggcgtgaccagaatgagcagcctgggcgccggcgtgaccagcgccaagaagatgagagaggtgagacccagccccagcaagaccgtgaagtacaccgccaccgtgaccaagggcgccgtgacctacaccaaggccaagagagagctggtgaaggacaccaagcccaaccaccacaagcccagcagcgccgtgaaccacaccatcagcggcaagaccgagagcagcaacgccaagaccagaaagcaggtgctgagcctgggcggcgccagcaagagcaccggccccgccgtgaacggcctgaaggtgagcggcagactgaaccccaagagctgcaccaaggaggtgggcggcagacagctgagagagggcctgcagctgagagagggcctgagaaacagcaagagaagactggaggaggcccaccaggccgagaagccccagagcccccccaagaagatgaagggcgccgccggccccgccgagggccccggcaagaaggcccccgccgagagaggcctgctgaacggccacgtgaagaaggaggtgcccgagagaagcctggagagaaacagacccaagagagccaccgccggcaagagcacccccggcagacaggcccacggcaaggccgacagcgccagctgcgagaacagaagcaccagccagcccgagagcgtgcacaagccccaggacagcggcaaggccgagaagggcggcggcaaggccggctgggccgccatggacgagatccccgtgctgagacccagcgccaaggagttccacgaccccctgatctacatcgagagcgtgagagcccaggtggagaagttcggcatgtgcagagtgatccccccccccgactggagacccgagtgcaagctgaacgacgagatgagattcgtgacccagatccagcacatccacaagctgggcagaagatggggccccaacgtgcagagactggcctgcatcaagaagcacctgaagagccagggcatcaccatggacgagctgcccctgatcggcggctgcgagctggacctggcctgcttcttcagactgatcaacgagatgggcggcatgcagcaggtgaccgacctgaagaagtggaacaagctggccgacatgctgagaatccccagaaccgcccaggacagactggccaagctgcaggaggcctactgccagtacctgctgagctacgacagcctgagccccgaggagcacagaagactggagaaggaggtgctgatggagaaggagatcctggagaagagaaagggccccctggagggccacaccgagaacgaccaccacaagttccaccccctgcccagattcgagcccaagaacggcctgatccacggcgtggcccccagaaacggcttcagaagcaagctgaaggaggtgggccaggcccagctgaagaccggcagaagaagactgttcgcccaggagaaggaggtggtgaaggaggaggaggaggacaagggcgtgctgaacgacttccacaagtgcatctacaagggcagaagcgtgagcctgaccaccttctacagaaccgccagaaacatcatgagcatgtgcttcagcaaggagcccgcccccgccgagatcgagcaggagtactggagactggtggaggagaaggactgccacgtggccgtgcactgcggcaaggtggacaccaacacccacggcagcggcttccccgtgggcaagagcgagcccttcagcagacacggctggaacctgaccgtgctgcccaacaacaccggcagcatcctgagacacctgggcgccgtgcccggcgtgaccatcccctggctgaacatcggcatggtgttcagcaccagctgctggagcagagaccagaaccacctgccctacatcgactacctgcacaccggcgccgactgcatctgcctgagcgtggagcccgtgttcccccacctgagcgtggccgtgggcagcagagtggacctgggcatcagcttcctgccctgcggcgacaccagagtgatgtaccccgtggagagcgtggcctggagaggcgtgctgggccccagactgtag

SEQ ID NO: 151535 - protein, 511 aa, Artificial Sequence
  derived and/or modified sequence
MGQGDESERIVINVGGTRHQTYRSTLRTLPGTRLAWLAEPDAHSHFDYDPRADEFFFDRHPGVFAHILNYYRTGKLHCPADVCGPLYEEELAFWGIDETDVEPCCWMTYRQHRDAEEALDSFGGAPLDNSADDADADGPGDSGDGEDELEMTKRLALSDSPDGRPGGFWRRWQPRIWALFEDPYSSRYARYVAFASLFFILVSITTFCLETHERFNPIVNKTEIENVRNGTQVRYYREAETEAFLTYIEGVCVVWFTFEFLMRVIFCPNKVEFIKNSLNIIDFVAILPFYLEVGLSGLSSKAAKDVLGFLRVVRFVRILRIFKLTRHFVGLRVLGHTLRASTNEFLLLIIFLALGVLIFATMIYYAERIGAQPNDPSASEHTHFKNIPIGFWWAVVTMTTLGYGDMYPQTWSGMLVGALCALAGVLTIAMPVPVIVNNFGMYYSLAMAKQKLPKKKKKHIPRPPQLGSPNYCKSVVNSPHHSTQSDTCPLAQEEILEINRAGRKPLRGMSI

SEQ ID NO: 151536 - DNA, 1536 bp, Artificial Sequence
  derived and/or modified sequence
atggggcagggggatgaatctgaacgcatcgtcattaatgtgggaggtacacgacatcagacctatcggtccactctgcgaacactccctggcacgcgcttggcatggctggccgagcccgacgcacacagccatttcgactatgaccctcgtgctgatgagtttttttttgatagacaccctggcgtctttgcacatattctgaactactatcgcacaggtaaactgcactgcccagccgatgtatgtgggcccctgtatgaggaggaactcgccttctggggcatcgatgaaaccgatgttgagccctgctgttggatgacctatagacagcacagagacgccgaggaggccttagattcctttgggggtgctccgctggacaattccgctgatgatgcggacgcagatggtcctggggacagtggcgacggggaggatgagctcgagatgaccaagaggctagctctgtcagactctcctgatggacgccccggcggtttctggcgacggtggcaaccccgcatttgggcacttttcgaggatccatacagctcccgttatgccagatatgtggcttttgccagtctgttttttatcctggtgagcatcacaacgttttgtcttgagacccatgagcgtttcaacccgattgtgaacaagactgaaatcgagaatgttaggaatgggacacaggtcaggtattatcgggaagccgaaactgaggctttcctcacttatattgaaggggtgtgtgtcgtgtggtttacatttgagttccttatgcgcgtgatattttgccctaacaaggtagaattcataaaaaactctctcaacattatcgatttcgtagccatactgcccttctacctggaggtcggcctcagcggtctttcctccaaggcagcgaaggacgtgctcggatttctccgggtagttcgatttgtccgcattctgcgcatctttaaactgaccagacatttcgtcgggctgagagttctcggacacaccctgagggcatccaccaacgagttccttctgctgattatcttcctagctttaggagtgctaatattcgctaccatgatctactacgccgagcggataggcgcgcagcccaacgacccttccgcatcagaacacactcacttcaaaaatattcctatcgggttttggtgggctgtggtgacaatgactaccctcggatatggggatatgtatcctcagacctggtccggtatgctagtgggcgccctgtgcgccctggcaggtgtgctgacaatagccatgcccgtgccagtaatagtgaataattttggaatgtattacagcctcgctatggccaaacagaagctgcccaaaaaaaagaaaaagcatatccccagacccccacagttaggttccccaaattattgtaagtcagtcgtcaacagcccacatcacagcacgcagagcgatacatgtccattagcccaagaagaaatcttggaaattaaccgggccggcagaaagccactccgaggaatgtcgatttag

SEQ ID NO: 151537 - DNA, 1536 bp, Artificial Sequence
  derived and/or modified sequence
atgggccagggagatgaaagtgagcgcatcgtcatcaacgtgggcggcaccaggcaccagacctaccgcagcaccctgcggaccctgcccggcacccggctggcctggctggccgagccagatgcccacagccactttgattatgaccccagggcagatgagttcttctttgacagacaccctggggtgtttgcccacatcctgaactactacagaacaggcaagctgcactgcccagcagatgtgtgtggccccctgtatgaggaggagctggccttctggggcattgatgaaacagatgtggagccctgctgctggatgacctaccggcagcacagagatgctgaggaggccctggacagctttggaggagcccccctggacaacagcgcagatgatgctgatgctgatggccctggggacagcggagatggagaagatgagctggagatgaccaagaggctggccctgagtgacagcccagatggccggcctgggggcttctggaggcgctggcagccccgcatctgggccctgtttgaggacccctacagcagccgctatgcccgctacgtggcctttgccagcctcttcttcatcctggtgtccatcaccaccttctgcctggagacccatgagcgcttcaaccccatcgtgaacaagacagaaattgaaaatgtgagaaatggcacccaggtgcgctactaccgggaggccgagacagaggccttcctgacctacatcgagggcgtgtgtgtggtgtggttcacctttgagttcctgatgagggtcatcttctgccccaacaaggtggagttcatcaagaacagcctgaacatcatcgactttgtggccatcctgcccttctacctggaggtgggcctgagcggcctgagcagcaaggccgccaaggatgtgctgggcttcctgcgggtggtgcgctttgtgcgcatcctgcgcatcttcaagctgaccaggcactttgtgggcctgcgggtgctgggccacaccctgcgggccagcaccaatgagttcctgctgctgatcatcttcctggccctgggcgtgctgatctttgccaccatgatctactatgcagagagaattggagcccagcccaatgaccccagcgccagcgagcacacccacttcaagaacatccccatcggcttctggtgggccgtggtgaccatgaccaccctgggctatggagacatgtacccccagacctggagcggcatgctggtgggcgccctgtgtgccctggccggcgtgctgaccatcgccatgcctgtgcctgtgattgtgaacaactttggcatgtactacagcctggccatggccaagcagaagctgcccaagaagaagaagaagcacatccccaggcctccccagctgggcagccccaactactgcaagtctgtggtgaacagcccccaccacagcacccagagcgacacctgccccctggcccaggaggagatcctggagatcaacagagctggcaggaagcccctgcggggcatgagcatctag

SEQ ID NO: 151538 - DNA, 1536 bp, Artificial Sequence
  derived and/or modified sequence
atgggccagggcgacgagagcgagcggatcgtgatcaacgtgggcgggaccagacaccagacctatcgctccaccctcaggacactcccaggtactcgcctcgcctggttagcagagcctgacgcccatagccacttcgattatgacccaagggccgatgaattcttctttgaccgccatcctggggttttcgctcacatattgaactattatcgaacgggaaagctgcattgcccagcagacgtgtgcggcccactgtatgaggaggagttggcgttctggggtattgacgagaccgacgtggagccttgttgctggatgacatatagacagcaccgggatgcggaggaggccttggatagtttcggcggagctcctttagacaatagcgctgatgatgccgacgcagatgggcccggcgatagtggagacggagaggacgagctagagatgacaaagaggctggcgctgtcagattccccggatggaagacccgggggattttggcgcaggtggcagcctaggatctgggcactgttcgaagacccgtattcatcacgctacgcgagatatgtcgcctttgcatctctatttttcatcctggtttcaattacaaccttttgcctcgaaactcacgagaggtttaacccaatcgtcaacaaaacagagattgagaacgtgcgcaacggcacccaggttcggtattatagggaagctgagaccgaagccttcctaacctatatcgaaggagtgtgtgtggtgtggttcaccttcgagtttctcatgcgagtcattttctgccccaataaagtagagttcataaagaacagtctgaacatcattgatttcgtggctattcttcccttttacctggaagtgggtctgagcggtttaagcagtaaggccgcaaaagatgtgcttgggtttctgcgagtggttaggtttgtgaggatcctccgaattttcaaactcacacgccactttgtcggactacgggtgcttggccacactcttagggcttctacaaacgaattcctgttactgattatttttttagcccttggtgttctcatcttcgccactatgatctactacgctgagcgcataggcgcacagccaaacgacccttccgcttcggagcatacgcacttcaagaacatccccattggtttttggtgggcagtggtgacaatgaccacgctcggatatggcgacatgtatccccagacctggagcggtatgttggtgggagccctctgtgccttagccggggtcttaactattgcaatgcctgtccccgtgattgtcaataattttgggatgtactactcccttgctatggcgaagcagaagctcccaaagaaaaagaaaaagcacattccaagacccccacagttagggtctccaaactattgcaaatctgtggtgaattccccccatcattctacacaatccgacacatgccccctggcccaggaggagattcttgagattaacagggcaggtcgcaagcctctgcggggcatgtccatttag

SEQ ID NO: 151539 - DNA, 6766 bp, Artificial Sequence
  derived and/or modified sequence
gggccgcgccatgcctaagggggcgccgcgatgggccaaggggacgagagcgagcgcatcgtgatcaacgtgggcggcacgcgccaccagacgtaccgctcgaccctgcgcacgctgcccggcacgcggctcgcctggctggcggagcccgacgcccacagccacttcgactatgacccgcgtgctgacgagttcttcttcgaccgccaccccggcgtcttcgcgcacatcctgaactactaccgcacgggcaagctgcactgcccagccgacgtgtgcgggccgctctacgaggaggagctggccttctggggcatcgacgagaccgacgtggagccctgctgctggatgacgtaccgccagcaccgcgacgccgaggaggctctggacagcttcggcggcgctcctctggacaacagcgccgacgacgcggacgccgacggccctggcgactcgggcgacggcgaggacgagctggagatgaccaagcgcctggcgctcagtgactccccggatggccggcctggcggcttttggcgccgctggcagccgcgcatctgggcgctcttcgaggacccgtactcgtcccgctacgcgcggtatgtggccttcgcttccctcttcttcatcctggtctccatcaccaccttctgcctggagacccacgagcgcttcaaccccatcgtgaacaagacggagatcgagaacgttcgcaatggcacgcaagtgcgctactaccgggaggccgagacggaggccttccttacctacatcgagggcgtctgtgtggtctggttcaccttcgagttcctcatgcgtgtcatcttctgccccaacaaggtagagttcatcaagaactcgctcaacatcattgactttgtggccatcctgcccttctacctggaggtggggctgagcggcctgtcctccaaggcagccaaggacgtgctgggcttcctgcgcgtcgtccgcttcgtgcgcatcttgcgcatctttaagctgacccgccactttgtgggcctgcgggtcctgggccacacgctccgagccagcaccaacgagttcctgctgctcatcatcttcctggccttgggcgtgctgatcttcgccaccatgatctactacgccgagaggataggggcacagcccaatgaccccagcgccagtgagcacacgcactttaagaacatccccatcggcttctggtgggccgtggtcaccatgacgaccctgggctatggagacatgtacccgcagacgtggtccggcatgctggtgggggctctgtgtgcgctggcgggcgtgctcaccatcgccatgcccgtgcccgtcatcgtgaacaatttcgggatgtattactccttagccatggctaagcagaaactaccaaagaaaaaaaagaagcatattccgcggccaccgcagctgggatctcccaattattgtaaatctgtcgtaaactctccacaccacagtactcagagtgacacatgtccgctggcccaggaagaaattttagaaattaacagagcaggtaggaaacctcttagaggcatgtcgatctgacctttcacctctgccccctgtagcgatgattccagatccagtcagactgcttccttagttccgtgggtgaccccggaccccgcactcagtctggaggtgtggagcctgggggcccagggagatgctgggcggccaaattcagcaggcaagagcctgctagaggaacctcactggtgcccctgggtaaggaggttgacgcggttggtctcgtgatgttctgaagagacaacgcggcccgccaggttgctgaggactaacttagcaggagccaggggggctctgcttggtggggcaggagtccggtgtgagtctctgactcaggctactgacccggtgttgggacagagtgggggcgggtgtgatttggaaacgctagacagcctttgatctggtccttaccatggctcccttcaggctgtgtagatggcagagatggtgcatgggatctgggcaggagggtcccttgcaaaggcaggtgcaagggttctcacccccggcagagcctgtctccatagctgagtagaattcctgccctgatttcgggctgcccagctcgaggtccttcccaggagacgcctgtagccctccgtgacaagcttacttaccccatagcatgctgaaccaactcatcttctaccaccactctagagtttagcctttatctttaggaacctgttgaagtgactctagctttcacgttgtctgtttgggttgatggtcgagtgggagtttccggtgacccgatggaagcggctgccgagcaaaagactagagggggccaccaccctgggcagcttagatgaaagcgctacagaccagcaacagcctcccaccgagggttctccccgtttccagcggtagggactgcagcagcaatatagacatcccaaccagtgtacaaccactttcccgtgaattcactgggggccgggaggggggaggggggcatgaaacaatactagtcaccgtgggatatattctaatattccatggctagtggtttgttatgggactatctcagttttatgagaacctgcacatagcacataaagttgatcatggggctctggtccgaagatataaagcccatagtctacctctacccatggaataccatcgacttattctgtggacacagggatttcaaaggaacagatgacccagagaagaatgacagcactgagtaagaaggagtgccaggtgagcaggaggttgacgtgacaggtggcatttagtctatgaaggacctccccatgcccaggtctggcaggaggctgctggctagctcagccccaggtggggaagtttccccctggtttgggtggcctcccccagtggatgattgattttcttccctgctatcgcgctctctgacccaccaccccatcccaatcctcttctggctttaccccacagctatgctggcccgagcactaccctcaaggcccatttctttgcccatgggggtttcccggtcctttcaccctgccgcatacccttcccttcctgggatttctgtaggtgcctgagaggaacatggccaggggtctccgaggctgaaacagctccgagctctctgctttggattagctagttacttgatttcaggagctaccaacagggctctgggcctctaggaggaacgcgtgggctggcccaggccccagcttccatgtgggcctggcaagaagagctcagcctgagtggcatcactgtggcactacctggcccttcccctgcatcctccccgacactggatctttcaggagtgttgccccaagcacaggtgccctgggccagccagtcaagaatccccagtgctctccaggcaggcccagattcctctgtactcttggacaatgacagtattatcctgtgcggagtccccctgccccccagggagtgcagatgtgtttgttcagacatgcacaccagctaatcccaggacacaaaacctgtaaaacccatgcactcctgtgggattgcccctgagctccacagtctctccccagccctgcttttgagagccactttgccctggtcccaggtttcaggggcccagacagttctggcttggacagtctctgtggctgaggaagtatttggggccctcacaagcttgccctctggagcttggatgcctggatccctcctgcctcccccgtcaccaactgtgctcccaagcccttcccaagcactcacttcccggtggtgttggtgctgtcctgatatcctgacccccgaggctccagcctcatccctcaccagaacacttctccctccaaaagctggcgtgtgagaccccggctatccgccaccaagaggagttgcggtctttaggggcgttgtccccacctctgcaccccagagttcttcccattcaccttttttcctgcttgcagccatgcacctagatgggcatagggttggggtgagtttgtgggagagtgagggggaggccaggggcaaggaaggtaaatgtggtggccccacaggaattgtgagagatgagatgcagccccccaaggcctttccagtctcactgtacccccaaggcagtctagtggcctcgccaaaacctgagcttctccaattccacttttaaaaccagagttaggggctgtgtgtggcacgctgggttctgagggcatccctcccgcccccccaggccagcccccagtggtgccagcagcacctgcccctcacctccacctcttggtctcgtctgaagcctcagtctgtgtgtctgtcccagggacaatctggtctcctcctgtgtgctgtggctggcatggcctcagtgtctgagggcttgtcctgggaggggtatcaagaatccaattctcacctggttgtaggacctcttgggggatgctaggagggcgccctggcacagccagggattgcctagggctgaggggcccaggagaagctacttctctcccagaaaggggctccctcctgcatctgcagtcggatgcccagaccgcccactctggacagcccacaatgcctcctccgtcctgccatgcccattcgcatgtgtcttgtccatctccgctcctgtgatgtgggtcagtcctttgtggtgccgcgtccagggctgcagggtcccacgtcagtgagcagtgggtggccggtggagggggtggtggtggccgggctcccttcctgcccatggcacctagaacagcagtgaggtctcagagaagcccccgcctgggctccctgggagctaaccttgcagcctctgggttatctttggcaaaggggtctaaagtcccctatccccagcccctctacttcccctgctgggcagcagtggctgcccagtgagtggtgctatccatggaggggggagggagctgggcagcgctgactaggcggcgggtggggctaagagagtttctgcagggacccagctgcagggtcagcagcctgtgggccctgagtggggtctttgttgtcctcaggtgggctgtgggggaagtagcggagaaatgaagtgacgccaggggccaggcatgggtgttcttttccgtgttgttcacattttctctctttctctctctctccactaatcatgtttctctctctctcctcgttttgttgcatgacttgtgccggttctcgtgattgttccctgctcgtgtctcacagactgtccccatttagcctgagacttttttcctgagtccccagctgggcagatccctcagggctaaacccaaggaaatgcccagcaacccccaacccaccccagccccgcgtgcgcccctccggtgcccgcagctggtgtgaacagtaagtactttggcggtgcctggagaccagggcagaaaagccagctgtgctgactgagggcccagcctcgggttctccttgctccaaagtttaaaaaaaaatgaccctctcgcagatgctcatctcagcccatttcaagcctggaaaccatctctgagacgctgcccatgctgccatttcatcactgcaggcctgtgggtctagtgggggcctgggggccctgggctgggggaggcagggcccccagcctctggaaagcaggtgggaatggaggctcctagccactatctcatccaaaggatggggcaggggcgggggctcacacctttgaccctattcatgggttccccagatttatacagttggcccctcgttggtttctctttcttcaagccacccctctggagttggggagggagaatgccccagtttctgaaagcatcttaaaccatagatagacgaacagcccaggggcctgggccccttcacagagcaagacttaagcttccccacccaatcattagtccctcctcaaaggttagggttgagagaagcagtaggccctaggggtgtcccgggaatcccccaggagggaaaggtgccaggctatcatccctccagggatccctgatggatgttccttgtcccctgcccaaaaccatcccgaactttgggccctttagtgattgtgagagctgggagcccccagggcctgggggcttgtggacagaaccagtgggcgggggcccagcattcagagccagagaagggtctcaggcggcaccatctccacagaggcagaggcagagagaaggcacccccctctgacccacccctccccaggcaagaactgcaggctgtggacacctcccctggcagaggatggccaacagagactcagcaagtcctcactcccctcccagaaggagacgctgcctgggaggacccactgttctccccttgaggaaaatccatgcagggtgctatgggcctcaacccccacatcgtcatccgcgtcctctccatactgtttccctcccctctcccaacaccctcctccctcagcccggagacccttggatggaagactgggccagccagagtgggaggcaggaccagcgtgtctgcgagcacacgtgtgtgcctgcagacatgccccaagaccccagagacgccccggccccagtcacatggtgtcagagttaccttggcaactggcctttttggttcagagtaaattgggaagtgaagcccctgggatttgtcgagaaacgcactgtacgtgaaatgctttgccatcttgtacgaaagactttttttttaagttccaaaattatgatgggatttttttggatttgctttacgaataaatctgattggtccatttctcttttga

SEQ ID NO: 151540 - DNA, 1536 bp, Artificial Sequence
  derived and/or modified sequence
atgggtcagggtgatgaaagcgaacgcatcgtgattaacgtaggtggaacaaggcatcagacgtatcgctccaccctcagaacgcttccagggacacgcctggcttggcttgccgaaccggatgcccattcccactttgattatgatcccagggccgacgaattcttctttgatcgccatccaggggttttcgcccacatcttgaactattaccggaccgggaagctgcactgtcctgccgacgtctgtggcccattgtatgaggaagaactagctttctggggtattgacgagacggatgtggaaccctgttgctggatgacctataggcagcacagagatgccgaggaggctctcgatagttttgggggagcacccctggataactcggcagacgacgccgacgctgacgggcctggggattctggggacggagaagatgagctcgaaatgactaagaggctggcactttcagacagtcccgatggccgacccggtggtttctggaggaggtggcaaccccgaatctgggccttgttcgaagatccctacagtagtcgttacgccaggtacgtggctttcgcctcactgtttttcattctggtctccattaccaccttctgcctcgagacccatgagcgcttcaatcctatcgtgaataaaacagaaattgaaaatgtgcggaatggtacccaggtccgatattacagagaagccgagacagaagcattcctgacctacattgaaggggtttgtgtggtgtggttcacttttgagtttttgatgagggtaattttttgcccaaacaaggtggagttcatcaaaaactcgctgaatattattgacttcgtagctatcttgccattttatttggaggttggattgagcggcctctccagtaaagctgcaaaggacgtgttgggcttcctaagagtggtgaggttcgttagaatcctgcgcatattcaagctcacaaggcattttgtgggactaagagtgctgggacataccctgcgagcctcaactaatgaattcctgctcctgatcatcttcctggcactgggggttctgatttttgcaaccatgatatactatgctgagcgcataggagcgcagcccaatgacccatctgcctccgaacacacccactttaaaaatatcccaatcggcttctggtgggcggtggtgacaatgaccactttaggctatggagatatgtatccccagacttggtcaggcatgttggtgggggctctgtgcgcccttgcgggtgtattgactattgcgatgccggtgccagtgatcgtcaataattttggcatgtattactcactggccatggccaaacagaaactccccaaaaagaaaaagaagcacatcccaaggccaccccaactgggctcccctaactactgtaagagcgtcgtaaatagccctcatcatagcacgcagagtgacacctgtcccctcgctcaagaggagatcctcgagatcaatcgggctgggagaaagccactgcgaggcatgagcatctag

SEQ ID NO: 151541 - DNA, 1536 bp, Artificial Sequence
  derived and/or modified sequence
atgggccagggcgacgagagcgagagaatcgtgatcaacgtgggcggcaccagacaccagacctacagaagcaccctgagaaccctgcccggcaccagactggcctggctggccgagcccgacgcccacagccacttcgactacgaccccagagccgacgagttcttcttcgacagacaccccggcgtgttcgcccacatcctgaactactacagaaccggcaagctgcactgccccgccgacgtgtgcggccccctgtacgaggaggagctggccttctggggcatcgacgagaccgacgtggagccctgctgctggatgacctacagacagcacagagacgccgaggaggccctggacagcttcggcggcgcccccctggacaacagcgccgacgacgccgacgccgacggccccggcgacagcggcgacggcgaggacgagctggagatgaccaagagactggccctgagcgacagccccgacggcagacccggcggcttctggagaagatggcagcccagaatctgggccctgttcgaggacccctacagcagcagatacgccagatacgtggccttcgccagcctgttcttcatcctggtgagcatcaccaccttctgcctggagacccacgagagattcaaccccatcgtgaacaagaccgagatcgagaacgtgagaaacggcacccaggtgagatactacagagaggccgagaccgaggccttcctgacctacatcgagggcgtgtgcgtggtgtggttcaccttcgagttcctgatgagagtgatcttctgccccaacaaggtggagttcatcaagaacagcctgaacatcatcgacttcgtggccatcctgcccttctacctggaggtgggcctgagcggcctgagcagcaaggccgccaaggacgtgctgggcttcctgagagtggtgagattcgtgagaatcctgagaatcttcaagctgaccagacacttcgtgggcctgagagtgctgggccacaccctgagagccagcaccaacgagttcctgctgctgatcatcttcctggccctgggcgtgctgatcttcgccaccatgatctactacgccgagagaatcggcgcccagcccaacgaccccagcgccagcgagcacacccacttcaagaacatccccatcggcttctggtgggccgtggtgaccatgaccaccctgggctacggcgacatgtacccccagacctggagcggcatgctggtgggcgccctgtgcgccctggccggcgtgctgaccatcgccatgcccgtgcccgtgatcgtgaacaacttcggcatgtactacagcctggccatggccaagcagaagctgcccaagaagaagaagaagcacatccccagacccccccagctgggcagccccaactactgcaagagcgtggtgaacagcccccaccacagcacccagagcgacacctgccccctggcccaggaggagatcctggagatcaacagagccggcagaaagcccctgagaggcatgagcatctag

SEQ ID NO: 151542 - protein, 1032 aa, Artificial Sequence
  derived and/or modified sequence
MAETNNECSIKVLCRFRPLNQAEILRGDKFIPIFQGDDSVVIGGKPYVFDRVFPPNTTQEQVYHACAMQIVKDVLAGYNGTIFAYGQTSSGKTHTMEGKLHDPQLMGIIPRIARDIFNHIYSMDENLEFHIKVSYFEIYLDKIRDLLDVTKTNLSVHEDKNRVPFVKGCTERFVSSPEEILDVIDEGKSNRHVAVTNMNEHSSRSHSIFLINIKQENMETEQKLSGKLYLVDLAGSEKVSKTGAEGAVLDEAKNINKSLSALGNVISALAEGTKSYVPYRDSKMTRILQDSLGGNCRTTMFICCSPSSYNDAETKSTLMFGQRAKTIKNTASVNLELTAEQWKKKYEKEKEKTKAQKETIAKLEAELSRWRNGENVPETERLAGEEAALGAELCEETPVNDNSSIVVRIAPEERQKYEEEIRRLYKQLDDKDDEINQQSQLIEKLKQQMLDQEELLVSTRGDNEKVQRELSHLQSENDAAKDEVKEVLQALEELAVNYDQKSQEVEEKSQQNQLLVDELSQKVATMLSLESELQRLQEVSGHQRKRIAEVLNGLMKDLSEFSVIVGNGEIKLPVEISGAIEEEFTVARLYISKIKSEVKSVVKRCRQLENLQVECHRKMEVTGRELSSCQLLISQHEAKIRSLTEYMQSVELKKRHLEESYDSLSDELAKLQAQETVHEVALKDKEPDTQDADEVKKALELQMESHREAHHRQLARLRDEINEKQKTIDELKDLNQKLQLELEKLQADYEKLKSEEHEKSTKLQELTFLYERHEQSKQDLKGLEETVARELQTLHNLRKLFVQDVTTRVKKSAEMEPEDSGGIHSQKQKISFLENNLEQLTKVHKQLVRDNADLRCELPKLEKRLRATAERVKALEGALKEAKEGAMKDKRRYQQEVDRIKEAVRYKSSGKRGHSAQIAKPVRPGHYPASSPTNPYGTRSPECISYTNSLFQNYQNLYLQATPSSTSDMYFANSCTSSGATSSGGPLASYQKANMDNGNATDINDNRSDLPCGYEAEDQAKLFPLHQETAAS

SEQ ID NO: 151543 - protein, 126 aa, Artificial Sequence
  derived and/or modified sequence
KSSGKRGHSAQIAKPVRPGHYPASSPTNPYGTRSPECISYTNSLFQNYQNLYLQATPSSTSDMYFANSCTSSGATSSGGPLASYQKANMDNGNATDINDNRSDLPCGYEAEDQAKLFPLHQETAAS

SEQ ID NO: 151544 - DNA, 3099 bp, Artificial Sequence
  derived and/or modified sequence
atggctgagactaacaatgagtgctctattaaagtgctgtgcagattccgccccctgaatcaggccgagatactcaggggcgataagtttatccccattttccagggcgatgacagcgtggtgatcggaggtaaaccctatgttttcgatagagtgtttccacctaatacaacccaagagcaggtgtaccacgcatgcgctatgcagatcgttaaggatgttctggcagggtacaacggcacaatcttcgcatacggacaaacctcttccggcaagacgcataccatggaggggaaactgcatgaccctcagctgatgggtataatccctagaatcgccagggacatcttcaatcacatttattccatggatgaaaacctggaattccacatcaaggtcagctattttgaaatctacctcgataagatcagagaccttctggatgtgacaaaaaccaacctaagcgtccatgaggacaagaatcgcgtgccgttcgtgaagggctgtaccgagcgctttgtgagttcaccggaagaaattctggacgtcatcgatgagggaaaatccaataggcacgtggctgttactaatatgaacgaacattcttctcggagtcattcaatattcctgatcaacataaagcaggagaacatggagacggagcagaagctcagcggcaaactgtatctagtggatctggcagggtctgaaaaagtatccaagaccggagccgagggcgccgtgcttgatgaggcaaagaacataaataagagtctctccgcccttggcaatgtgatctcggccttggccgagggcaccaaatcttatgtcccttaccgcgacagcaaaatgacccgaatcctgcaggactctctgggggggaactgtcggaccaccatgttcatatgctgcagtccatcttcctacaatgatgctgagacaaagagtacattgatgttcggccagagggccaaaaccatcaaaaacaccgcctctgtaaacctggagcttactgcagagcaatggaaaaagaagtatgagaaagagaaagagaaaacaaaggctcaaaaggaaaccattgccaagttagaggcagaactctcacgctggaggaacggggaaaacgtgccagaaaccgaaaggctggctggggaggaggcagctttaggagcggagctgtgtgaggaaactcctgttaacgataactcttcaattgtggtccgcatcgctcccgaggaaaggcagaagtacgaagaggagattaggcgcctgtataaacagctggatgataaagatgacgaaattaatcagcagtctcagcttatcgaaaagctgaaacagcagatgttagatcaggaggagctgttggtatcaacacggggagacaacgaaaaggtgcagcgggagctgagtcaccttcagagcgaaaacgatgccgcaaaggatgaagttaaggaggtactgcaggctcttgaggagcttgctgtcaattacgaccagaaatcgcaagaggtggaagagaaaagtcagcagaaccagctgttagtggatgagctttcacagaaagtggcgacaatgctcagcctggagtctgagttgcagcgccttcaagaagttagtggccaccagagaaagcggatcgctgaagtcttgaatgggcttatgaaagacctgagcgaattttccgtgattgtcggcaacggcgaaattaagctgccagtggaaatttcgggagcaatcgaagaagagttcaccgttgcaaggctgtacatatctaagataaaatccgaagtcaagtcagtggtgaaaagatgccgccagctagaaaacttgcaggtcgagtgtcaccggaaaatggaggtgaccgggagggagctcagctcatgtcaactgttaatttcgcagcatgaagcgaaaattcggtcactcaccgagtatatgcagagtgtggaactaaagaaacggcatctagaagagtcatacgactctctgtccgatgagctggccaagctgcaggctcaggagactgtgcatgaagtggccctaaaggataaggagcctgatacccaagatgctgatgaagtcaaaaaagccttggagcttcaaatggagagtcacagagaggcacatcaccggcaactggcacgactgcgagatgagatcaacgaaaagcagaagaccatagatgagctgaaggatctgaatcagaagctgcagttggaactggaaaagctccaagctgattatgagaagctcaaaagtgaggagcatgagaaaagcaccaagctccaggagctaacatttctctacgagcgacacgagcagagcaaacaagacctgaagggtctggaagagacggtggcacgcgaattgcagacattacacaatcttcgcaagctcttcgtgcaggatgttactacgagggtgaaaaagtctgctgagatggaacccgaagactctggcggtattcatagtcagaaacagaaaattagcttcctagagaataaccttgaacagctcacgaaggtgcataaacaactggttcgcgacaatgccgatcttagatgtgaactcccaaaacttgaaaagaggctgcgagccaccgccgaaagggttaaagccctcgagggagccctgaaggaggcgaaggaaggggccatgaaggataaacgaaggtaccagcaagaggtggatcggatcaaagaggccgtgcgttataaatcatctggaaaacggggacatagcgcccagatcgcaaagcctgtgcgaccagggcactacccggcaagcagtcccaccaatccctatggcacacgttcacccgagtgcattagctatacaaatagcctatttcagaactaccaaaatctctacctgcaggcaacgccatctagtactagtgacatgtactttgctaatagctgcaccagcagcggagccacctcttcaggcggcccccttgccagctaccaaaaggccaatatggataacggaaacgctaccgacataaacgacaatcgctccgacctgccttgcggatacgaggcagaggaccaggccaagctgttcccactgcaccaagaaaccgccgcaagctag

SEQ ID NO: 151545 - DNA, 381 bp, Artificial Sequence
  derived and/or modified sequence
aagtcttctggcaagcgcggacactctgcacaaatcgccaagccagtcagaccaggccattacccggcgtcttctcccacaaatccctatggtacaaggtcgcctgagtgcatttcctacacaaattccctgtttcagaactatcagaatctctatctgcaggcgaccccctcttctacatctgacatgtactttgccaactcttgtaccagctctggggctacgtcaagtggcggacctctcgctagctatcagaaggccaatatggataatggtaacgcaaccgacattaacgataataggtccgacctcccctgcggttacgaagcagaagatcaagcgaagttgtttcccctgcaccaggagactgctgcgagttag

SEQ ID NO: 151546 - DNA, 5824 bp, Artificial Sequence
  derived and/or modified sequence
cgcccaggcccgcagcgcggcgctgcagcgcgaggggcggagaggcagagagcccgaaaggaccagacgcccaggtcgcccgcatcccgctgccgcaggagagagacagcgcgccccggccctgctccccaggcttcgcccgggcgccctcaactctgtccccagagactgagcacctgtcctccgcctcggcctctgctgagagccctctcctctggagcacacaccacccctgcagcccaagaagagtcccagccccacgccggctaccaccatggcggagaccaacaacgaatgtagcatcaaggtgctctgccgattccggcccctgaaccaggctgagattctgcggggagacaagttcatccccattttccaaggggacgacagcgtcgttattggggggaagccatatgtttttgaccgtgtattccccccaaacacgactcaagagcaagtttatcatgcatgtgccatgcagattgtcaaagatgtccttgctggctacaatggcaccatttttgcttatggacagacatcctcagggaaaacacataccatggagggaaagctgcacgaccctcagctgatgggaatcattcctcgaattgcccgagacatcttcaaccacatctactccatggatgagaaccttgagttccacatcaaggtttcttactttgaaatttacctggacaaaattcgtgaccttctggatgtgaccaagacaaatctgtccgtgcacgaggacaagaaccgggtgccatttgtcaagggttgtactgaacgctttgtgtccagcccggaggagattctggatgtgattgatgaagggaaatcaaatcgtcatgtggctgtcaccaacatgaatgaacacagctctcggagccacagcatcttcctcatcaacatcaagcaggagaacatggaaacggagcagaagctcagtgggaagctgtatctggtggacctggcagggagtgagaaggtcagcaagactggagcagagggagccgtgctggacgaggcaaagaatatcaacaagtcactgtcagctctgggcaatgtgatctccgcactggctgagggcactaaaagctatgttccatatcgtgacagcaaaatgacaaggattctccaggactctctcgggggaaactgccggacgactatgttcatctgttgctcaccatccagttataatgatgcagagaccaagtccaccctgatgtttgggcagcgggcaaagaccattaagaacactgcctcagtaaatttggagttgactgctgagcagtggaagaagaaatatgagaaggagaaggagaagacaaaggcccagaaggagacgattgcgaagctggaggctgagctgagccggtggcgcaatggagagaatgtgcctgagacagagcgcctggctggggaggaggcagccctgggagccgagctctgtgaggagacccctgtgaatgacaactcatccatcgtggtgcgcatcgcgcccgaggagcggcagaaatacgaggaggagatccgccgtctctataagcagcttgacgacaaggatgatgaaatcaaccaacaaagccaactcatagagaagctcaagcagcaaatgctggaccaggaagagctgctggtgtccacccgaggagacaacgagaaggtccagcgggagctgagccacctgcaatcagagaacgatgccgctaaggatgaggtgaaggaagtgctgcaggccctggaggagctggctgtgaactatgaccagaagtcccaggaggtggaggagaagagccagcagaaccagcttctggtggatgagctgtctcagaaggtggccaccatgctgtccctggagtctgagttgcagcggctacaggaggtcagtggacaccagcgaaaacgaattgctgaggtgctgaacgggctgatgaaggatctgagcgagttcagtgtcattgtgggcaacggggagattaagctgccagtggagatcagtggggccatcgaggaggagttcactgtggcccgactctacatcagcaaaatcaaatcagaagtcaagtctgtggtcaagcggtgccggcagctggagaacctccaggtggagtgtcaccgcaagatggaagtgaccgggcgggagctctcatcctgccagctcctcatctctcagcatgaggccaagatccgctcgcttacggaatacatgcagagcgtggagctaaagaagcggcacctggaagagtcctatgactccttgagcgatgagctggccaagctccaggcccaggaaactgtgcatgaagtggccctgaaggacaaggagcctgacactcaggatgcagatgaagtgaagaaggctctggagctgcagatggagagtcaccgggaggcccatcaccggcagctggcccggctccgggacgagatcaacgagaagcagaagaccattgatgagctcaaagacctaaatcagaagctccagttagagctagagaagcttcaggctgactacgagaagctgaagagcgaagaacacgagaagagcaccaagctgcaggagctgacatttctgtacgagcgacatgagcagtccaagcaggacctcaagggtctggaggagacagttgcccgggaactccagaccctccacaaccttcgcaagctgttcgttcaagacgtcacgactcgagtcaagaaaagtgcagaaatggagcccgaagacagtggggggattcactcccaaaagcagaagatttcctttcttgagaacaacctggaacagcttacaaaggttcacaaacagctggtacgtgacaatgcagatctgcgttgtgagcttcctaaattggaaaaacgacttagggctacggctgagagagttaaggccctggagggtgcactgaaggaggccaaggagggcgccatgaaggacaagcgccggtaccagcaggaggtggaccgcatcaaggaggccgttcgctacaagagctcgggcaaacggggccattctgcccagattgccaaacccgtccggcctggccactacccagcatcctcacccaccaacccctatggcacccggagccctgagtgcatcagttacaccaacagcctcttccagaactaccagaatctctacctgcaggccacacccagctccacctcagatatgtactttgcaaactcctgtaccagcagtggagccacatcttctggcggccccttggcttcctaccagaaggccaacatggacaatggaaatgccacagatatcaatgacaataggagtgacctgccgtgtggctatgaggctgaggaccaggccaagcttttccctctccaccaagagacagcagccagctaatctcccacacccacggctgcatacctgcactttcagtttctaagagggactgaggcctcttctcagcatgctgcaaacctgtggtctctgatactaactccctccccaacccctgttgttggactgtactatgtttgatgtcttctcttacttactctgtatctctttgtactctgtatctatatatcaaaagctgctgctatgtctctcttctgtcttattctcaagtatctactgatgtatttagcaatttcaaagcatagtctaccttccttatttggggcaatagggaggagggtgaatgtttcttctttctcatctactcgtctcacactgagtggtgttagtcactgagtagaggtcacagagatgacaaaaggaaaaatgggagctagagggttgtgacccttcatacacacacgcacgcacgcacacaaacatgcacacacgcatgcacacacacaaagccttaagcagaagaatgtcttagcatcatgagacagagaaatagactcttcctccctcctctttcacatatagcacaggggaaggtaaaatggaagggctgctaattgagacatataattttcttcatacacccctcaccttaatcaaaggattcaggtgttacttctgccctacaaagtctgccttttgcctccctcttcctgttttcccctggactgagaaatgggttgctcaagggaccatttccctttttcttcaagctccttttgatattccctgccccagagctcatgaccagaacccagagctgatttaaaatattttgaaaaatggaggaggcagactgctcccagcagcctgtcaatggctgctcatctgtccatggagatggttacaggcaggtgtagtcaaaatgattgattccttgggtttgggggtgaataggctgggaaatttctgagccttttttttttgtcacagtgccctcaagttgaagtgatgagctggatttctttcttgttccatactgggcggcatgctcctcccatctccaccccttggtttgggggcttccagctcattggcaaaatctctctagttgccttcctttcaagctggagcctgacttttccccaatgtacattttttttttctccacaaagagttccttctctaatgtccccatctggtattaagtgcactttaaagaaaggggcagggtggattttcaagaggtgggaagctctaaggcttgaccctgaggggtcttctcccagccattctcagcccatatgcagcaccctccatactgaagaggactgttgttttagtttcagacggtcctttccttccacatggtgctaaggtggttttctaggtaactgcagggatggaggtcactagccattccaaaccaggagagaaagtctggtgtcctgatatccagtcttttctaggaggaagaccaagattctccagcggcagggcagcctatcacccaacttctaagtcaggaaaggaagctgagtgggaatgccagctggtaagcgcaggctgcactggcccatgactccttcaaggaaaagaggccctgctccctttacctgctgagctccttttagcagttagggagaactgcagggggaaaaataccagtggagtgtggaataaatccaaagcagtgatttttaaatgtttttcaaaaacaaatcttacatagaaccccaatataaaaaataaagtaatgcagacctgggcagtttgcatttttttttttttttttttttggtggaagaagtctcagcgtctcttaggactgactgttcaaaggctcctcagcaaatgagcccttgaacagtcctaagagaccctgaggattctgtggagtagtttgaaaaccattgttctgaggaagggggtccaatctggctcctctgcactaaagctgcaactcatggaaaagagggcaacggtggggtagacaagccatgctgtctccagacccactagggtggaaggaaggttcctgtgggcctgtggacttaggctaatatttgctgtcagcagggcacttaagaatccagggggttttatgtaatgttgccaccacatggttcttttaaaaacacataaggaaatgtgagggtgtagcgcagatgaggagagagatgacacagagggagcagccttctctttagcaagatgtaagggaaatataattcacttacataaaaaagaaacaacacacacgcaaacccttcaccagaagcttcacactacatcctcctcctcctcctgctccccaccttcaccgcatccctttcagagccagggtcactgcaaggggcacctggcctgcccactcacatctgccaaaatgttgcatgccagcgtggaagacaaaccaaactgcgcaaccccctgtgtgtatttacttggtgtacatagataactttaaaataaaataaattcaatgataactct

SEQ ID NO: 151547 - DNA, 564 bp, Artificial Sequence
  derived and/or modified sequence
aagagctcgggcaaacggggccattctgcccagattgccaaacccgtccggcctggccactacccagcatcctcacccaccaacccctatggcacccggagccctgagtgcatcagttacaccaacagcctcttccagaactaccagaatctctacctgcaggccacacccagctccacctcagatatgtactttgcaaactcctgtaccagcagtggagccacatcttctggcggccccttggcttcctaccagaaggccaacatggacaatggaaatgccacagatatcaatgacaataggagtgacctgccgtgtggctatgaggctgaggaccaggccaagcttttccctctccaccaagagacagcagccagctaatctcccacacccacggctgcatacctgcactttcagctccttttagcagttagggagaactgcagggggaaaaataccagtggagtgtggaataaatccaaagcagtgatttttaaatgtttttcaaaaacaaatcttacatagaaccccaatataaaaaataaagtaatgcagacctgggca

SEQ ID NO: 151548 - DNA, 3099 bp, Artificial Sequence
  derived and/or modified sequence
atggccgagaccaacaatgaatgttccatcaaggtgctgtgccgcttccggcccctgaaccaggccgagatcctgcggggggacaagttcatccccatcttccagggagatgattctgtggtgattggaggcaagccctacgtgtttgacagagtcttcccccccaacaccacccaggagcaggtgtaccacgcctgtgccatgcagatcgtgaaggatgtgctggccggctacaacggcaccatctttgcctacggccagaccagcagcggcaagacccacaccatggagggcaagctgcatgacccccagctgatgggcatcatcccccgcatcgcccgggacatcttcaaccacatctacagcatggatgagaacctggagttccacatcaaggtgtcctactttgagatctacctggacaagatccgggacctgctggatgtgaccaagaccaacctgtctgtgcatgaggacaagaacagagtgccctttgtgaagggctgcacagaaagatttgtgagcagccctgaggagatcctggatgtgattgatgagggcaagagcaacagacatgtggccgtgaccaacatgaatgagcacagcagccgcagccacagcatcttcctgatcaacatcaagcaggagaacatggagacagagcagaagctgagcggcaagctgtacctggtggacctggccggcagcgagaaggtgtccaagacaggagctgagggcgctgtgctggatgaggccaagaacatcaacaagagcctgagcgccctgggcaatgtcatcagcgccctggccgagggcaccaagagctatgtgccctacagagacagcaagatgacccgcatcctgcaggacagcctgggcggcaactgcaggaccaccatgttcatctgctgcagccccagcagctacaatgatgctgagaccaagagcaccctgatgtttggccagagggccaagaccatcaagaacacagcctctgtgaacctggagctgacagctgagcagtggaagaagaagtatgagaaggagaaggagaagaccaaggcccagaaggagaccatcgccaagctggaggccgagctgagccgctggagaaatggagaaaatgtgcctgagacagagcggctggccggggaggaggccgccctgggcgctgagctgtgtgaggagacccctgtgaatgacaacagcagcatcgtggtgagaattgcccctgaggagcggcagaagtatgaggaggagatccggcggctgtacaagcagctggatgacaaggatgatgagatcaaccagcagagccagctgattgagaagctgaagcagcagatgctggaccaggaggagctgctggtgtccaccaggggggacaatgagaaggtgcagcgggagctgagccacctgcagagtgaaaatgatgctgccaaggatgaggtgaaggaggtgctgcaggccctggaggagctggccgtgaactatgaccagaagagccaggaggtggaggagaagagccagcagaaccagctgctggtggatgagctgagccagaaggtggccaccatgctgagcctggagagcgagctgcagaggctgcaggaggtgtctggccaccagaggaagagaattgctgaggtgctgaatggcctgatgaaggacctgtctgagttcagcgtcatcgtgggcaatggagagatcaagctgcctgtggagatcagcggggccatcgaggaggagttcaccgtggcccggctgtacatcagcaagatcaagtctgaggtgaagtctgtggtgaagcgctgccggcagctggagaacctgcaggtggagtgccacaggaagatggaggtgacaggccgggagctgagcagctgccagctgctgatcagccagcacgaggccaagatccgcagcctgacagagtacatgcagagcgtggagctgaagaagaggcacctggaggagagctatgacagcctgagtgatgagctggccaagctgcaggcccaggagaccgtgcatgaggtggccctgaaggacaaggagccagacacccaggatgctgatgaggtgaagaaggccctggagctgcagatggagagccaccgggaggcccaccaccggcagctggcccggctgagagatgagatcaatgagaagcagaagaccattgatgagctgaaggacctgaaccagaagctgcagctggagctggagaagctgcaggccgactatgagaagctgaagtctgaggagcacgagaagagcaccaagctgcaggagctgaccttcctgtatgaaagacatgagcagagcaagcaggacctgaagggcctggaggagaccgtggcccgggagctgcagaccctgcacaacctgaggaagctgtttgtgcaggatgtgaccaccagggtgaagaagtctgctgagatggagcctgaggacagcggcggcatccacagccagaagcagaagatctccttcctggagaacaacctggagcagctgaccaaggtgcacaagcagctggtgcgggacaatgctgacctgcgctgtgagctgcccaagctggagaagaggctgcgggccacagctgagcgggtgaaggccctggagggcgccctgaaggaggccaaggagggcgccatgaaggacaagaggcgctaccagcaggaggtggaccgcatcaaggaggccgtgcgctacaagagcagcggcaagaggggccacagcgcccagatcgccaagcctgtgcggcccggccactacccagccagcagccccaccaacccctacggcaccaggagccctgagtgcatctcctacaccaacagcctcttccagaactaccagaacctgtacctgcaggccacccccagcagcaccagtgacatgtactttgccaacagctgcaccagcagcggggccaccagcagcggcggccccctggccagctaccagaaggccaacatggacaatggaaatgccacagacatcaatgacaacagaagtgacctgccctgtggctatgaagctgaggaccaggccaagctgttccccctgcaccaggagacagctgccagctag

SEQ ID NO: 151549 - DNA, 381 bp, Artificial Sequence
  derived and/or modified sequence
aagagcagcggcaagaggggccacagcgcccagatcgccaagcctgtgcggcccggccactacccagccagcagccccaccaacccctacggcaccaggagccctgagtgcatctcctacaccaacagcctcttccagaactaccagaacctgtacctgcaggccacccccagcagcaccagtgacatgtactttgccaacagctgcaccagcagcggggccaccagcagcggcggccccctggccagctaccagaaggccaacatggacaatggaaatgccacagacatcaatgacaacagaagtgacctgccctgtggctatgaagctgaggaccaggccaagctgttccccctgcaccaggagacagctgccagctag

SEQ ID NO: 151550 - DNA, 3099 bp, Artificial Sequence
  derived and/or modified sequence
atggccgagaccaacaacgagtgcagcatcaaggtgctgtgccggtttcgccctctaaatcaggctgagattctacgcggcgataagttcattccaatatttcagggtgacgattccgtagtcatcggaggaaagccgtacgtttttgatcgcgtctttcctcccaataccactcaggagcaagtgtatcacgcctgtgcaatgcagatagtgaaagatgtccttgccggttacaatggtaccatctttgcctacggtcaaacctcaagcggcaaaacgcataccatggaggggaaattgcacgacccccaattgatgggaattatcccaagaatagcgcgcgacattttcaatcatatatacagcatggacgaaaacctcgagttccatattaaggtcagctattttgaaatatacctggataaaattcgggacctcttagatgtgaccaagaccaaccttagcgtgcatgaggacaaaaaccgggtccccttcgttaagggctgcacagagcgcttcgtctcgtctcctgaggaaatcctcgacgttattgatgagggaaagagtaatcgccacgtcgcggtcacaaacatgaacgaacacagctcgaggtctcacagcatcttcctcattaatattaagcaggaaaatatggagacagaacaaaaacttagcggaaagctgtatctggtggatctagctggttctgaaaaggtctctaagacaggcgcagagggagccgttttggatgaggcaaagaatattaacaagagtcttagtgccctgggaaatgtcatctctgcactggcagaaggtacgaagtcctacgttccatatagagattctaagatgactaggattctccaagattccctcggtggtaactgtaggactacaatgttcatttgttgtagccctagctcctacaatgacgccgagactaagagtactttgatgttcggccagagggccaagactattaagaatacagcttccgtgaatctcgaactaactgcagaacagtggaaaaaaaagtacgagaaagagaaggaaaagacaaaggcacaaaaggagaccatcgccaagctggaagccgagcttagcagatggagaaacggcgaaaacgttcctgagactgagcgacttgctggcgaagaagccgcactaggcgcagagctgtgtgaagaaacacccgtgaacgacaactccagcatcgttgttagaatcgccccggaagagaggcagaagtatgaggaagaaattcgcagactgtacaaacagctggacgataaagacgacgaaattaaccagcagagccagctcattgagaagcttaagcagcaaatgctcgaccaagaggagttactggtgagcacacggggcgacaacgaaaaagtccagcgggagttgagtcatctccagtccgagaatgatgcagccaaggacgaggtgaaggaagtgctgcaggccctggaggagttggcagtgaactacgaccagaagtcacaggaggtggaggagaagtctcagcagaaccaattgctggttgacgaactgtctcagaaggttgctacaatgcttagcctagaatctgagctgcaaaggctccaggaggtgagcggccaccagcggaagaggatcgctgaagttctgaacgggctgatgaaggatctcagtgagtttagtgtaatagtcggcaatggggagatcaaactaccagtggagatatccggcgccattgaggaagagtttaccgtagcaaggctctatataagcaagataaaatccgaagtgaagagcgttgtcaaacgctgccggcagcttgaaaatttgcaggtcgaatgtcacaggaaaatggaggtgaccgggcgggaactttccagctgccaactcctcatctcccagcacgaggcaaagatccgatcgctgactgagtacatgcagagcgtggagctcaaaaaaaggcacctcgaggaaagctacgattccctctctgatgagcttgcaaagctccaggctcaggagaccgtccatgaagttgcgctcaaggacaaggagcctgacactcaggacgctgacgaggtgaagaaggccctggaattgcagatggaaagtcatcgggaagcacatcataggcagctggccaggcttagggacgagattaatgaaaagcagaaaactatagatgaattgaaggatctgaatcagaaattgcagttggagcttgaaaaactgcaagccgattatgagaaactcaagtcggaggagcatgaaaaaagtacaaaacttcaggagctcacatttctgtatgaacgacatgaacagagcaagcaggatctgaaaggcctggaggagactgtcgcccgtgaattacagacattgcataacttgcgaaaactgttcgtgcaggatgtcacaactagagtgaagaagagcgcggagatggaaccagaagactccggggggatacacagccagaagcagaaaatcagctttctggaaaacaacttggaacagcttactaaagtgcacaaacagctggtccgcgataacgccgacctgcgttgcgagttgccgaagttagaaaagcgactgcgtgcaaccgcagagagagtgaaggctctggaaggggcacttaaggaggccaaagagggggccatgaaagacaaaagacggtatcagcaggaagtcgacagaatcaaagaggccgtgcggtataagtcttctggcaagcgtggccactccgctcagattgcgaaaccagttaggccaggccattatccagcttccagtcccacgaatccatatggaactaggagccctgaatgcattagctacactaatagcctattccagaactaccaaaacctgtacctccaggccactccgagctcaacctctgatatgtactttgctaattcttgcactagcagcggagccacaagtagcggagggccgttagcttcctaccagaaagcaaacatggataatggtaacgccacagatatcaatgacaaccgcagcgacctgccttgtggatacgaagcagaagaccaggctaaactgtttccattgcatcaggaaaccgctgcctcgtag

SEQ ID NO: 151551 - DNA, 381 bp, Artificial Sequence
  derived and/or modified sequence
aagagcagcggcaagcggggccacagcgcccagatcgccaagcccgtgagacctggacactaccccgcttcctcccctaccaatccttacggcacacgatcaccggagtgcatcagctacaccaatagcctgttccaaaactaccaaaatctctatctgcaagcgacccctagcagcactagcgatatgtattttgccaatagctgtactagctccggggccacctcgtctgggggccctctggcctcataccagaaggcaaacatggataatggaaatgcaacagacattaacgacaataggagtgatctgccgtgcggctacgaggcggaggatcaggccaaactctttccgctacatcaagaaaccgccgcgtcttag

SEQ ID NO: 151552 - DNA, 3099 bp, Artificial Sequence
  derived and/or modified sequence
atggcagagaccaataacgagtgctccataaaggtgctgtgcagattccgcccattaaaccaggcagagatccttagaggtgacaaatttattccaatcttccagggcgacgactcagttgtgattggcggaaagccatacgtgttcgatagggtctttccacccaacacaacccaggagcaggtgtaccacgcctgtgcaatgcagatagttaaggatgtcctggctggctacaacggtaccatcttcgcttacggacagacgtcaagtgggaaaacacatactatggaggggaaactccacgaccctcagctcatggggataataccccgtatcgccagggacatattcaatcacatctacagtatggacgaaaatctggagtttcacattaaggtgtcctacttcgagatatacctggacaagattagggacctgctggacgtgaccaagactaacctgtccgtgcacgaagacaaaaatcgagttcccttcgtcaaaggatgcaccgagcgattcgtttcgagccccgaagaaatcttagacgttattgatgaggggaaatctaaccgccacgtagcagtgactaatatgaatgaacatagctctagatcccactccattttcctgatcaacattaagcaggaaaacatggaaaccgaacaaaaactgtccgggaagttgtatctggtggacctggccggttccgaaaaagtgagcaagacaggggctgaaggagcagttctggacgaggctaaaaatattaacaagtcattgagcgcccttggaaacgtgatcagtgcgctggcagagggaacaaaaagctatgtcccataccgagatagtaaaatgacacggatcctgcaggacagcctgggcggaaattgtcggacgacaatgttcatctgctgtagtccttccagttacaacgatgccgaaactaaaagtactctgatgtttggccagcgtgctaaaaccatcaaaaatacagcctccgtcaatctggaactcacagctgaacaatggaagaagaagtacgagaaagaaaaagagaagacaaaggcccagaaagaaaccatagctaagctcgaagcggagctgtctcggtggagaaacggtgagaatgtccccgaaactgagcgcctggccggagaggaggccgcactgggagcggaactgtgtgaggagactcccgttaacgacaactcaagtattgttgttagaattgcgcctgaagaaaggcagaagtacgaagaagagattcgtaggctctataagcagctggacgacaaagacgatgaaattaatcagcagtcacagctcatcgaaaaactgaagcagcaaatgctcgaccaggaagagctgctggtcagcaccaggggggataatgagaaagtgcaaagggagcttagtcaccttcagagcgagaacgacgcggcaaaggatgaagtcaaggaggtgctgcaggccctggaggagctggctgttaattacgaccagaaatcacaggaggtggaggagaaaagtcagcagaaccaactgctcgtggacgaactcagccaaaaggtagctacaatgctttctctggagtcagagttgcagaggctgcaggaggtgtccggccatcagcgtaaaagaattgcagaggtgctgaacggactgatgaaggatctgagtgaattttctgtcatcgtcgggaacggagaaattaagctaccggtcgaaatttcaggcgctattgaggaggagtttaccgttgccaggctctacatcagcaagattaaatcagaagtgaagtcagtggtgaaacggtgcaggcagctggaaaacctgcaggttgaatgtcaccgcaaaatggaggtaaccgggcgagagctcagctcctgtcagctgctcatctctcagcacgaggccaagattagatccttaaccgaatacatgcaatcagtagaacttaagaagcgtcacttggaagaatcttacgattcactgagcgatgaactggctaagctgcaggcgcaagagactgtgcatgaagtggccttaaaagacaaggaacccgacacgcaggatgccgatgaggttaagaaggctctcgagctgcaaatggagtcgcatcgagaagcccaccaccggcagcttgccaggctacgagacgaaataaacgagaagcagaagacaattgacgagctgaaggacctcaatcaaaagcttcaactcgaactagaaaaactgcaggcagattacgagaaactaaaatccgaagaacacgaaaagtcaacaaaacttcaggaactgaccttcctgtatgaacgccatgagcaatctaaacaggatttaaaaggccttgaagagaccgtcgcccgagaactccaaaccctccacaatctgcgcaaattgttcgttcaggacgttacaactagggttaaaaaaagcgcagagatggaacctgaggatagcggcggaatccactctcagaaacagaagatttctttcctggagaataatctggaacagctgactaaggtgcataaacagttggtacgcgataacgcggacctcaggtgcgagttaccaaagctcgagaagcggcttagagcaaccgctgagagggtgaaagccttagaaggtgccctcaaagaagccaaggagggtgcaatgaaggacaagcgaaggtatcagcaggaagtagaccgaatcaaagaagctgtgcggtataaatcctccggcaagcgcggacacagcgcccagattgccaaacctgttcgaccaggacattacccagcgtccagtcccaccaacccttatggaacgagaagcccggagtgcattagctatacaaactctctgttccaaaactaccagaacctctatttgcaggccaccccatcgagcacaagcgatatgtattttgccaatagttgcacatcatcgggtgctacttcgagcgggggaccgctcgcgtcctatcaaaaagccaatatggataacggaaacgctacagacataaatgacaataggtccgacttgccttgtggctatgaagccgaagatcaggctaagctgtttcctctgcaccaagaaacggctgcgtcctag

SEQ ID NO: 151553 - DNA, 381 bp, Artificial Sequence
  derived and/or modified sequence
aagagcagcggaaaaagaggtcactctgcccaaattgccaaacctgtcagacccggtcactatcccgcttcttctccaacaaatccctacgggacccgatcccccgagtgcatatcatacactaatagtttgttccaaaattaccaaaacctgtaccttcaagcaaccccatcttctacctccgacatgtacttcgccaattcttgcactagctccggggcaacttcgagcggcggacctctagccagctaccaaaaagcaaacatggacaacggcaatgcaaccgacattaatgacaatcggagtgacctgccatgcgggtacgaggccgaagatcaggcgaaacttttcccgctccatcaagaaaccgccgcatcatag

SEQ ID NO: 151554 - DNA, 3099 bp, Artificial Sequence
  derived and/or modified sequence
atggccgagaccaacaacgagtgcagcatcaaggtgctgtgcagattcagacccctgaaccaggccgagatcctgagaggcgacaagttcatccccatcttccagggcgacgacagcgtggtgatcggcggcaagccctacgtgttcgacagagtgttcccccccaacaccacccaggagcaggtgtaccacgcctgcgccatgcagatcgtgaaggacgtgctggccggctacaacggcaccatcttcgcctacggccagaccagcagcggcaagacccacaccatggagggcaagctgcacgacccccagctgatgggcatcatccccagaatcgccagagacatcttcaaccacatctacagcatggacgagaacctggagttccacatcaaggtgagctacttcgagatctacctggacaagatcagagacctgctggacgtgaccaagaccaacctgagcgtgcacgaggacaagaacagagtgcccttcgtgaagggctgcaccgagagattcgtgagcagccccgaggagatcctggacgtgatcgacgagggcaagagcaacagacacgtggccgtgaccaacatgaacgagcacagcagcagaagccacagcatcttcctgatcaacatcaagcaggagaacatggagaccgagcagaagctgagcggcaagctgtacctggtggacctggccggcagcgagaaggtgagcaagaccggcgccgagggcgccgtgctggacgaggccaagaacatcaacaagagcctgagcgccctgggcaacgtgatcagcgccctggccgagggcaccaagagctacgtgccctacagagacagcaagatgaccagaatcctgcaggacagcctgggcggcaactgcagaaccaccatgttcatctgctgcagccccagcagctacaacgacgccgagaccaagagcaccctgatgttcggccagagagccaagaccatcaagaacaccgccagcgtgaacctggagctgaccgccgagcagtggaagaagaagtacgagaaggagaaggagaagaccaaggcccagaaggagaccatcgccaagctggaggccgagctgagcagatggagaaacggcgagaacgtgcccgagaccgagagactggccggcgaggaggccgccctgggcgccgagctgtgcgaggagacccccgtgaacgacaacagcagcatcgtggtgagaatcgcccccgaggagagacagaagtacgaggaggagatcagaagactgtacaagcagctggacgacaaggacgacgagatcaaccagcagagccagctgatcgagaagctgaagcagcagatgctggaccaggaggagctgctggtgagcaccagaggcgacaacgagaaggtgcagagagagctgagccacctgcagagcgagaacgacgccgccaaggacgaggtgaaggaggtgctgcaggccctggaggagctggccgtgaactacgaccagaagagccaggaggtggaggagaagagccagcagaaccagctgctggtggacgagctgagccagaaggtggccaccatgctgagcctggagagcgagctgcagagactgcaggaggtgagcggccaccagagaaagagaatcgccgaggtgctgaacggcctgatgaaggacctgagcgagttcagcgtgatcgtgggcaacggcgagatcaagctgcccgtggagatcagcggcgccatcgaggaggagttcaccgtggccagactgtacatcagcaagatcaagagcgaggtgaagagcgtggtgaagagatgcagacagctggagaacctgcaggtggagtgccacagaaagatggaggtgaccggcagagagctgagcagctgccagctgctgatcagccagcacgaggccaagatcagaagcctgaccgagtacatgcagagcgtggagctgaagaagagacacctggaggagagctacgacagcctgagcgacgagctggccaagctgcaggcccaggagaccgtgcacgaggtggccctgaaggacaaggagcccgacacccaggacgccgacgaggtgaagaaggccctggagctgcagatggagagccacagagaggcccaccacagacagctggccagactgagagacgagatcaacgagaagcagaagaccatcgacgagctgaaggacctgaaccagaagctgcagctggagctggagaagctgcaggccgactacgagaagctgaagagcgaggagcacgagaagagcaccaagctgcaggagctgaccttcctgtacgagagacacgagcagagcaagcaggacctgaagggcctggaggagaccgtggccagagagctgcagaccctgcacaacctgagaaagctgttcgtgcaggacgtgaccaccagagtgaagaagagcgccgagatggagcccgaggacagcggcggcatccacagccagaagcagaagatcagcttcctggagaacaacctggagcagctgaccaaggtgcacaagcagctggtgagagacaacgccgacctgagatgcgagctgcccaagctggagaagagactgagagccaccgccgagagagtgaaggccctggagggcgccctgaaggaggccaaggagggcgccatgaaggacaagagaagataccagcaggaggtggacagaatcaaggaggccgtgagatacaagagcagcggcaagagaggccacagcgcccagatcgccaagcccgtgagacccggccactaccccgccagcagccccaccaacccctacggcaccagaagccccgagtgcatcagctacaccaacagcctgttccagaactaccagaacctgtacctgcaggccacccccagcagcaccagcgacatgtacttcgccaacagctgcaccagcagcggcgccaccagcagcggcggccccctggccagctaccagaaggccaacatggacaacggcaacgccaccgacatcaacgacaacagaagcgacctgccctgcggctacgaggccgaggaccaggccaagctgttccccctgcaccaggagaccgccgccagctag

SEQ ID NO: 151555 - DNA, 381 bp, Artificial Sequence
  derived and/or modified sequence
aagagcagcggcaagagaggccacagcgcccagatcgccaagcccgtgagacccggccactaccccgccagcagccccaccaacccctacggcaccagaagccccgagtgcatcagctacaccaacagcctgttccagaactaccagaacctgtacctgcaggccacccccagcagcaccagcgacatgtacttcgccaacagctgcaccagcagcggcgccaccagcagcggcggccccctggccagctaccagaaggccaacatggacaacggcaacgccaccgacatcaacgacaacagaagcgacctgccctgcggctacgaggccgaggaccaggccaagctgttccccctgcaccaggagaccgccgccagctag

SEQ ID NO: 151556 - protein, 188 aa, Artificial Sequence [sequence omitted]

SEQ ID NO: 151557 - DNA, 567 bp, Artificial Sequence
  derived and/or modified sequence
atgaccgagtacaagctggtggtggtgggcgccggcggcgtgggcaagagcgccctgaccatccagctgatccagaaccacttcgtggacgagtacgaccccaccatcgaggacagctacagaaagcaggtggtgatcgacggcgagacctgcctgctggacatcctggacaccgccggccaggaggagtacagcgccatgagagaccagtacatgagaaccggcgagggcttcctgtgcgtgttcgccatcaacaacaccaagagcttcgaggacatccaccactacagagagcagatcaagagagtgaaggacagcgaggacgtgcccatggtgctggtgggcaacaagtgcgacctgcccagcagaaccgtggacaccaagcaggcccaggacctggccagaagctacggcatccccttcatcgagaccagcgccaagaccagacagggcgtggacgacgccttctacaccctggtgagagagatcagaaagcacaaggagaagatgagcaaggacggcaagaagaagaagaagaagagcaagaccaagtgcgtgatcatgtag

SEQ ID NO: 151558 - DNA, 567 bp, Artificial Sequence
  derived and/or modified sequence
atgactgaatacaaacttgtcgtcgtgggtgccggcggggtcggcaagagtgccctgactattcagctgatccagaatcactttgtggatgagtatgatcccacaatcgaggattcttaccggaagcaagtggtgattgacggagagacatgcctgctggacatcctcgatacagctggccaggaagagtactcagctatgcgggaccagtacatgcgaacaggtgaagggtttctctgcgtgttcgcgatcaataacacaaaatcttttgaggatattcaccactatcgagaacagattaagcgggtgaaggacagtgaagatgtcccaatggtactggtgggaaacaagtgtgatctgccatcacgcacggtggataccaagcaagcccaggatctcgccaggtcatatgggattccctttattgaaactagtgccaagactaggcagggagtagatgatgctttctataccttggtccgcgaaataagaaaacacaaggagaaaatgtctaaggacggcaagaagaagaaaaaaaagtctaagactaaatgcgtgattatgtag

SEQ ID NO: 151559 - DNA, 567 bp, Artificial Sequence
  derived and/or modified sequence
atgacagagtacaagctggtggtggtgggcgctgggggcgtgggcaagagcgccctgaccatccagctgatccagaaccactttgtggatgaatatgaccccaccattgaagattcctacaggaagcaggtggtgattgatggagagacctgcctgctggacatcctggacacagctggccaggaggagtacagcgccatgagggaccagtacatgaggactggagagggcttcctgtgtgtgtttgccatcaacaacaccaagagctttgaggacatccaccactaccgggagcagatcaagagggtgaaggacagtgaagatgtgcccatggtgctggtgggcaacaagtgtgacctgcccagcaggacagtggacaccaagcaggcccaggacctggcccggagctatggcatccccttcatcgagaccagcgccaagacccggcagggcgtggatgatgccttctacaccctggtgcgggagatcaggaagcacaaggagaagatgagcaaggatggcaagaagaagaagaagaagagcaagaccaagtgtgtgatcatgtag

SEQ ID NO: 151560 - DNA, 567 bp, Artificial Sequence
  derived and/or modified sequence
atgaccgagtacaagctggtggtggtgggcgccggcggcgtgggcaagagcgcactgacgatccagctgatccagaatcactttgtggacgaatatgatcccacgatcgaagatagctaccggaaacaggtcgtcatagatggcgaaacgtgcctgctggacatcttggacacagccggccaggaggaatactctgctatgcgcgatcagtacatgagaactggagaggggtttctgtgtgtatttgcgattaacaatacgaaaagcttcgaggatatccaccactacagggaacaaattaaacgtgtcaaagatagcgaagatgtaccaatggtccttgtggggaacaaatgtgacctgccgtcacgcactgtggacactaaacaggctcaggatctggctcggtcctatgggattccttttatcgaaacctcggccaagactagacagggcgtcgatgatgcgttctacaccctggttcgcgaaattaggaagcataaagaaaagatgtcaaaggacggcaaaaagaaaaagaaaaagtctaagaccaagtgtgtgataatgtag

SEQ ID NO: 151561 - DNA, 567 bp, Artificial Sequence
  derived and/or modified sequence
atgaccgaatacaaactggtcgtggtgggtgcaggtggtgtgggcaagtcagccctgaccatacagttgattcagaaccattttgtggacgagtatgatccgacaatcgaggacagttatcgcaaacaggtggtgatcgatggggaaacatgtctcctggatatactcgacactgccggtcaggaagagtatagcgctatgcgcgaccagtacatgaggacaggggaaggctttttgtgtgtcttcgcaatcaacaacaccaaatctttcgaagacatccaccactacagggagcaaataaaaagggtgaaagactcggaagacgtccccatggtgttggtgggcaataaatgtgatctgccctctcggacagtggacacaaaacaggcccaggatctggccagatcctacggcattcctttcattgaaacatcagccaagacccggcagggggtggatgatgccttctacacgctcgtcagggaaataaggaagcataaagagaaaatgtctaaagatggtaagaaaaagaagaagaagtccaaaaccaagtgtgtgattatgtag

SEQ ID NO: 151562 - DNA, 5765 bp, Artificial Sequence
  derived and/or modified sequence
tcctaggcggcggccgcggcggcggaggcagcagcggcggcggcagtggcggcggcgaaggtggcggcggctcggccagtactcccggcccccgccatttcggactgggagcgagcgcggcgcaggcactgaaggcggcggcggggccagaggctcagcggctcccaggtgcgggagagaggcctgctgaaaatgactgaatataaacttgtggtagttggagctggtggcgtaggcaagagtgccttgacgatacagctaattcagaatcattttgtggacgaatatgatccaacaatagaggattcctacaggaagcaagtagtaattgatggagaaacctgtctcttggatattctcgacacagcaggtcaagaggagtacagtgcaatgagggaccagtacatgaggactggggagggctttctttgtgtatttgccataaataatactaaatcatttgaagatattcaccattatagagaacaaattaaaagagttaaggactctgaagatgtacctatggtcctagtaggaaataaatgtgatttgccttctagaacagtagacacaaaacaggctcaggacttagcaagaagttatggaattccttttattgaaacatcagcaaagacaagacagggtgttgatgatgccttctatacattagttcgagaaattcgaaaacataaagaaaagatgagcaaagatggtaaaaagaagaaaaagaagtcaaagacaaagtgtgtaattatgtaaatacaatttgtacttttttcttaaggcatactagtacaagtggtaatttttgtacattacactaaattattagcatttgttttagcattacctaatttttttcctgctccatgcagactgttagcttttaccttaaatgcttattttaaaatgacagtggaagtttttttttcctctaagtgccagtattcccagagttttggtttttgaactagcaatgcctgtgaaaaagaaactgaatacctaagatttctgtcttggggcttttggtgcatgcagttgattacttcttatttttcttaccaattgtgaatgttggtgtgaaacaaattaatgaagcttttgaatcatccctattctgtgttttatctagtcacataaatggattaattactaatttcagttgagaccttctaattggtttttactgaaacattgagggaacacaaatttatgggcttcctgatgatgattcttctaggcatcatgtcctatagtttgtcatccctgatgaatgtaaagttacactgttcacaaaggttttgtctcctttccactgctattagtcatggtcactctccccaaaatattatattttttctataaaaagaaaaaaatggaaaaaaattacaaggcaatggaaactattataaggccatttccttttcacattagataaattactataaagactcctaatagcttttcctgttaaggcagacccagtatgaaatggggattattatagcaaccattttggggctatatttacatgctactaaatttttataataattgaaaagattttaacaagtataaaaaattctcataggaattaaatgtagtctccctgtgtcagactgctctttcatagtataactttaaatcttttcttcaacttgagtctttgaagatagttttaattctgcttgtgacattaaaagattatttgggccagttatagcttattaggtgttgaagagaccaaggttgcaaggccaggccctgtgtgaacctttgagctttcatagagagtttcacagcatggactgtgtccccacggtcatccagtgttgtcatgcattggttagtcaaaatggggagggactagggcagtttggatagctcaacaagatacaatctcactctgtggtggtcctgctgacaaatcaagagcattgcttttgtttcttaagaaaacaaactcttttttaaaaattacttttaaatattaactcaaaagttgagattttggggtggtggtgtgccaagacattaattttttttttaaacaatgaagtgaaaaagttttacaatctctaggtttggctagttctcttaacactggttaaattaacattgcataaacacttttcaagtctgatccatatttaataatgctttaaaataaaaataaaaacaatccttttgataaatttaaaatgttacttattttaaaataaatgaagtgagatggcatggtgaggtgaaagtatcactggactaggaagaaggtgacttaggttctagataggtgtcttttaggactctgattttgaggacatcacttactatccatttcttcatgttaaaagaagtcatctcaaactcttagttttttttttttacaactatgtaatttatattccatttacataaggatacacttatttgtcaagctcagcacaatctgtaaatttttaacctatgttacaccatcttcagtgccagtcttgggcaaaattgtgcaagaggtgaagtttatatttgaatatccattctcgttttaggactcttcttccatattagtgtcatcttgcctccctaccttccacatgccccatgacttgatgcagttttaatacttgtaattcccctaaccataagatttactgctgctgtggatatctccatgaagttttcccactgagtcacatcagaaatgccctacatcttatttcctcagggctcaagagaatctgacagataccataaagggatttgacctaatcactaattttcaggtggtggctgatgctttgaacatctctttgctgcccaatccattagcgacagtaggatttttcaaacctggtatgaatagacagaaccctatccagtggaaggagaatttaataaagatagtgctgaaagaattccttaggtaatctataactaggactactcctggtaacagtaatacattccattgttttagtaaccagaaatcttcatgcaatgaaaaatactttaattcatgaagcttactttttttttttggtgtcagagtctcgctcttgtcacccaggctggaatgcagtggcgccatctcagctcactgcaacctccatctcccaggttcaagcgattctcgtgcctcggcctcctgagtagctgggattacaggcgtgtgccactacactcaactaatttttgtatttttaggagagacggggtttcaccctgttggccaggctggtctcgaactcctgacctcaagtgattcacccaccttggcctcataaacctgttttgcagaactcatttattcagcaaatatttattgagtgcctaccagatgccagtcaccacacaaggcactgggtatatggtatccccaaacaagagacataatcccggtccttaggtagtgctagtgtggtctgtaatatcttactaaggcctttggtatacgacccagagataacacgatgcgtattttagttttgcaaagaaggggtttggtctctgtgccagctctataattgttttgctacgattccactgaaactcttcgatcaagctactttatgtaaatcacttcattgttttaaaggaataaacttgattatattgtttttttatttggcataactgtgattcttttaggacaattactgtacacattaaggtgtatgtcagatattcatattgacccaaatgtgtaatattccagttttctctgcataagtaattaaaatatacttaaaaattaatagttttatctgggtacaaataaacaggtgcctgaactagttcacagacaaggaaacttctatgtaaaaatcactatgatttctgaattgctatgtgaaactacagatctttggaacactgtttaggtagggtgttaagacttacacagtacctcgtttctacacagagaaagaaatggccatacttcaggaactgcagtgcttatgaggggatatttaggcctcttgaatttttgatgtagatgggcatttttttaaggtagtggttaattacctttatgtgaactttgaatggtttaacaaaagatttgtttttgtagagattttaaagggggagaattctagaaataaatgttacctaattattacagccttaaagacaaaaatccttgttgaagtttttttaaaaaaagctaaattacatagacttaggcattaacatgtttgtggaagaatatagcagacgtatattgtatcatttgagtgaatgttcccaagtaggcattctaggctctatttaactgagtcacactgcataggaatttagaacctaacttttataggttatcaaaactgttgtcaccattgcacaattttgtcctaatatatacatagaaactttgtggggcatgttaagttacagtttgcacaagttcatctcatttgtattccattgattttttttttcttctaaacattttttcttcaaacagtatataactttttttaggggatttttttttagacagcaaaaactatctgaagatttccatttgtcaaaaagtaatgatttcttgataattgtgtagtaatgttttttagaacccagcagttaccttaaagctgaatttatatttagtaacttctgtgttaatactggatagcatgaattctgcattgagaaactgaatagctgtcataaaatgaaactttctttctaaagaaagatactcacatgagttcttgaagaatagtcataactagattaagatctgtgttttagtttaatagtttgaagtgcctgtttgggataatgataggtaatttagatgaatttaggggaaaaaaaagttatctgcagatatgttgagggcccatctctccccccacacccccacagagctaactgggttacagtgttttatccgaaagtttccaattccactgtcttgtgttttcatgttgaaaatacttttgcatttttcctttgagtgccaatttcttactagtactatttcttaatgtaacatgtttacctggaatgtattttaactatttttgtatagtgtaaactgaaacatgcacattttgtacattgtgctttcttttgtgggacatatgcagtgtgatccagttgttttccatcatttggttgcgctgacctaggaatgttggtcatatcaaacattaaaaatgaccactcttttaattgaaattaacttttaaatgtttataggagtatgtgctgtgaagtgatctaaaatttgtaatatttttgtcatgaactgtactactcctaattattgtaatgtaataaaaatagttacagtgactatgagtgtgtatttattcatgaaatttgaactgtttgccccgaaatggatatggaatactttataagccatagacactatagtataccagtgaatcttttatgcagcttgttagaagtatcctttatttctaaaaggtgctgtggatattatgtaaaggcgtgtttgcttaaacttaaaaccatatttagaagtagatgcaaaacaaatctgcctttatgacaaaaaaataggataacattatttatttatttccttttatcaaagaaggtaattgatacacaacaggtgacttggttttaggcccaaaggtagcagcagcaacattaataatggaaataattgaatagttagttatgtatgttaatgccagtcaccagcaggctatttcaaggtcagaagtaatgactccatacatattatttatttctataactacatttaaatcattaccagg

SEQ ID NO: 151563 - protein, 1300 aa, Artificial Sequence
  derived and/or modified sequence
MEFYESAYFIVLIPSIVITVIFLFFWLFMKETLYDEVLAKQKREQKLIPTKTDKKKAEKKKNKKKEIQNGNLHESDSESVPRDFKLSDALAVEDDQVAPVPLNVVETSSSVRERKKKEKKQKPVLEEQVIKESDASKIPGKKVEPVPVTKQPTPPSEAAASKKKPGQKKSKNGSDDQDKKVETLMVPSKRQEALPLHQETKQESGSGKKKASSKKQKTENVFVDEPLIHATTYIPLMDNADSSPVVDKREVIDLLKPDQVEGIQKSGTKKLKTETDKENAEVKFKDFLLSLKTMMFSEDEALCVVDLLKEKSGVIQDALKKSSKGELTTLIHQLQEKDKLLAAVKEDAAATKDRCKQLTQEMMTEKERSNVVITRMKDRIGTLEKEHNVFQNKIHVSYQETQQMQMKFQQVREQMEAEIAHLKQENGILRDAVSNTTNQLESKQSAELNKLRQDYARLVNELTEKTGKLQQEEVQKKNAEQAATQLKVQLQEAERRWEEVQSYIRKRTAEHEAAQQDLQSKFVAKENEVQSLHSKLTDTLVSKQQLEQRLMQLMESEQKRVNKEESLQMQVQDILEQNEALKAQIQQFHSQIAAQTSASVLAEELHKVIAEKDKQIKQTEDSLASERDRLTSKEEELKDIQNMNFLLKAEVQKLQALANEQAAAAHELEKMQQSVYVKDDKIRLLEEQLQHEISNKMEEFKILNDQNKALKSEVQKLQTLVSEQPNKDVVEQMEKCIQEKDEKLKTVEELLETGLIQVATKEEELNAIRTENSSLTKEVQDLKAKQNDQVSFASLVEELKKVIHEKDGKIKSVEELLEAELLKVANKEKTVQDLKQEIKALKEEIGNVQLEKAQQLSITSKVQELQNLLKGKEEQMNTMKAVLEEKEKDLANTGKWLQDLQEENESLKAHVQEVAQHNLKEASSASQFEELEIVLKEKENELKRLEAMLKERESDLSSKTQLLQDVQDENKLFKSQIEQLKQQNYQQASSFPPHEELLKVISEREKEISGLWNELDSLKDAVEHQRKKNNERQQQVEAVELEAKEVLKKLFPKVSVPSNLSYGEWLHGFEKKAKECMAGTSGSEEVKVLEHKLKEADEMHTLLQLECEKYKSVLAETEGILQKLQRSVEQEENKWKVKVDESHKTIKQMQSSFTSSEQELERLRSENKDIENLRREREHLEMELEKAEMERSTYVTEVRELKAQLNETLTKLRTEQNERQKVAGDLHKAQQSLELIQSKIVKAAGDTTVIENSDVSPETESSEKETMSVSLNQTVTQLQQLLQAVNQQLTKEKEHYQVLE

SEQ ID NO: 151564 - DNA, 3903 bp, Artificial Sequence
  derived and/or modified sequence
atggaattctatgaaagcgcttatttcattgtacttatcccctccatcgtcattacagtaattttcctgttcttttggctgttcatgaaggagactctgtacgatgaggtgctagcaaagcagaagagggaacagaagcttattcccaccaagaccgacaaaaaaaaagcagaaaagaagaaaaacaaaaaaaaggaaatccagaatggaaacctgcacgaaagtgactcagaatccgttccacgcgacttcaagttgagcgatgctttagccgtggaggacgaccaggtcgctccagtaccactgaatgtcgtggaaactagcagctcagtgagggaaagaaaaaaaaaggagaaaaagcagaaacccgtgctggaagaacaggtgatcaaagagagtgatgcttctaagatccccggcaagaaggtggagccagtgcctgtgacgaagcagccaacacctccaagtgaggcagctgcgagtaagaaaaaacccggacagaaaaaaagtaagaatgggagtgacgatcaagacaagaaggtagagacactgatggttccgtcgaagcgccaggaggcacttcccctgcaccaggaaaccaagcaggaaagcggttccggcaaaaaaaaagcttcatccaaaaaacaaaagactgagaatgtgtttgtcgatgaacctctgattcacgcaacaacttatattccactcatggataacgccgattcctcccccgtggttgataaaagagaagtcatcgatctactcaagcccgatcaggtagaggggattcagaagagcggtaccaagaaactgaagaccgaaactgataaagaaaacgccgaagtgaagtttaaagattttctgcttagtctcaaaaccatgatgtttagcgaggacgaagcattgtgcgtggtcgacttgctgaaggagaaaagcggcgtgatccaagatgcactcaagaaatcttctaagggggaattgactactctaatccaccaactccaagagaaagataaactgctcgcagccgtgaaagaggacgccgccgcaaccaaggatcgttgcaagcagctaacacaggagatgatgacggaaaaagagaggtctaacgttgtcattacacgaatgaaagaccgtattggcaccctggagaaagaacataacgtgtttcagaacaagattcacgtgagttaccaggagacacagcagatgcaaatgaagttccagcaggtcagagagcagatggaggctgaaattgcacacttgaagcaggaaaatggtatcctgcgcgacgccgtgagcaacactacaaatcaactggagtccaaacagtccgctgagcttaataaactgaggcaggactatgccagactggtgaatgaactgaccgagaagacaggcaagctccagcaagaggaagtacagaagaagaacgcggaacaggcggctacccagcttaaagttcagctgcaagaagccgagcgacgatgggaagaggttcaaagctacatccggaaaagaactgccgagcatgaggcggcccagcaggatctccagtcaaaattcgttgccaaagaaaacgaagtgcagtcgctccacagcaaactgacagacaccctggttagtaagcagcagctggagcagcggctcatgcagctcatggagagcgaacaaaagagagtgaataaggaagagtcgttgcaaatgcaggtgcaggacatattggagcagaacgaggccctcaaagcacagatccaacaattccactcccaaattgccgcacagacctcagcatctgtgctcgccgaggagttacacaaggtcattgctgagaaagacaagcagataaaacagaccgaggactcactggcttcagaacgtgataggcttactagcaaggaggaagaactgaaggacatccagaacatgaattttcttctgaaagctgaagtgcaaaagctgcaggcgctggcgaacgagcaggccgcggcagctcatgaattggagaaaatgcagcagtcagtctacgtcaaagacgataagatccgtcttctggaagaacaattgcagcatgaaatttcaaataagatggaggagttcaagatcctgaacgaccagaacaaagctcttaaaagtgaagttcaaaagcttcaaactctggtcagcgagcaaccaaacaaagatgttgtggagcagatggaaaaatgcattcaggaaaaagacgaaaaattgaagacagttgaagaactattggagacaggtcttatccaggtggcaacaaaggaagaagaactgaacgccatccgtacggaaaattctagcctgacaaaggaggtgcaagatctgaaggcaaaacaaaacgaccaagtcagttttgcttcactagtggaggaattgaaaaaggtgattcacgaaaaggatggaaagatcaagtcagttgaggaactcctggaagccgagctgctcaaggtagctaataaggagaagactgttcaggatctgaaacaggaaataaaagcactgaaagaggagatcggaaacgtgcaactggaaaaagcgcagcagctgagtattactagcaaagtgcaggaactacagaaccttctcaagggaaaggaagagcaaatgaacactatgaaggccgtgctggaggaaaaagagaaagatctggccaacaccggcaaatggctgcaggacctgcaggaggaaaacgagtcgctcaaagcacatgtgcaagaggtggcccagcataatctgaaagaagcctccagcgccagccagttcgaggaacttgagattgtccttaaggagaaggagaacgagctaaagaggctggaggccatgcttaaagaaagggagtcggacctttcatcaaagacccagctgttgcaggacgtgcaggacgaaaacaagctgtttaaatcccagatcgagcagcttaaacagcagaactatcagcaagcatcttcttttccacctcatgaggaactgttgaaagtcattagtgagcgggagaaagagattagcgggttgtggaatgagcttgatagtctgaaagatgccgttgagcatcagcggaagaaaaacaacgaaagacagcagcaagtcgaagcagtggaacttgaagcaaaagaggttttgaaaaaactgtttccaaaagttagcgttccttccaacctgtcctatggtgagtggctgcacgggttcgaaaaaaaggccaaggagtgcatggcaggcaccagcgggtccgaggaggtcaaagtgttggagcataagctgaaggaagctgatgagatgcacactttgctgcagttagagtgcgagaaatataagtcagtattggccgaaacagagggtatcctgcagaagctgcagagatcagtcgagcaagaagagaacaaatggaaggttaaagtggatgagtcccacaagaccataaagcagatgcagtcttcttttacctcatcagagcaggagctggagagactcaggagtgagaacaaggatatcgagaacttaagaagggaacgcgagcacctggaaatggaactcgagaaggcggaaatggaacggtcgacctatgttactgaggtccgcgaactgaaggcccagctcaatgagaccctgacaaagttgcgaaccgaacagaatgagagacagaaggttgcaggagacctacataaagcccagcaatcactagagttaatccagagtaagatcgtcaaggccgccggagataccaccgttatcgagaactcggacgtttcgcccgagacagagtcgtctgagaaggaaacaatgtcagtctccctgaaccagacagtgacgcaacttcagcagctgttacaggctgtcaatcagcagcttacaaaggagaaagagcactatcaggtcctggaatag

SEQ ID NO: 151565 - DNA, 4449 bp, Artificial Sequence
  derived and/or modified sequence
gccgccgcgtcttcccggtctcctttcccggccgcacagggttttataggatcacattgacaaaagtaccatggagttttatgagtcagcatattttattgttcttattccttcaatagttattacagtaattttcctcttcttctggcttttcatgaaagaaacattatatgatgaagttcttgcaaaacagaaaagagaacaaaagcttattcctaccaaaacagataaaaagaaagcagaaaagaaaaagaataaaaagaaagaaatccagaatggaaacctccatgaatccgactctgagagtgtacctcgagactttaaattatcagatgctttggcagtagaagatgatcaagttgcacctgttccattgaatgtcgttgaaacttcaagtagtgttagggaaagaaaaaagaaggaaaagaaacaaaagcctgtgcttgaagagcaggtcatcaaagaaagtgacgcatcaaagattcctggcaaaaaagtagaacctgtcccagttactaaacagcccacccctccctctgaagcagctgcctcgaagaagaaaccagggcagaagaagtctaaaaatggaagcgatgaccaggataaaaaggtggaaactctcatggtaccatcaaaaaggcaagaagcattgcccctccaccaagagactaaacaagaaagtggatcagggaagaagaaagcttcatcaaagaaacaaaagacagaaaatgtcttcgtagatgaaccccttattcatgcaactacttatattcctttgatggataatgctgactcaagtcctgtggtagataagagagaggttattgatttgcttaaacctgaccaagtagaagggatccagaaatctgggactaaaaaactgaagaccgaaactgacaaagaaaatgctgaagtgaagtttaaagattttcttctgtccttgaagactatgatgttttctgaagatgaggctctttgtgttgtagacttgctaaaggagaagtctggtgtaatacaagatgctttaaagaagtcaagtaagggagaattgactacgcttatacatcagcttcaagaaaaggacaagttactcgctgctgtgaaggaagatgctgctgctacaaaggatcggtgtaagcagttaacccaggaaatgatgacagagaaagaaagaagcaatgtggttataacaaggatgaaagatcgaattggaacattagaaaaggaacataatgtatttcaaaacaaaatacatgtcagttatcaagagactcaacagatgcagatgaagtttcagcaagttcgtgagcagatggaggcagagatagctcacttgaagcaggaaaatggtatactgagagatgcagtcagcaacactacaaatcaactggaaagcaagcagtctgcagaactaaataaactacgccaggattatgctaggttggtgaatgagctgactgagaaaacaggaaagctacagcaagaggaagtccaaaagaagaatgctgagcaagcagctactcagttgaaggttcaactacaagaagctgagagaaggtgggaagaagttcagagctacatcaggaagagaacagcggaacatgaggcagcacagcaagatttacagagtaaatttgtggccaaagaaaatgaagtacagagtctgcatagtaagcttacagataccttggtatcaaaacaacagttggagcaaagactaatgcagttaatggaatcagagcagaaaagggtgaacaaagaagagtctctacaaatgcaggttcaggatattttggagcagaatgaggctttgaaagctcaaattcagcagttccattcccagatagcagcccagacctccgcttcagttctagcagaagaattacataaagtgattgcagaaaaggataagcagataaaacagactgaagattctttagcaagtgaacgtgatcgtttaacaagtaaagaagaggaacttaaggatatacagaatatgaatttcttattaaaagctgaagtgcagaaattacaggccctggcaaatgagcaggctgctgctgcacatgaattggagaagatgcaacaaagtgtttatgttaaagatgataaaataagattgctggaagagcaactacaacatgaaatttcaaacaaaatggaagaatttaagattctaaatgaccaaaacaaagcattaaaatcagaagttcagaagctacagactcttgtttctgaacagcctaataaggatgttgtggaacaaatggaaaaatgcattcaagaaaaagatgagaagttaaagactgtggaagaattacttgaaactggacttattcaggtggcaactaaagaagaggagctgaatgcaataagaacagaaaattcatctctgacaaaagaagttcaagacttaaaagctaagcaaaatgatcaggtttcttttgcctctctagttgaagaacttaagaaagtgatccatgagaaagatggaaagatcaagtctgtagaagagcttctggaggcagaacttctcaaagttgctaacaaggagaaaactgttcaggatttgaaacaggaaataaaggctctaaaagaagaaataggaaatgtccagcttgaaaaggctcaacagttatctatcacttccaaagttcaggagcttcagaacttattaaaaggaaaagaggaacagatgaataccatgaaggctgttttggaagagaaagagaaagacctagccaatacagggaagtggttacaggatcttcaagaagaaaatgaatctttaaaagcacatgttcaggaagtagcacaacataacttgaaagaggcctcttctgcatcacagtttgaagaacttgagattgtgttgaaagaaaaggaaaatgaattgaagaggttagaagccatgctaaaagagagggagagtgatctttctagcaaaacacagctgttacaggatgtacaagatgaaaacaaattgtttaagtcccaaattgagcagcttaaacaacaaaactaccaacaggcatcttcttttccccctcatgaagaattattaaaagtaatttcagaaagagagaaagaaataagtggtctctggaatgagttagattctttgaaggatgcagttgaacaccagaggaagaaaaacaatgaaaggcagcaacaggtggaagctgttgagttggaggctaaagaagttctcaaaaaattatttccaaaggtgtctgtcccttctaatttgagttatggtgaatggttgcatggatttgaaaaaaaggcaaaagaatgtatggctggaacttcagggtcagaggaggttaaggttctagagcacaagttgaaagaagctgatgaaatgcacacattgttacagctagagtgtgaaaaatacaaatccgtccttgcagaaacagaaggaattttacagaagctacagagaagtgttgagcaagaagaaaataaatggaaagttaaggtcgatgaatcacacaagactattaaacagatgcagtcatcatttacatcttcagaacaagagctagagcgattaagaagcgaaaataaggatattgaaaatctgagaagagaacgagaacatttggaaatggaactagaaaaggcagagatggaacgatctacctatgttacagaagtcagagagttgaaggcacagttaaatgaaacactcacaaaacttagaactgaacaaaatgaaagacagaaggtagctggtgatttgcataaggctcaacagtcactggagcttatccagtcaaaaatagtaaaagctgctggagacactactgttattgaaaatagtgatgtttccccagaaacggagtcttctgagaaggagacaatgtctgtaagtctaaatcagactgtaacacagttacagcagttgcttcaggcggtaaaccaacagctcacaaaggagaaagagcactaccaggtgttagagtgaagtaattgggaaactgttcatttgaggataaaaaaggcattgtattatattttgccaaattaaagccttatttatgttttcaccctttctactttgtcagaaacactgaacagagttttgtcttttctaatccttgttagactactgatttaaagaaggaaaaaaaaaagccaactctgtagacaccttcagagtttagttttataataaaaactgtttgaataattagacctttacattcctgaagataaacatgtaatcttttatcttattttgctcaataaaattgttcagaagatcaaagtggtaaagacaatgtaaaatttaacattttaatactgatgttgtacactgttttacttaacattttgggaagtaactgcctctgacttcaactcaagaaaacacttttttgttgctaatgtaatcggtttttgtaatggcgtcagcaaataaaaggatgcttattattcaaa

SEQ ID NO: 151566 - DNA, 3903 bp, Artificial Sequence
  derived and/or modified sequence
atggagttctatgagagcgcctacttcatcgtgctgatccccagcatcgtcatcaccgtcatcttcctgttcttctggctgttcatgaaggagaccctgtatgatgaggtgctggccaagcagaagcgggagcagaagctgatccccaccaagacagacaagaagaaggccgagaagaagaagaacaagaagaaggagatccagaatggaaacctgcatgaaagtgacagcgagagcgtgccccgggacttcaagctgagtgatgccctggccgtggaggatgaccaggtggcccctgtgcccctgaatgtggtggagaccagcagctctgtgcgggagaggaagaagaaggagaagaagcagaagcctgtgctggaggagcaggtgatcaaggagagtgatgccagcaagatccctgggaagaaggtggagcctgtgcctgtgaccaagcagcccaccccacccagcgaggccgccgccagcaagaagaagccaggccagaagaagagcaagaatggaagtgatgaccaggacaagaaggtggagaccctgatggtgcccagcaagaggcaggaggccctgcccctgcaccaggagaccaagcaggagagcggcagcggcaagaagaaggccagcagcaagaagcagaagacagaaaatgtgtttgtggatgagcccctcatccacgccaccacctacatccccctgatggacaatgctgacagcagccctgtggtggacaagcgggaggtgattgacctgctgaagccagaccaggtggagggcatccagaagagcggcaccaagaagctgaagacagaaacagacaaggaaaatgctgaggtgaagttcaaggacttcctgctgagcctgaagaccatgatgttttctgaagatgaggccctgtgtgtggtggacctgctgaaggagaagagcggggtcatccaggatgccctgaagaagagcagcaagggggagctgaccaccctcatccaccagctgcaggagaaggacaagctgctggccgctgtgaaggaggatgctgctgccaccaaggaccgctgcaagcagctgacccaggagatgatgacagagaaggagaggagcaatgtggtgatcaccaggatgaaggaccgcatcggcaccctggagaaggagcacaacgtgttccagaacaagatccacgtgtcctaccaggagacccagcagatgcagatgaagttccagcaggtgcgggagcagatggaggccgagatcgcccacctgaagcaggagaatggcatcctgagagatgctgtgagcaacaccaccaaccagctggagagcaagcagagcgctgagctgaacaagctgcggcaggactatgcccggctggtgaatgagctgacagagaagacaggcaagctgcagcaggaggaggtgcagaagaagaatgctgagcaggccgccacccagctgaaggtgcagctgcaggaggccgagcggcgctgggaggaggtgcagagctacatcaggaagaggacagctgagcatgaagctgcccagcaggacctgcagagcaagtttgtggccaaggaaaatgaggtgcagagcctgcacagcaagctgacagacaccctggtgtccaagcagcagctggagcagaggctgatgcagctgatggagagcgagcagaagagggtgaacaaggaggagagcctgcagatgcaggtgcaggacatcctggagcagaatgaggccctgaaggcccagatccagcagttccacagccagattgctgcccagaccagcgcctctgtgctggccgaggagctgcacaaggtgattgctgagaaggacaagcagatcaagcagacagaggacagcctggccagcgagcgggaccggctgaccagcaaggaggaggagctgaaggacatccagaacatgaacttcctgctgaaggccgaggtgcagaagctgcaggccctggccaatgagcaggccgccgccgcccacgagctggagaagatgcagcagagcgtgtatgtgaaggatgacaagatccggctgctggaggagcagctgcagcacgagatcagcaacaagatggaggagttcaagatcctgaatgaccagaacaaggccctgaagtctgaggtgcagaagctgcagaccctggtgtctgagcagcccaacaaggatgtggtggagcagatggagaagtgcatccaggagaaggatgagaagctgaagacagtggaggagctgctggagaccggcctcatccaggtggccaccaaggaggaggagctgaatgccatcagaacagagaacagcagcctgaccaaggaggtgcaggacctgaaggccaagcagaatgaccaggtgtcctttgccagcctggtggaggagctgaagaaggtgatccacgagaaggatggcaagatcaagtctgtggaggagctgctggaggccgagctgctgaaggtggccaacaaggagaagacagtgcaggacctgaagcaggagatcaaggccctgaaggaggagattggaaatgtgcagctggagaaggcccagcagctgagcatcaccagcaaggtgcaggagctgcagaacctgctgaagggcaaggaggagcagatgaacaccatgaaggctgtgctggaggagaaggagaaggacctggccaacacaggcaagtggctgcaggacctgcaggaggagaatgaaagcctgaaggcccacgtgcaggaggtggcccagcacaacctgaaggaggccagcagcgccagccagtttgaggagctggagatcgtgctgaaggagaaggaaaatgagctgaagaggctggaggccatgctgaaggagcgggagagtgacctgagcagcaagacccagctgctgcaggatgtgcaggatgagaacaagctgttcaagagccagatcgagcagctgaagcagcagaactaccagcaggccagcagcttcccccctcatgaggagctgctgaaggtgatcagcgagcgggagaaggagatcagcggcctgtggaatgagctggacagcctgaaggatgctgtggagcaccagaggaagaagaacaatgaaaggcagcagcaggtggaggccgtggagctggaggccaaggaggtgctgaagaagctgttccccaaggtgtctgtgcccagcaacctgtcctatggagagtggctgcacggctttgagaagaaggccaaggagtgcatggccggcaccagcggcagcgaggaggtgaaggtgctggagcacaagctgaaggaggctgatgagatgcacaccctgctgcagctggagtgtgagaagtacaagtctgtgctggccgagacagagggcatcctgcagaagctgcagaggtctgtggagcaggaggagaacaagtggaaggtgaaggtggatgagagccacaagaccatcaagcagatgcagagcagcttcaccagcagcgagcaggagctggagcggctgcggtctgagaacaaggacatcgagaacctgcggcgggagcgggagcacctggagatggagctggagaaggccgagatggagaggagcacctacgtgacagaggtgcgggagctgaaggcccagctgaatgagaccctgaccaagctgaggacagagcagaatgaaaggcagaaggtggccggggacctgcacaaggcccagcagagcctggagctgatccagagcaagatcgtgaaggccgccggggacaccaccgtgattgaaaattctgatgtgtccccagagacagagagcagcgagaaggagaccatgtctgtgtccctgaaccagacagtgacccagctgcagcagctgctgcaggccgtgaaccagcagctgaccaaggagaaggagcactaccaggtgctggagtag

SEQ ID NO: 151567 - DNA, 3903 bp, Artificial Sequence
  derived and/or modified sequence
atggagttctacgagagcgcctacttcatcgtgctgatccccagcatcgtgattaccgtcatcttcctgtttttttggctttttatgaaggaaaccctctacgatgaggtgcttgctaagcagaagcgggaacaaaaacttatccccaccaaaacggataaaaaaaaggctgaaaaaaagaaaaacaagaagaaagaaatccagaacgggaaccttcatgagagtgactctgagagcgtgcctcgggactttaaactgtcagacgccctggccgtggaagacgaccaggttgcaccagtcccactcaatgttgtcgaaaccagttctagcgttagggaacgcaaaaagaaagagaaaaagcagaaacctgtgctggaggagcaggtcattaaagagtcagacgcatccaaaattcctggtaaaaaagtagagccagttcctgtgactaagcagccaacccctcccagtgaagctgccgcaagcaaaaaaaagcccgggcagaaaaaaagtaaaaatggaagcgatgaccaggataagaaagtagagacactgatggtaccctcaaagcggcaagaggccctcccactgcaccaagaaacaaagcaggaatccggttccggcaagaaaaaggcctctagcaagaagcagaagacggagaatgtctttgtggatgaaccactcattcatgccacgacatacattccactgatggataacgctgatagttcacccgttgtagacaagcgggaggtgatcgacctgctgaagcctgaccaggttgagggaattcaaaaaagcgggactaaaaaactcaaaacagagacagacaaggaaaacgccgaagttaagtttaaagattttctcctgtcattaaagaccatgatgttctccgaggacgaggccctgtgtgttgttgacttgctgaaagagaagtcaggcgtaattcaggatgccctgaagaaatcaagtaagggcgagttgaccactcttatacaccagctgcaagagaaagacaaactgctcgctgcggtcaaagaagacgccgctgctacaaaagacaggtgtaagcagctaacccaggaaatgatgacggaaaaggaacgatccaacgtggtcatcactcgaatgaaggatagaattggcactctggaaaaggaacataacgtgtttcagaacaaaattcacgtgagttaccaggaaacccaacagatgcagatgaaattccagcaggtgcgcgagcagatggaagccgagatagcgcatctcaagcaggaaaacgggattctgcgggacgccgtcagtaacaccaccaaccaactggaaagcaagcaatccgcagaactcaacaagctcagacaggactacgcccgcctggtcaacgagctgactgagaaaaccgggaaactgcagcaagaggaggtccagaagaaaaacgctgaacaggcagccacccagttgaaggtgcaattgcaagaggccgaacgcagatgggaagaggtccagagttatataaggaaaaggactgccgagcatgaagccgctcagcaagacctccagtccaaattcgtggcaaaggaaaacgaggttcagtccctgcactctaagcttacagacacactcgtgtccaagcaacagctggagcagcgcctgatgcagcttatggaaagcgagcaaaagcgtgtgaataaagaagaatcgctccagatgcaggttcaggacatcctagaacagaacgaagcactcaaagcacaaattcagcaattccacagccaaatcgccgcacagaccagcgccagtgtgctcgcggaggagttacacaaggtgatcgctgaaaaagataaacagataaagcagacagaagatagcctcgcttcagaaagggatcgcctcaccagcaaagaagaggagctgaaggacatccagaatatgaatttccttttgaaagccgaggttcagaagctccaagccctcgcaaacgagcaggctgctgctgctcacgagcttgagaagatgcagcaatcagtgtacgtgaaagacgacaagatccggctcttggaagagcagcttcagcatgaaatttcgaacaagatggaagaattcaagatcctcaacgaccaaaacaaagctctgaagagtgaagtccagaaactgcagaccctggtgagcgaacagccaaacaaagatgtggtggagcagatggagaaatgtatacaagaaaaagacgaaaaactgaagacagtggaggagcttctggagactggccttatccaagtggccacaaaggaggaggaactaaacgcgatccgcacagagaattctagtttgacgaaggaggttcaggatctgaaggcgaagcagaatgatcaggtaagcttcgccagcctagtggaagaacttaagaaggtaatccacgagaaggacggaaagatcaagtccgttgaagagctgctcgaggctgaacttctcaaggttgcaaacaaagagaaaacggtccaggatctgaaacaggagattaaagcccttaaggaggagatcggcaacgtgcagctcgaaaaagcacagcagctctcgataacaagcaaagtgcaggagctgcagaacctcttaaagggaaaggaagaacaaatgaataccatgaaggccgtgttggaagagaaggagaaagacctggctaatactggaaaatggctgcaggatcttcaggaggagaacgagtctctgaaggcccatgtccaagaggtagctcagcataatttgaaggaagcctcatccgcctcgcaatttgaagaactcgaaatcgtgttaaaggaaaaagagaatgagctcaagcgtctggaggccatgctgaaagagagagagtccgatctgagctccaagacccagctcttacaggacgtccaggacgagaataaactgtttaaatcccaaattgagcagcttaaacaacaaaactaccaacaagccagtagctttcccccacacgaggagctgctaaaggtaataagcgaacgtgaaaaagaaatctctggactgtggaacgagttggatagtctgaaggacgcagtcgaacatcaacgcaagaaaaacaacgagcgacagcagcaggtggaggcggtggaactcgaggctaaggaagttttaaaaaagctgtttcccaaagttagcgttccgagcaatctttcatatggcgagtggcttcatggctttgaaaaaaaggctaaagaatgtatggccggaacttcggggtccgaggaggtcaaggtactcgagcacaagttgaaagaggcagatgagatgcatactttgctacagctggagtgtgagaagtataaatcagtgctggccgaaaccgagggcattctccagaaactgcaacggtccgtcgagcaagaagaaaacaaatggaaagtcaaagtagacgagagtcataagaccatcaaacaaatgcaaagtagctttacatccagtgagcaagagctggaacgtctcaggagcgagaacaaagatatagaaaatcttcggcgagagagggagcacctcgagatggaactcgaaaaagccgaaatggaacgaagtacatatgtgactgaggtgagagaactgaaggcgcagctgaacgagacactgacaaagctccggaccgaacagaacgagcggcagaaagttgccggagacttgcacaaggcgcagcagagcctggaactcatccaatccaaaattgtcaaggccgccggcgacaccaccgttatcgagaatagcgacgtttcgcccgagactgaaagctctgagaaagaaacaatgagcgtttcccttaaccagaccgtcacacagttacagcaactgctgcaagctgtgaatcagcagcttactaaggaaaaggaacactaccaagtattggagtag

SEQ ID NO: 151568 - DNA, 3903 bp, Artificial Sequence
  derived and/or modified sequence
atggagttctatgagtcagcttacttcatcgtgttaatcccctctatcgtaattactgttattttcctttttttctggctgtttatgaaggaaaccctgtacgacgaggttttagccaaacagaagcgagagcagaagctgatcccaacgaagacagataagaaaaaagccgagaaaaaaaaaaataaaaaaaaagagattcaaaacgggaacttgcatgaatccgattccgaatccgtgccaagagattttaagctctcagatgcactggccgtcgaagatgatcaggtggcacctgtgcccctgaatgtcgtagagacttcatcaagcgtacgggaacgcaagaagaaggagaagaaacagaagcccgttttggaggagcaggtgattaaagaaagcgacgcatctaagatccccggaaaaaaagttgagcccgtaccagtgacgaaacagcccaccccaccatctgaggctgccgctagcaagaagaaaccaggacagaaaaagtcgaaaaatggcagcgatgatcaggacaaaaaggtggagactctgatggttccatctaaacggcaggaagccttgccactgcaccaggaaaccaagcaggagtctggaagcggaaaaaaaaaagcatcctctaagaagcagaaaactgaaaacgttttcgttgatgaacctctgatccatgccacaacctacattcccctcatggacaacgcagattcctctcccgttgtcgataagcgagaggttatagatctgcttaagccagaccaggtcgagggaatccaaaaaagcggtaccaagaagctcaagacggaaaccgataaagaaaacgctgaggttaaatttaaggatttcctcctctccctgaaaacgatgatgttcagcgaggacgaggccctgtgtgttgtcgacctgctgaaagagaagtcaggcgtgattcaagatgcgctcaagaaatcctcaaagggggagctgaccacgcttatccaccagttacaggagaaagacaagctgctcgccgctgtgaaggaggacgcagccgctactaaggaccggtgcaaacagctgacccaggaaatgatgaccgagaaggagcgaagtaacgttgtgattacgcggatgaaggatcgaattggaaccttggagaaggaacacaatgtgtttcaaaacaaaattcatgtgtcctatcaggagacgcaacagatgcagatgaagtttcagcaagttcgcgagcaaatggaggcagagatcgcacaccttaaacaggagaacggcatcctgcgggacgccgttagtaatactactaaccagctggagtctaaacagtccgctgaactgaacaagctgcgtcaagactacgcgaggttagttaatgaactcactgaaaaaaccggtaaacttcagcaggaggaagtacaaaaaaaaaatgccgaacaagccgcaacgcagctgaaggtgcaattgcaggaagcagagaggcgatgggaggaagtgcagtcttacataagaaagaggactgcggaacatgaggccgctcagcaagatctgcagtccaagtttgtggccaaggaaaacgaggtgcagtctttgcattccaagcttacggacactctggtgagtaaacagcagttggagcagaggctgatgcaactgatggaatccgaacaaaagcgtgtcaataaggaggagtccctacagatgcaggtgcaggacattctggaacaaaatgaggctctcaaagcccagatccagcagttccacagtcagatcgcagctcagactagtgcaagtgttctagcagaggaactccacaaggtgatagccgagaaagataaacagattaagcagacagaggattcgctggcgtctgagcgggatcgattaacctctaaggaggaagagctcaaggacatacagaacatgaattttttgctgaaagccgaagtgcaaaaattgcaggccctagccaatgagcaggctgccgcagcccatgagttggagaaaatgcaacagagcgtgtacgttaaggatgacaaaattcggctgcttgaggagcagcttcagcatgagattagtaataagatggaagagtttaagattctgaacgatcagaataaagccctcaagagtgaagttcaaaagctccagactctggtcagtgaacagccgaataaggacgttgtcgagcagatggagaagtgcattcaggagaaggacgaaaaactcaagactgtggaagaactcctggaaacagggctcatccaggtggccacgaaagaagaagaattaaatgcaattcggacagagaactcgtccctcaccaaggaggtgcaagatctgaaagccaaacagaacgaccaagtctctttcgccagccttgttgaggaattgaagaaggtgattcacgagaaagacggtaagattaaaagcgtcgaagaactactggaggcagaacttctgaaagtggccaataaagagaaaaccgtgcaggacctgaaacaggagataaaggcgcttaaggaggagatcgggaacgtgcagttggagaaggcacagcagctttccatcacctctaaagtgcaagagctgcagaatctcctgaagggaaaagaggaacagatgaacacaatgaaggccgtccttgaggaaaaggaaaaagatctggccaataccgggaaatggctgcaggatctgcaagaagaaaatgaatcactcaaggcacatgtccaggaagtggctcaacataatctgaaagaggcatcatctgcatcacagtttgaagaacttgaaatagtgcttaaagagaaagagaacgagctgaagaggctcgaggccatgcttaaagaacgcgagtctgatttgtcttcaaaaacacagctgctacaggacgtgcaggatgaaaacaagctcttcaagagccaaatcgaacaactcaagcagcaaaattaccagcaagccagctcctttccacctcacgaagaactcctgaaagtgatatctgagagagaaaaggagatcagtgggctctggaacgagctggactccctgaaggacgccgtggagcaccagagaaaaaagaacaacgaacgtcagcagcaggtcgaggcagtcgaactggaagccaaggaagttttgaagaaactattcccaaaagtttctgttccaagcaatctgtcatacggtgagtggctccacgggttcgaaaagaaggccaaggagtgcatggctggtacatcgggatcagaagaagtgaaggtgctagagcataagcttaaagaagctgacgaaatgcacactctgttgcagctggaatgcgaaaagtacaaaagcgttctggcggagactgaggggatcttacagaagttgcaacggtcagttgagcaggaggagaataaatggaaggtgaaagtggatgaatcccataagacgatcaaacagatgcaatcaagctttacctctagcgagcaggaactcgagaggctgcgcagcgaaaacaaagacattgagaatctgcgcagagaaagagagcatctggaaatggaattagagaaggctgagatggagcggtctacttacgtgacagaagtcagggaactcaaggctcaactcaacgaaaccttaacaaaactgcggactgagcagaacgagcgccagaaggtggcgggagacctgcacaaggcacagcaatccttagaactgattcaaagtaaaattgtaaaggctgcaggcgatacaactgttatcgagaactctgatgtgtctccagagaccgaatcgtctgagaaggagaccatgtctgtttccctgaatcaaacggtgacccagctccagcagctactgcaggctgtgaatcagcagcttaccaaagagaaggaacactatcaagtgctggaatag

SEQ ID NO: 151569 - DNA, 3903 bp, Artificial Sequence
  derived and/or modified sequence
atggagttctacgagagcgcctacttcatcgtgctgatccccagcatcgtgatcaccgtgatcttcctgttcttctggctgttcatgaaggagaccctgtacgacgaggtgctggccaagcagaagagagagcagaagctgatccccaccaagaccgacaagaagaaggccgagaagaagaagaacaagaagaaggagatccagaacggcaacctgcacgagagcgacagcgagagcgtgcccagagacttcaagctgagcgacgccctggccgtggaggacgaccaggtggcccccgtgcccctgaacgtggtggagaccagcagcagcgtgagagagagaaagaagaaggagaagaagcagaagcccgtgctggaggagcaggtgatcaaggagagcgacgccagcaagatccccggcaagaaggtggagcccgtgcccgtgaccaagcagcccaccccccccagcgaggccgccgccagcaagaagaagcccggccagaagaagagcaagaacggcagcgacgaccaggacaagaaggtggagaccctgatggtgcccagcaagagacaggaggccctgcccctgcaccaggagaccaagcaggagagcggcagcggcaagaagaaggccagcagcaagaagcagaagaccgagaacgtgttcgtggacgagcccctgatccacgccaccacctacatccccctgatggacaacgccgacagcagccccgtggtggacaagagagaggtgatcgacctgctgaagcccgaccaggtggagggcatccagaagagcggcaccaagaagctgaagaccgagaccgacaaggagaacgccgaggtgaagttcaaggacttcctgctgagcctgaagaccatgatgttcagcgaggacgaggccctgtgcgtggtggacctgctgaaggagaagagcggcgtgatccaggacgccctgaagaagagcagcaagggcgagctgaccaccctgatccaccagctgcaggagaaggacaagctgctggccgccgtgaaggaggacgccgccgccaccaaggacagatgcaagcagctgacccaggagatgatgaccgagaaggagagaagcaacgtggtgatcaccagaatgaaggacagaatcggcaccctggagaaggagcacaacgtgttccagaacaagatccacgtgagctaccaggagacccagcagatgcagatgaagttccagcaggtgagagagcagatggaggccgagatcgcccacctgaagcaggagaacggcatcctgagagacgccgtgagcaacaccaccaaccagctggagagcaagcagagcgccgagctgaacaagctgagacaggactacgccagactggtgaacgagctgaccgagaagaccggcaagctgcagcaggaggaggtgcagaagaagaacgccgagcaggccgccacccagctgaaggtgcagctgcaggaggccgagagaagatgggaggaggtgcagagctacatcagaaagagaaccgccgagcacgaggccgcccagcaggacctgcagagcaagttcgtggccaaggagaacgaggtgcagagcctgcacagcaagctgaccgacaccctggtgagcaagcagcagctggagcagagactgatgcagctgatggagagcgagcagaagagagtgaacaaggaggagagcctgcagatgcaggtgcaggacatcctggagcagaacgaggccctgaaggcccagatccagcagttccacagccagatcgccgcccagaccagcgccagcgtgctggccgaggagctgcacaaggtgatcgccgagaaggacaagcagatcaagcagaccgaggacagcctggccagcgagagagacagactgaccagcaaggaggaggagctgaaggacatccagaacatgaacttcctgctgaaggccgaggtgcagaagctgcaggccctggccaacgagcaggccgccgccgcccacgagctggagaagatgcagcagagcgtgtacgtgaaggacgacaagatcagactgctggaggagcagctgcagcacgagatcagcaacaagatggaggagttcaagatcctgaacgaccagaacaaggccctgaagagcgaggtgcagaagctgcagaccctggtgagcgagcagcccaacaaggacgtggtggagcagatggagaagtgcatccaggagaaggacgagaagctgaagaccgtggaggagctgctggagaccggcctgatccaggtggccaccaaggaggaggagctgaacgccatcagaaccgagaacagcagcctgaccaaggaggtgcaggacctgaaggccaagcagaacgaccaggtgagcttcgccagcctggtggaggagctgaagaaggtgatccacgagaaggacggcaagatcaagagcgtggaggagctgctggaggccgagctgctgaaggtggccaacaaggagaagaccgtgcaggacctgaagcaggagatcaaggccctgaaggaggagatcggcaacgtgcagctggagaaggcccagcagctgagcatcaccagcaaggtgcaggagctgcagaacctgctgaagggcaaggaggagcagatgaacaccatgaaggccgtgctggaggagaaggagaaggacctggccaacaccggcaagtggctgcaggacctgcaggaggagaacgagagcctgaaggcccacgtgcaggaggtggcccagcacaacctgaaggaggccagcagcgccagccagttcgaggagctggagatcgtgctgaaggagaaggagaacgagctgaagagactggaggccatgctgaaggagagagagagcgacctgagcagcaagacccagctgctgcaggacgtgcaggacgagaacaagctgttcaagagccagatcgagcagctgaagcagcagaactaccagcaggccagcagcttccccccccacgaggagctgctgaaggtgatcagcgagagagagaaggagatcagcggcctgtggaacgagctggacagcctgaaggacgccgtggagcaccagagaaagaagaacaacgagagacagcagcaggtggaggccgtggagctggaggccaaggaggtgctgaagaagctgttccccaaggtgagcgtgcccagcaacctgagctacggcgagtggctgcacggcttcgagaagaaggccaaggagtgcatggccggcaccagcggcagcgaggaggtgaaggtgctggagcacaagctgaaggaggccgacgagatgcacaccctgctgcagctggagtgcgagaagtacaagagcgtgctggccgagaccgagggcatcctgcagaagctgcagagaagcgtggagcaggaggagaacaagtggaaggtgaaggtggacgagagccacaagaccatcaagcagatgcagagcagcttcaccagcagcgagcaggagctggagagactgagaagcgagaacaaggacatcgagaacctgagaagagagagagagcacctggagatggagctggagaaggccgagatggagagaagcacctacgtgaccgaggtgagagagctgaaggcccagctgaacgagaccctgaccaagctgagaaccgagcagaacgagagacagaaggtggccggcgacctgcacaaggcccagcagagcctggagctgatccagagcaagatcgtgaaggccgccggcgacaccaccgtgatcgagaacagcgacgtgagccccgagaccgagagcagcgagaaggagaccatgagcgtgagcctgaaccagaccgtgacccagctgcagcagctgctgcaggccgtgaaccagcagctgaccaaggagaaggagcactaccaggtgctggagtag

SEQ ID NO: 151570 - protein, 309 aa, Artificial Sequence
  derived and/or modified sequence
MSLEQRSLHCKPEEALEAQQEALGLVCVQAATSSSSPLVLGTLEEVPTAGSTDPPQSPQGASAFPTTINFTRQRQPSEGSSSREEEGPSTSCILESLFRAVITKKVADLVGFLLLKYRAREPVTKAEMLESVIKNYKHCFPEIFGKASESLQLVFGIDVKEADPTGHSYVLVTCLGLSYDGLLGDNQIMPKTGFLIIVLVMIAMEGGHAPEEEIWEELSVMEVYDGREHSAYGEPRKLLTQDLVQEKYLEYRQVPDSDPARYEFLWGPRALAETSYVKVLEYVIKVSARVRFFFPSLREAALREEEEGV

SEQ ID NO: 151571 - DNA, 930 bp, Artificial Sequence
  derived and/or modified sequence
atgagcctggagcagagaagcctgcactgcaagcccgaggaggccctggaggcccagcaggaggccctgggcctggtgtgcgtgcaggccgccaccagcagcagcagccccctggtgctgggcaccctggaggaggtgcccaccgccggcagcaccgaccccccccagagcccccagggcgccagcgccttccccaccaccatcaacttcaccagacagagacagcccagcgagggcagcagcagcagagaggaggagggccccagcaccagctgcatcctggagagcctgttcagagccgtgatcaccaagaaggtggccgacctggtgggcttcctgctgctgaagtacagagccagagagcccgtgaccaaggccgagatgctggagagcgtgatcaagaactacaagcactgcttccccgagatcttcggcaaggccagcgagagcctgcagctggtgttcggcatcgacgtgaaggaggccgaccccaccggccacagctacgtgctggtgacctgcctgggcctgagctacgacggcctgctgggcgacaaccagatcatgcccaagaccggcttcctgatcatcgtgctggtgatgatcgccatggagggcggccacgcccccgaggaggagatctgggaggagctgagcgtgatggaggtgtacgacggcagagagcacagcgcctacggcgagcccagaaagctgctgacccaggacctggtgcaggagaagtacctggagtacagacaggtgcccgacagcgaccccgccagatacgagttcctgtggggccccagagccctggccgagaccagctacgtgaaggtgctggagtacgtgatcaaggtgagcgccagagtgagattcttcttccccagcctgagagaggccgccctgagagaggaggaggagggcgtgtag

SEQ ID NO: 151572 - DNA, 930 bp, Artificial Sequence
  derived and/or modified sequence
atgtccctggaacaaagaagcctacactgtaaacctgaagaagcactggaagcacagcaggaagctctcggcttggtctgcgtccaggccgctacatcctcctctagtccccttgtactgggcactctggaagaggttcctacagcagggtctactgatcccccccagtctccgcagggcgcgagtgctttccccacaacaattaactttacgaggcagagacagccatcagagggttcgtccagcagagaagaagaggggccttccacctcttgcatcctggagtctctattccgcgcagttattacaaagaaagtggccgatctggtcggattcctcctcctaaagtatcgcgcccgcgaacccgtcacgaaggcagaaatgctggagagcgtgatcaaaaactataaacattgtttccctgagattttcggaaaagcatcagagtcactgcagttggttttcggaattgacgtgaaggaagcggatccaaccggccactcatacgtccttgtcacgtgtctggggctgagttatgatggcctcctgggcgacaatcaaatcatgcctaaaactgggtttctgattatagtgctcgtaatgatcgccatggaaggagggcacgctcctgaggaagagatatgggaggagctttcagtgatggaggtctacgatggtcgcgagcattccgcctacggagagccccggaagcttttaacacaggatctggttcaagaaaagtatttggagtataggcaagtgcccgactctgatcctgcccggtatgaatttctgtggggccctcgggcgttagctgaaacctcttatgtcaaagtgctggagtatgtgattaaggtttccgcaagggtccgattcttttttcccagcctccgagaggctgctctgagagaggaggaggaaggcgtatag

SEQ ID NO: 151573 - DNA, 930 bp, Artificial Sequence
  derived and/or modified sequence
atgagcctggagcagaggagcctgcactgcaagccagaggaggccctggaggcccagcaggaggccctgggcctggtgtgtgtgcaggccgccaccagcagcagcagccccctggtgctgggcaccctggaggaggtgcccacagctggcagcacagaccccccccagagcccccagggcgccagcgccttccccaccaccatcaacttcacccggcagaggcagcccagcgagggcagcagcagccgggaggaggagggccccagcaccagctgcatcctggagagcctcttccgggccgtcatcaccaagaaggtggccgacctggtgggcttcctgctgctgaagtaccgggcccgggagcctgtgaccaaggccgagatgctggagagcgtcatcaagaactacaagcactgcttccctgagatctttgggaaggccagcgagagcctgcagctggtgtttggaattgatgtgaaggaggccgaccccaccggccacagctatgtgctggtgacctgcctgggcctgtcctatgatggcctgctgggggacaaccagatcatgcccaagacaggcttcctgatcatcgtgctggtgatgattgccatggagggcggccacgcccctgaggaggagatctgggaggagctgtctgtgatggaggtgtatgatggccgggagcacagcgcctacggggagcccaggaagctgctgacccaggacctggtgcaggagaagtacctggagtaccggcaggtgcctgacagcgaccctgcccgctatgagttcctgtggggcccccgggccctggccgagaccagctatgtgaaggtgctggagtatgtgatcaaggtgtctgcccgggtgcgcttcttcttccccagcctgcgggaggccgccctgcgggaggaggaggagggcgtgtag

SEQ ID NO: 151574 - DNA, 1708 bp, Artificial Sequence
  derived and/or modified sequence
gagagaagcgaggtttccattctgagggacggcgtagagttcggccgaaggaacctgacccaggctctgtgaggaggcaaggttttcaggggacaggccaacccagaggacaggattccctggaggccacagaggagcaccaaggagaagatctgcctgtgggtcttcattgcccagctcctgcccacactcctgcctgctgccctgacgagagtcatcatgtctcttgagcagaggagtctgcactgcaagcctgaggaagcccttgaggcccaacaagaggccctgggcctggtgtgtgtgcaggctgccacctcctcctcctctcctctggtcctgggcaccctggaggaggtgcccactgctgggtcaacagatcctccccagagtcctcagggagcctccgcctttcccactaccatcaacttcactcgacagaggcaacccagtgagggttccagcagccgtgaagaggaggggccaagcacctcttgtatcctggagtccttgttccgagcagtaatcactaagaaggtggctgatttggttggttttctgctcctcaaatatcgagccagggagccagtcacaaaggcagaaatgctggagagtgtcatcaaaaattacaagcactgttttcctgagatcttcggcaaagcctctgagtccttgcagctggtctttggcattgacgtgaaggaagcagaccccaccggccactcctatgtccttgtcacctgcctaggtctctcctatgatggcctgctgggtgataatcagatcatgcccaagacaggcttcctgataattgtcctggtcatgattgcaatggagggcggccatgctcctgaggaggaaatctgggaggagctgagtgtgatggaggtgtatgatgggagggagcacagtgcctatggggagcccaggaagctgctcacccaagatttggtgcaggaaaagtacctggagtaccggcaggtgccggacagtgatcccgcacgctatgagttcctgtggggtccaagggccctcgctgaaaccagctatgtgaaagtccttgagtatgtgatcaaggtcagtgcaagagttcgctttttcttcccatccctgcgtgaagcagctttgagagaggaggaagagggagtctgagcatgagttgcagccaaggccagtgggagggggactgggccagtgcaccttccagggccgcgtccagcagcttcccctgcctcgtgtgacatgaggcccattcttcactctgaagagagcggtcagtgttctcagtagtaggtttctgttctattgggtgacttggagatttatctttgttctcttttggaattgttcaaatgtttttttttaagggatggttgaatgaacttcagcatccaagtttatgaatgacagcagtcacacagttctgtgtatatagtttaagggtaagagtcttgtgttttattcagattgggaaatccattctattttgtgaattgggataataacagcagtggaataagtacttagaaatgtgaaaaatgagcagtaaaatagatgagataaagaactaaagaaattaagagatagtcaattcttgccttatacctcagtctattctgtaaaatttttaaagatatatgcatacctggatttccttggcttctttgagaatgtaagagaaattaaatctgaataaagaattcttcctgtt

SEQ ID NO: 151575 - DNA, 930 bp, Artificial Sequence
  derived and/or modified sequence
atgagcctggagcagcggagcctgcactgcaagcccgaggaggccctagaagcccagcaggaagccctgggactggtctgcgttcaggccgctacgagctcctcgtcccccctggtcctggggacgctcgaagaagttcccacggcagggagcacagacccacctcaatctccacagggcgcttcagcgtttcccacaacaatcaattttaccagacaacggcagccctccgaggggtcatcttctcgtgaggaggagggaccctcaacctcctgtattctggagagcctgtttcgcgccgtgatcaccaaaaaggtggccgacttggtaggctttctgctcttaaagtaccgcgcaagagagcctgttactaaagccgagatgctggaatcagtaatcaagaactacaagcattgcttccctgagatcttcggtaaggcatccgagagtcttcagctggtatttggcatcgatgtcaaggaagctgaccctacgggccattcttatgtactggtcacgtgtctggggctctcttacgatggactgctcggagataatcagattatgccaaaaacaggcttcctgatcattgttctggtgatgattgctatggagggcggccacgccccggaagaagaaatctgggaagagttaagcgtgatggaggtttatgatggcagggagcacagcgcctatggtgaacctcgaaagctcttgacacaggaccttgtgcaagagaagtacctggaatatcggcaggtcccagactccgacccggcgcggtatgagtttctgtggggcccgcgtgccctggctgagacaagctacgtgaaagtgctggagtacgtcatcaaagtttcagctcgagttaggttcttctttccttcactacgggaggcagctttgcgcgaagaggaggaaggcgtgtag

SEQ ID NO: 151576 - DNA, 930 bp, Artificial Sequence
  derived and/or modified sequence
atgtcccttgagcagcgttcgttgcattgcaaaccagaggaggctcttgaggcccaacaggaagcgttaggactagtgtgtgtacaggccgcaaccagcagctcgtctcctcttgtgttgggtactttggaggaagtgcctacagctggttctacagaccccccacagagcccacagggcgctagtgccttccctaccacaatcaactttacacgccagagacagcccagtgagggatcttcttcccgagaagaggagggcccttccacctcttgtattcttgagtcgttgtttcgggctgtcatcacaaaaaaagtcgcagatcttgtgggattcctgttgttaaaatacagggcccgtgagcccgtgacgaaggcagaaatgttggaaagcgtcataaaaaattacaagcactgtttcccggaaatatttggcaaggcatcggagtccctgcagctggtgttcggcattgatgtaaaggaggccgatcccacaggacattcatatgtgctagtgacctgcctcggactttcttacgacggacttcttggtgacaaccagattatgcctaagaccggattcctaatcatcgtcctggtgatgatcgctatggaaggcggtcacgcaccagaggaggagatctgggaggagctgagcgtaatggaagtgtatgacggccgagagcactcagcctatggtgaaccaaggaagctgctgacccaagatctcgtccaggagaagtatctggagtatcgccaagtccctgattcagacccagcacgctacgagtttttgtgggggccacgggctttggccgagacgtcctacgtgaaggttctggaatatgtgataaaggtgagtgctcgggttcgattctttttcccttcacttcgtgaagctgccctccgggaagaagaagaaggggtctag

SEQ ID NO: 151577 - protein, 900 aa, Artificial Sequence
  derived and/or modified sequence
MRLFVSDGVPGCLPVLAAAGRARGRAEVLISTVGPEDCVVPFLTRPKVPVLQLDSGNYLFSTSAICRYFFLLSGWEQDDLTNQWLEWEATELQPALSAALYYLVVQGKKGEDVLGSVRRALTHIDHSLSRQNCPFLAGETESLADIVLWGALYPLLQDPAYLPEELSALHSWFQTLSTQEPCQRAAETVLKQQGVLALRPYLQKQPQPSPAEGRAVTNEPEEEELATLSEEEIAMAVTAWEKGLESLPPLRPQQNPVLPVAGERNVLITSALPYVNNVPHLGNIIGCVLSADVFARYSRLRQWNTLYLCGTDEYGTATETKALEEGLTPQEICDKYHIIHADIYRWFNISFDIFGRTTTPQQTKITQDIFQQLLKRGFVLQDTVEQLRCEHCARFLADRFVEGVCPFCGYEEARGDQCDKCGKLINAVELKKPQCKVCRSCPVVQSSQHLFLDLPKLEKRLEEWLGRTLPGSDWTPNAQFITRSWLRDGLKPRCITRDLKWGTPVPLEGFEDKVFYVWFDATIGYLSITANYTDQWERWWKNPEQVDLYQFMAKDNVPFHSLVFPCSALGAEDNYTLVSHLIATEYLNYEDGKFSKSRGVGVFGDMAQDTGIPADIWRFYLLYIRPEGQDSAFSWTDLLLKNNSELLNNLGNFINRAGMFVSKFFGGYVPEMVLTPDDQRLLAHVTLELQHYHQLLEKVRIRDALRSILTISRHGNQYIQVNEPWKRIKGSEADRQRAGTVTGLAVNIAALLSVMLQPYMPTVSATIQAQLQLPPPACSILLTNFLCTLPAGHQIGTVSPLFQKLENDQIESLRQRFGGGQAKTSPKPAVVETVTTAKPQQIQALMDEVTKQGNIVRELKAQKADKNEVAAEVAKLLDLKKQLAVAEGKPPEAPKGKKKK

SEQ ID NO: 151578 - protein, 635 aa, Artificial Sequence
  derived and/or modified sequence
MAVTAWEKGLESLPPLRPQQNPVLPVAGERNVLITSALPYVNNVPHLGNIIGCVLSADVFARYSRLRQWNTLYLCGTDEYGTATETKALEEGLTPQEICDKYHIIHADIYRWFNISFDIFGRTTTPQQTKITQDIFQQLLKRGFVLQDTVEQLRCEHCARFLADRFVEGVCPFCGYEEARGDQCDKCGKLINAVELKKPQCKVCRSCPVVQSSQHLFLDLPKLEKRLEEWLGRTLPGSDWTPNAQFITRSWLRDGLKPRCITRDLKWGTPVPLEGFEDKVFYVWFDATIGYLSITANYTDQWERWWKNPEQVDLYQFMAKDNVPFHSLVFPCSALGAEDNYTLVSHLIATEYLNYEDGKFSKSRGVGVFGDMAQDTGIPADIWRFYLLYIRPEGQDSAFSWTDLLLKNNSELLNNLGNFINRAGMFVSKFFGGYVPEMVLTPDDQRLLAHVTLELQHYHQLLEKVRIRDALRSILTISRHGNQYIQVNEPWKRIKGSEADRQRAGTVTGLAVNIAALLSVMLQPYMPTVSATIQAQLQLPPPACSILLTNFLCTLPAGHQIGTVSPLFQKLENDQIESLRQRFGGGQVRKLKAVPSLHNSHSITSLISLSSPHPSLFPSFGPAASSLTVFLSCLN

SEQ ID NO: 151579 - protein, 546 aa, Artificial Sequence
  derived and/or modified sequence
MRLFVSDGVPGCLPVLAAAGRARGRAEVLISTVGPEDCVVPFLTRPKVPVLQLDSGNYLFSTSAICRYFFLLSGWEQDDLTNQWLEWEATELQPALSAALYYLVVQGKKGEDVLGSVRRALTHIDHSLSRQNCPFLAGETESLADIVLWGALYPLLQDPAYLPEELSALHSWFQTLSTQEPCQRAAETVLKQQGVLALRPYLQKQPQPSPAEGRAVTNEPEEEELATLSEEEIAMAVTAWEKGLESLPPLRPQQNPVLPVAGERNVLITSALPYVNNVPHLGNIIGCVLSADVFARYSRLRQWNTLYLCGTDEYGTATETKALEEGLTPQEICDKYHIIHADIYRWFNISFDIFGRTTTPQQTKITQDIFQQLLKRGFVLQDTVEQLRCEHCARFLADRFVEGVCPFCGYEEARGDQCDKCGKLINAVELKKPQCKVCRSCPVVQSSQHLFLDLPKLEKRLEEWLGRTLPGSDWTPNAQFITRSWLRDGLKPRCITRDLKWGTPVPLEGFEDKVFYVWFDATIGYLSITANYTDQWERWWKNPEQP

SEQ ID NO: 151580 - DNA, 2703 bp, Artificial Sequence
  derived and/or modified sequence
atgaggctctttgtctccgacggcgtcccaggttgtcttcccgtcttagccgccgccgggcgggccaggggacgagccgaggtgttgatttctaccgtaggtcctgaggactgtgtggtcccattcttaactcgtccaaaggtgcccgtgcttcagctcgactcgggtaactatttattttctacatctgccatttgtaggtatttttttcttctgtcagggtgggaacaggatgacctgacgaaccagtggctggagtgggaggccacagagctgcaacctgcactgtcagctgccctctactacctggtggtgcaagggaaaaaaggtgaggatgtcctaggaagcgtccgcagagcactgactcatatagaccactctttgagccgccaaaattgcccgtttttggccggggaaaccgaatctttggccgacatcgtcttgtggggagctttataccccttgctgcaagaccctgcatacctgcccgaggaactgtccgccttgcactcttggtttcaaaccctatcaacgcaggaaccgtgccaacgcgcggccgagacagtgcttaagcagcagggtgtgctcgccctaaggccgtacctgcagaagcagccccagcctagtcctgcagaggggagggcggtgaccaacgaacctgaggaggaagaactggccacactgtccgaagaagagatagctatggccgtcaccgcttgggagaagggattggagagcctccctcctctgagaccacagcaaaacccggtcctgcctgtggctggcgagagaaatgtccttattacaagtgcactgccttacgtcaacaacgtaccgcatcttgggaacatcataggatgcgtgctcagtgccgacgtatttgcccgttacagcaggctgcgccagtggaatacattatacctatgcggcacagacgaatatggaactgccaccgagaccaaggctctggaagaaggacttacacctcaggaaatctgcgacaagtaccatattatccacgcagacatctataggtggtttaatattagcttcgatatatttggccgtacaactactccgcaacagaccaagatcactcaggacattttccaacagctcttaaagaggggattcgtgctccaggataccgtggagcagttgcggtgcgagcactgtgcaagatttttggctgaccggtttgtggaaggagtgtgtccattctgcggatacgaggaagctagaggggatcagtgtgacaaatgtggcaagttgatcaacgcggtggagctcaaaaaacctcagtgcaaagtatgccggagctgcccagttgtgcagtcttcacagcatctctttctggacctgcctaaactggagaaacgcctcgaggaatggctggggcggactttgccagggtccgactggaccccgaatgcacagttcatcacccggtcctggctccgggatggcctgaagcctaggtgtatcacccgggatctcaaatggggtacaccagtccctctggagggctttgaggacaaagtgttttatgtctggtttgacgctacaattggttacttatccataacagccaactataccgatcaatgggaacgctggtggaagaaccccgagcaggtggacctctatcagtttatggccaaagataatgtgccattccattctctggttttcccctgtagtgccctgggagcagaggataattatacactggtctcacatctgatcgccactgagtatttaaattacgaagacggaaagttctcgaaatctcgtggtgtaggggtttttggcgatatggcccaggataccggcattcccgcggacatatggaggttctatctgctgtacatccgccctgaggggcaagattctgccttctcttggacagaccttcttttaaagaataactctgagctgctgaataacctggggaacttcataaaccgagctggtatgttcgtgagtaaattctttggcgggtatgtgcctgagatggtccttacaccggacgatcagagactgctagcacacgtgaccctggagcttcaacactaccaccagcttctcgagaaagttagaattcgggatgcactgaggagcattctgacaatcagtagacacggtaaccaatacatccaggtcaacgagccctggaagcgaatcaaagggtcagaggccgacaggcagcgggccggaactgttaccggtctggccgtaaacattgccgctctgctttctgtgatgctccaaccctacatgccaactgtgtccgcgaccattcaggcccagctacaactcccacccccagcgtgctctattttactcaccaacttcctgtgtacgctgccagcagggcatcaaatcggaacagtctcccccctcttccaaaagctggagaacgatcagattgagtctctgagacaacgttttggcggcgggcaggcaaaaacatcccccaaaccagcagtggtggaaactgtaaccaccgccaaaccccagcaaatccaggctctgatggatgaagtgaccaagcagggaaatatcgtgcgcgagctgaaggcgcagaaggcggacaagaatgaggtagccgcggaagtggccaaacttttggatttaaagaagcagctggctgttgctgagggaaaaccacccgaggcacctaagggcaaaaaaaaaaagtag

SEQ ID NO: 151581 - DNA, 1908 bp, Artificial Sequence
  derived and/or modified sequence
atggccgttaccgcctgggagaaaggtttggaatcccttccaccgctgcgaccacagcagaaccctgtccttcctgtggccggcgaaaggaatgttttaattacgagtgccttgccatatgttaataatgtgcctcatttgggaaatatcatcgggtgcgtattgagtgccgatgttttcgcacgatatagccggctccggcagtggaacacgctgtatctttgcggtaccgacgagtacggaacagcaactgagaccaaagccctggaggaagggctaaccccacaggaaatttgcgacaaataccacatcattcacgctgacatttacagatggtttaacatcagtttcgacatcttcggacgcactacgaccccccagcagacgaagatcacccaggatattttccagcaactgttgaaaaggggattcgtgttgcaagacactgtcgagcaactccggtgcgagcactgtgcacgattcctggcagacagattcgttgagggggtatgccctttttgcggctacgaagaagctagaggtgaccagtgcgacaaatgcgggaagttaattaacgccgtcgaactaaagaaaccccagtgcaaagtttgtcggtcttgtcctgtcgtccagagcagccagcacttgtttctggacctacccaagctcgaaaagagattggaagagtggctgggcagaacactccccggaagcgactggactccaaacgcgcagttcataacccgatcttggctccgagatggcctcaaacctcgctgcatcacgagggacttgaaatggggaaccccagtccctctggaaggctttgaggacaaagtgttctacgtgtggtttgacgccacaataggttatctgagtattacggcgaattacacagaccaatgggagaggtggtggaagaatccagagcaggtcgatctgtatcaatttatggctaaagacaacgtgcccttccatagtttggtcttcccctgctcagctctgggcgccgaggacaactatactttggtgtcacatcttattgctaccgagtatcttaattatgaggatggcaaattcagtaagagtcggggtgtgggagtgttcggtgatatggctcaggatacgggtattcctgctgacatttggaggttctacttactgtacatacgtcctgaggggcaggattcagccttttcatggacagatctcctgctcaaaaacaacagtgaattactgaacaacttaggcaactttattaatagagccgggatgttcgtctctaagtttttcgggggctacgtccctgagatggtcttgacgccagacgatcagcgcctcttagcccacgtaaccctggagctgcagcactatcaccagctgctggaaaaggtgcggataagagatgctttgcggagcatactgaccatcagcagacatggcaaccagtacattcaggttaatgagccctggaaacgaattaaaggctcagaggctgaccgacaaagagcgggaactgtcactggcctggccgtgaatatcgccgccctgctgagcgtcatgctgcaaccatacatgccaactgtgtctgccacgatccaagcacagcttcaactgcccccacctgcatgctccattctcctgaccaattttctgtgcacgctgcccgcaggtcatcagatcggcacagtttccccactcttccagaagctagagaacgaccagattgaaagtctcagacagcggtttggaggcggccaggttagaaagctcaaagcagtaccttccctgcacaattcgcatagtatcacgtctttgatttccctcagcagcccccaccccagcctattcccaagtttcggccccgcagcaagttcactgacagtgttcctgtcctgccttaactag

SEQ ID NO: 151582 - DNA, 2703 bp, Artificial Sequence
  derived and/or modified sequence
atgaggctgtttgtgtctgatggagtgcccggctgcctgcctgtgctggccgctgctggccgggcccggggccgggcagaggtgctgatcagcacagtgggccctgaggactgtgtggtgcccttcctgacccggcccaaggtgcctgtgctgcagctggacagcggcaactacctgttcagcaccagcgccatctgccgctacttcttcctgctgagcggctgggagcaggatgacctgaccaaccagtggctggagtgggaggccacagagctgcagcctgccctgtctgctgccctgtactacctggtggtgcagggcaagaagggagaagatgtgctgggctctgtgcggcgggccctgacccacatcgaccacagcctgagccggcagaactgccccttcctggccggggagacagagagcctggccgacatcgtgctgtggggcgccctgtaccccctgctgcaggaccctgcctacctgcctgaggagctgagcgccctgcacagctggttccagaccctgagcacccaggagccctgccagagagctgctgagaccgtgctgaagcagcagggcgtgctggccctgcggccctacctgcagaagcagccccagcccagccctgctgagggccgggctgtgaccaatgaacctgaggaggaggagctggccaccctgtctgaggaggagatcgccatggctgtgacagcctgggagaagggcctggagagcctgccccccctgcggccccagcagaaccctgtgctgcctgtggccggggagagaaatgtgctgatcaccagcgccctgccctacgtgaacaacgtgccccacctgggcaacatcatcggctgtgtgctgtctgcagatgtgtttgcccgctacagccggctgcggcagtggaacaccctgtacctgtgtggcacagatgaatatggaacagccacagagaccaaggccctggaggagggcctgaccccccaggagatctgtgacaagtaccacatcatccatgctgacatctaccgctggttcaacatcagctttgacatcttcggccgcaccaccaccccccagcagaccaagatcacccaggacatcttccagcagctgctgaagaggggctttgtgctgcaggacacagtggagcagctgcgctgtgagcactgtgcccgcttcctggccgacagatttgtggagggcgtgtgccccttctgtggctatgaggaggcccggggggaccagtgtgacaagtgtgggaagctgatcaatgctgtggagctgaagaagccccagtgcaaggtgtgccgcagctgccctgtggtgcagagcagccagcacctgttcctggacctgcccaagctggagaagaggctggaggagtggctgggccgcaccctgcccggcagtgactggaccccaaatgcccagttcatcaccaggtcctggctgagagatggcctgaagccccgctgcatcacccgggacctgaagtggggcacccctgtgcccctggagggctttgaggacaaggtgttctacgtgtggtttgatgccaccatcggctacctgagcatcacagccaactacacagaccagtgggagcgctggtggaagaaccctgagcaggtggacctgtaccagttcatggccaaggacaacgtgcccttccacagcctggtgttcccctgcagcgccctgggcgctgaggacaactacaccctggtgagccacctgattgccacagagtacctgaactatgaagatggcaagttcagcaagagcagaggagtgggcgtgtttggagacatggcccaggacaccggcatcccagctgacatctggaggttctacctgctgtacatccggcctgagggccaggacagcgccttctcctggacagacctgctgctgaagaacaacagcgagctgctgaacaacctgggcaacttcatcaacagagctggcatgtttgtgtccaagttctttggaggctacgtgcctgagatggtgctgaccccagatgaccagaggctgctggcccacgtgaccctggagctgcagcactaccaccagctgctggagaaggtgcgcatcagagatgccctgcggagcatcctgaccatcagccgccacggcaaccagtacatccaggtgaatgagccctggaagaggatcaagggcagcgaggccgaccggcagagagctggcaccgtgacaggcctggccgtgaacattgctgccctgctgtctgtgatgctgcagccctacatgcccaccgtgtctgccaccatccaggcccagctgcagctgcccccaccagcctgcagcatcctgctgaccaacttcctgtgcaccctgcctgctggccaccagattggaacagtgagccccctcttccagaagctggagaatgaccagatcgagagcctgcggcagagatttggaggcggccaggccaagaccagccccaagccagctgtggtggagaccgtgaccacagccaagccccagcagatccaggccctgatggatgaggtgaccaagcagggcaacatcgtgcgggagctgaaggcccagaaggctgacaagaatgaggtggccgctgaggtggccaagctgctggacctgaagaagcagctggccgtggccgagggcaagcccccagaggcccccaagggcaagaagaagaagtag

SEQ ID NO: 151583 - DNA, 1908 bp, Artificial Sequence
  derived and/or modified sequence
atggctgtgacagcctgggagaagggcctggagagcctgccccccctgcggccccagcagaaccctgtgctgcctgtggccggggagagaaatgtgctgatcaccagcgccctgccctacgtgaacaacgtgccccacctgggcaacatcatcggctgtgtgctgtctgcagatgtgtttgcccgctacagccggctgcggcagtggaacaccctgtacctgtgtggcacagatgaatatggaacagccacagagaccaaggccctggaggagggcctgaccccccaggagatctgtgacaagtaccacatcatccatgctgacatctaccgctggttcaacatcagctttgacatcttcggccgcaccaccaccccccagcagaccaagatcacccaggacatcttccagcagctgctgaagaggggctttgtgctgcaggacacagtggagcagctgcgctgtgagcactgtgcccgcttcctggccgacagatttgtggagggcgtgtgccccttctgtggctatgaggaggcccggggggaccagtgtgacaagtgtgggaagctgatcaatgctgtggagctgaagaagccccagtgcaaggtgtgccgcagctgccctgtggtgcagagcagccagcacctgttcctggacctgcccaagctggagaagaggctggaggagtggctgggccgcaccctgcccggcagtgactggaccccaaatgcccagttcatcaccaggtcctggctgagagatggcctgaagccccgctgcatcacccgggacctgaagtggggcacccctgtgcccctggagggctttgaggacaaggtgttctacgtgtggtttgatgccaccatcggctacctgagcatcacagccaactacacagaccagtgggagcgctggtggaagaaccctgagcaggtggacctgtaccagttcatggccaaggacaacgtgcccttccacagcctggtgttcccctgcagcgccctgggcgctgaggacaactacaccctggtgagccacctgattgccacagagtacctgaactatgaagatggcaagttcagcaagagcagaggagtgggcgtgtttggagacatggcccaggacaccggcatcccagctgacatctggaggttctacctgctgtacatccggcctgagggccaggacagcgccttctcctggacagacctgctgctgaagaacaacagcgagctgctgaacaacctgggcaacttcatcaacagagctggcatgtttgtgtccaagttctttggaggctacgtgcctgagatggtgctgaccccagatgaccagaggctgctggcccacgtgaccctggagctgcagcactaccaccagctgctggagaaggtgcgcatcagagatgccctgcggagcatcctgaccatcagccgccacggcaaccagtacatccaggtgaatgagccctggaagaggatcaagggcagcgaggccgaccggcagagagctggcaccgtgacaggcctggccgtgaacattgctgccctgctgtctgtgatgctgcagccctacatgcccaccgtgtctgccaccatccaggcccagctgcagctgcccccaccagcctgcagcatcctgctgaccaacttcctgtgcaccctgcctgctggccaccagattggaacagtgagccccctcttccagaagctggagaatgaccagatcgagagcctgcggcagagatttggaggcggccaggtgaggaagctgaaggctgtgcccagcctgcacaacagccacagcatcaccagcctcatcagcctgagcagcccccaccccagcctcttccccagctttggacctgctgccagcagcctgaccgtcttcctgagctgcctgaactag

SEQ ID NO: 151584 - DNA, 2905 bp, Artificial Sequence
  derived and/or modified sequence
agtctactttccggtagcggtgccagggcagtggcctaatacggaactccatttcccggcgtgcctcgcggaggccgctgaactcagaagcgggaggccggttccggttgcatcagcgagggattcacggcgaaatgagactgttcgtgagtgatggcgtcccgggttgcttgccggtgctggccgccgccgggagagcccggggcagagcagaggtgctcatcagcactgtaggcccggaagattgtgtggtcccgttcctgacccggcctaaggtccctgtcttgcagctggatagcggcaactacctcttctccactagtgcaatctgccgatatttttttttgttatctggctgggagcaagatgacctcactaaccagtggctggaatgggaagcgacagagctgcagccagctttgtctgctgccctgtactatttagtggtccaaggcaagaagggggaagatgttcttggttcagtgcggagagccctgactcacattgaccacagcttgagtcgtcagaactgtcctttcctggctggggagacagaatctctagccgacattgttttgtggggagccctatacccattactgcaagatcccgcctacctccctgaggagctgagtgccctgcacagctggttccagacactgagtacccaggaaccatgtcagcgagctgcagagactgtactgaaacagcaaggtgtcctggctctccggccttacctccaaaagcagccccagcccagccccgctgagggaagggctgtcaccaatgagcctgaggaggaggagctggctaccctatctgaggaggagattgctatggctgttactgcttgggagaagggcctagaaagtttgcccccgctgcggccccagcagaatccagtgttgcctgtggctggagaaaggaatgtgctcatcaccagtgccctcccttacgtcaacaatgtcccccaccttgggaacatcattggttgtgtgctcagtgccgatgtctttgccaggtactctcgcctccgccagtggaacaccctctatctgtgtgggacagatgagtatggtacagcaacagagaccaaggctctggaggagggactaaccccccaggagatctgcgacaagtaccacatcatccatgctgacatctaccgctggtttaacatttcgtttgatatttttggtcgcaccaccactccacagcagaccaaaatcacccaggacattttccagcagttgctgaaacgaggttttgtgctgcaagatactgtggagcaactgcgatgtgagcactgtgctcgcttcctggctgaccgcttcgtggagggcgtgtgtcccttctgtggctatgaggaggctcggggtgaccagtgtgacaagtgtggcaagctcatcaatgctgtcgagcttaagaagcctcagtgtaaagtctgccgatcatgccctgtggtgcagtcgagccagcacctgtttctggacctgcctaagctggagaagcgactggaggagtggttggggaggacattgcctggcagtgactggacacccaatgcccagtttatcacccgttcttggcttcgggatggcctcaagccacgctgcataacccgagacctcaaatggggaacccctgtacccttagaaggttttgaagacaaggtattctatgtctggtttgatgccactattggctatctgtccatcacagccaactacacagaccagtgggagagatggtggaagaacccagagcaagtggacctgtatcagttcatggccaaagacaatgttcctttccatagcttagtctttccttgctcagccctaggagctgaggataactataccttggtcagccacctcattgctacagagtacctgaactatgaggatgggaaattctctaagagccgcggtgtgggagtgtttggggacatggcccaggacacggggatccctgctgacatctggcgcttctatctgctgtacattcggcctgagggccaggacagtgctttctcctggacggacctgctgctgaagaataattctgagctgcttaacaacctgggcaacttcatcaacagagctgggatgtttgtgtctaagttctttgggggctatgtgcctgagatggtgctcacccctgatgatcagcgcctgctggcccatgtcaccctggagctccagcactatcaccagctacttgagaaggttcggatccgggatgccttgcgcagtatcctcaccatatctcgacatggcaaccaatatattcaggtgaatgagccctggaagcggattaaaggcagtgaggctgacaggcaacgggcaggaacagtgactggcttggcagtgaatatagctgccttgctctctgtcatgcttcagccttacatgcccacggttagtgccacaatccaggcccagctgcagctcccacctccagcctgcagtatcctgctgacaaacttcctgtgtaccttaccagcaggacaccagattggcacagtcagtcccttgttccaaaaattggaaaatgaccagattgaaagtttaaggcagcgctttggagggggccaggcaaaaacgtccccgaagccagcagttgtagagactgttacaacagccaagccacagcagatacaagcgctgatggatgaagtgacaaaacaaggaaacattgtccgagaactgaaagcacaaaaggcagacaagaacgaggttgctgcggaggtggcgaaactcttggatctaaagaaacagttggctgtagctgaggggaaaccccctgaagcccctaaaggcaagaagaaaaagtaaaagaccttggctcatagaaagtcactttaatagatagggacagtaataaataaatgtacaatctctat

SEQ ID NO: 151585 - DNA, 2702 bp, Artificial Sequence
  derived and/or modified sequence
gcatcagcgagggattcacggcgaaatgagactgttcgtgagtgatggcgtcccgggttgcttgccggtgctggccgccgccgggagagcccggggcagagcagaggtgctcatcagcactgtaggcccggaagattgtgtggtcccgttcctgacccggcctaaggtccctgtcttgcagctggatagcggcaactacctcttctccactagtgcaatctgccgatatttttttttgttatctggctgggagcaagatgacctcactaaccagtggctggaatgggaagcgacagagctgcagccagctttgtctgctgccctgtactatttagtggtccaaggcaagaagggggaagatgttcttggttcagtgcggagagccctgactcacattgaccacagcttgagtcgtcagaactgtcctttcctggctgggaggagctgagtgccctgcacagctggttccagacactgagtacccaggaaccatgtcagcgagctgcagagactgtactgaaacagcaaggtgtcctggctctccggccttacctccaaaagcagccccagcccagccccgctgagggaagggctgtcaccaatgagcctgaggaggaggagctggctaccctatctgaggaggagattgctatggctgttactgcttgggagaagggcctagaaagtttgcccccgctgcggccccagcagaatccagtgttgcctgtggctggagaaaggaatgtgctcatcaccagtgccctcccttacgtcaacaatgtcccccaccttgggaacatcattggttgtgtgctcagtgccgatgtctttgccaggtactctcgcctccgccagtggaacaccctctatctgtgtgggacagatgagtatggtacagcaacagagaccaaggctctggaggagggactaaccccccaggagatctgcgacaagtaccacatcatccatgctgacatctaccgctggtttaacatttcgtttgatatttttggtcgcaccaccactccacagcagaccaaaatcacccaggacattttccagcagttgctgaaacgaggttttgtgctgcaagatactgtggagcaactgcgatgtgagcactgtgctcgcttcctggctgaccgcttcgtggagggcgtgtgtcccttctgtggctatgaggaggctcggggtgaccagtgtgacaagtgtggcaagctcatcaatgctgtcgagcttaagaagcctcagtgtaaagtctgccgatcatgccctgtggtgcagtcgagccagcacctgtttctggacctgcctaagctggagaagcgactggaggagtggttggggaggacattgcctggcagtgactggacacccaatgcccagtttatcacccgttcttggcttcgggatggcctcaagccacgctgcataacccgagacctcaaatggggaacccctgtacccttagaaggttttgaagacaaggtattctatgtctggtttgatgccactattggctatctgtccatcacagccaactacacagaccagtgggagagatggtggaagaacccagagcaagtggacctgtatcagttcatggccaaagacaatgttcctttccatagcttagtctttccttgctcagccctaggagctgaggataactataccttggtcagccacctcattgctacagagtacctgaactatgaggatgggaaattctctaagagccgcggtgtgggagtgtttggggacatggcccaggacacggggatccctgctgacatctggcgcttctatctgctgtacattcggcctgagggccaggacagtgctttctcctggacggacctgctgctgaagaataattctgagctgcttaacaacctgggcaacttcatcaacagagctgggatgtttgtgtctaagttctttgggggctatgtgcctgagatggtgctcacccctgatgatcagcgcctgctggcccatgtcaccctggagctccagcactatcaccagctacttgagaaggttcggatccgggatgccttgcgcagtatcctcaccatatctcgacatggcaaccaatatattcaggtgaatgagccctggaagcggattaaaggcagtgaggctgacaggcaacgggcaggaacagtgactggcttggcagtgaatatagctgccttgctctctgtcatgcttcagccttacatgcccacggttagtgccacaatccaggcccagctgcagctcccacctccagcctgcagtatcctgctgacaaacttcctgtgtaccttaccagcaggacaccagattggcacagtcagtcccttgttccaaaaattggaaaatgaccagattgaaagtttaaggcagcgctttggagggggccaggtgagaaagctaaaggctgtgccctcgctccacaacagccacagcatcacttccctaatttccctaagtagtcctcacccatcactctttccatcttttggccctgccgcttcctcacttacagtttttctttcctgtcttaactagaagagaccttcgacttaaaggtaaccactttccctctgagatgctgtataaaactggaggttaggggatatttatggttgctggtgataactttgttgttctccaggcaaaaacgtccccgaagccagcagttgtagagactg

SEQ ID NO: 151586 - DNA, 2703 bp, Artificial Sequence
  derived and/or modified sequence
atgcggctgttcgtgagcgacggcgtgcccggctgcctgcccgtgctcgcggcagcaggaagggcacgggggcgagccgaggtcctgattagcacagtgggaccggaggactgcgttgttccgttcctgacaagaccgaaggttccggtgcttcagttagacagcggcaactatcttttttctacatccgctatctgccggtacttttttcttctgtccggatgggagcaagatgatttgacgaatcagtggctcgagtgggaggctacagaactgcagcctgccctcagtgcagcactctactatctggtggtgcaggggaaaaaaggtgaagacgttctcggatccgtccggcgggccctgacccacatcgaccactcactttctagacaaaattgcccgttcctcgcaggtgaaactgagagcttagctgacattgtgttatggggggcactctatcccctgctccaagatcccgcatacctgcccgaggaactatccgccctgcacagttggttccaaacattgtcaactcaagagccgtgtcagcgcgcggccgagaccgtgctcaaacagcaaggggtcctggcccttagaccttatctgcagaagcagccacagcccagcccggctgaggggcgagcggtgaccaacgaacccgaagaagaggaattggccacgttaagcgaggaggaaatagctatggccgttaccgcctgggagaagggtctagaaagtctacctccacttaggcctcagcagaatcccgtgttgcccgtggctggagagcgaaatgtcttgattaccagtgccctgccctatgtcaataacgtgccacacctggggaacatcattggctgtgtgctctcagctgatgtgttcgccagatactcacgcctgagacagtggaatacactttatctgtgcgggaccgacgagtacggcaccgccaccgaaaccaaggcactggaagaaggcttaacaccgcaggaaatctgcgataagtatcacatcatccacgcagacatttatagatggttcaacatcagcttcgacatctttgggagaacaacaacgccccagcagaccaaaataacccaagatatttttcagcagttgctcaaacggggcttcgtgctgcaggacacagtcgaacagctcagatgcgaacactgcgcccgcttccttgccgataggtttgttgaaggggtttgtcctttctgcggctatgaagaagccagaggtgaccagtgcgacaaatgtggaaagttgatcaatgccgtcgagctgaagaagcctcagtgcaaggtgtgccggagctgccctgtcgtccaaagttctcaacatctgttcctcgaccttcctaagctggaaaaacgcctggaggagtggctgggccgaaccttgccaggcagtgattggaccccaaacgcacagtttattacccgcagttggctaagagacggtttaaaaccccgatgtattaccagagacctgaagtggggtaccccagtgcctctcgaagggtttgaggataaggttttctatgtgtggttcgatgcgaccataggctacctgagcatcaccgccaattacacggatcaatgggagcgatggtggaaaaaccccgagcaagtggatttatatcaattcatggccaaagacaacgtgccatttcacagtctggtctttccatgttcagccctgggggccgaggacaactacaccttggtctcccacctcattgctacagagtatctaaactatgaggacggtaaatttagcaagagtcgtggggttggggtgtttggagatatggcgcaggacaccggtatacccgccgacatctggcgcttctatcttctgtacatccggcccgaagggcaggatagcgcattcagctggactgaccttttgctgaagaacaactctgagctgctgaataacttgggcaacttcatcaatcgcgccgggatgtttgtttctaaattctttgggggctacgtgccggaaatggttctcactccagacgatcagaggcttctggctcatgtgactctggagctgcagcattaccatcagcttctggagaaggtgagaatcagggacgcccttaggtccattctgactatatctcgccatggaaaccaatatattcaagtcaatgaaccctggaagcgcatcaagggcagcgaagccgacaggcaacgagcgggaacagtgactggactggcagtgaatattgccgcccttctctctgtgatgttacaaccatacatgcccacagtttctgccaccatacaagcacaactccagctccccccccctgcatgcagcattctgttgactaattttctgtgtactttacctgcagggcaccagattggtacggtatctcccctatttcagaagctggagaacgatcagatcgagagtctgagacagcgcttcggcggcgggcaagcaaaaactagcccaaagccagctgtggtggagactgttactactgcaaagcctcaacagatccaggccctgatggatgaggttactaagcaaggcaacattgtgcgagagctcaaggcacaaaaagccgacaagaacgaggtcgcagcagaagtcgcaaaactactcgacctgaagaaacagctggctgtcgcggaaggaaagcctcctgaagcacccaagggcaagaagaagaagtag

SEQ ID NO: 151587 - DNA, 1908 bp, Artificial Sequence
  derived and/or modified sequence
atggccgtgaccgcctgggagaagggcctggagagcctgccccccctgcggccgcagcaaaatccagtccttcccgtggccggcgagcgaaacgtgcttatcacgtctgccttgccctacgtgaataatgtgccacatctgggcaacatcatagggtgtgtactgagcgctgatgttttcgcacgctactctcgccttagacagtggaacacactttacctttgcgggactgatgagtacggcacggccactgagaccaaagctttggaagaaggtttgaccccccaggagatctgtgataaatatcatattatccacgctgatatctaccgatggttcaatatctcgtttgacatctttggccggacaaccacacctcagcaaactaaaattacgcaggacatcttccagcagttgctgaagcggggctttgtgctgcaagatactgttgagcagttgagatgtgagcattgcgcccgtttccttgccgatcgattcgtggagggcgtgtgcccattttgcggctacgaggaggctaggggggaccagtgcgataaatgtggcaagttgataaatgctgtcgaactgaagaaaccgcagtgtaaagtttgtcggagttgccccgtagtgcagagttcccaacacctgtttctggacttgcctaaactggaaaaacggctagaggagtggttgggccgaacgttacctgggagtgactggactcccaatgcccagttcattaccagatcttggttgcgcgacggccttaagccgcggtgcattactagggacctgaaatgggggactcccgttcccttggagggcttcgaagataaggtgttctacgtatggtttgatgccaccatcggttacttatccattacagcaaactacaccgaccagtgggaacgatggtggaagaatcccgaacaggtggatctgtaccagtttatggcaaaggacaacgtgcctttccactcattggtcttcccctgttctgccctgggcgccgaggataactacaccctggtgtcacatctcattgcaactgagtatctgaactatgaagatgggaagttctccaaatctaggggggtgggcgtgtttggtgacatggcccaggacacgggcattcccgcagacatctggcggttctacctcttgtacattcgtccagaggggcaagatagcgcattttcctggacggatctgttactgaaaaacaattcggaactgctgaataacctcggtaatttcattaaccgcgcaggaatgtttgtctccaagtttttcggaggatacgtgcccgagatggtgctcacaccagacgaccagagattgctggctcatgttactctggagttacagcactaccaccagctgttagaaaaggtgcggatacgcgatgccctgcggtctattctgactatctctcgtcacggaaaccagtatattcaggtcaacgagccttggaaaaggattaaagggagcgaggcagaccggcaacgggcagggaccgtgaccggactggcagtcaatatagctgcccttctgagtgtgatgctgcagccatacatgcctacggtgtccgccacaattcaggctcagcttcagctgccacctccggcttgcagcatcttactgacgaattttctgtgtacccttcccgcaggtcaccagattggaacagtatctcccctgtttcagaagctagagaatgatcagatcgaatctttgagacaacgttttgggggcggccaggtgaggaagctgaaggccgtcccttcccttcataattcccactccatcaccagcttgatcagcctgtcctcgcctcaccctagcctcttcccgtcctttgggcctgcagcttcatctctaacagtgttcttgtcctgcttaaactag

SEQ ID NO: 151588 - DNA, 2703 bp, Artificial Sequence
  derived and/or modified sequence
atgcgcctgttcgtgtcagatggcgtccctggctgcctgcccgtccttgctgcagctggcagagctcgcggtagggccgaagtgctgatctcaacagtggggccagaggactgcgtggtcccctttctcactagaccaaaagtgcccgtcttacagctcgacagcggcaactacctattctctacctccgctatctgtcgatattttttcctgttgagcggatgggagcaggatgatctgacaaatcagtggctcgagtgggaggcaactgagctgcagcctgcactttccgctgcactgtattacctcgttgtccaaggaaaaaaaggcgaggatgtgctaggttcagtgagacgcgctcttacacatattgatcattccctttcgaggcagaactgtccctttttggccggagaaacggaatccctggctgatatcgttttgtggggagcactctatcctctgctgcaagatcccgcatatctccctgaggaactcagcgcactccactcctggtttcagacattatcgacccaggagccgtgtcagagagcagcggaaaccgtgctcaagcagcagggtgtgttagcactaaggccctacctgcagaagcagccacagccctcccccgcagaaggacgcgctgtcaccaatgaacctgaggaggaagagctggccacactgtccgaggaggaaatcgccatggcagttacagcctgggagaagggcttggagagtttacctcccctacgcccacagcagaaccccgtccttcccgttgccggagagaggaacgtgctgatcaccagtgccctgccttatgtcaacaacgtgcctcacttgggaaacattattggttgtgtcctgtctgctgatgtgttcgctagatactctcggctcagacagtggaatactctctacctctgcggtaccgatgagtacggaaccgctaccgaaactaaggccctcgaagagggattaacacctcaggagatttgcgacaaataccacattatccatgctgacatatatcgttggtttaatatttcctttgacatttttggtcggactaccaccccacagcagactaaaatcacccaggacatatttcagcagctgctcaagagaggattcgttcttcaggatactgtggaacagttgcgttgtgaacactgtgccagatttcttgctgatcgctttgtggagggcgtgtgcccattttgcgggtacgaagaggccagaggtgaccaatgtgacaaatgcggaaaacttatcaacgcggtcgagttaaagaagccccaatgcaaggtgtgtcggtcttgccccgtggttcagtcctcacagcacctcttcctcgaccttccaaaactcgagaagcgtctcgaagagtggctgggccgtacattaccagggtctgactggactcctaacgcgcagttcattacacgatcctggttgcgggatggcttgaagccaagatgcatcacccgtgacttaaagtggggaaccccagtccccctggagggatttgaagacaaagtgttctatgtgtggtttgacgccaccatcggctatctttccatcaccgccaactataccgatcagtgggagcggtggtggaagaaccctgagcaagtggatctgtaccagtttatggcaaaggacaacgtcccttttcattccctcgtctttccgtgtagcgctcttggcgctgaggataactatactctggtctcccatctgatcgctaccgagtacctgaattatgaggatggcaaattttccaaatcacgtggcgtaggcgtgttcggcgacatggctcaggacactggaatccccgctgacatttggaggttttatctgctgtacatacggccagaaggacaggacagcgccttcagctggactgatttattgctgaaaaacaattctgagctgttgaacaacttgggtaacttcataaatcgagcaggaatgtttgtcagtaagttttttggcggttacgtgccggaaatggttcttacccccgatgaccagcggttgctcgcgcacgttacactcgagctgcagcattaccaccaattactggagaaagtaagaattcgcgacgccctccgctcaatattaaccatatcaagacacggaaaccagtacatccaggtgaacgaaccatggaagaggataaaaggctctgaggctgataggcagagagccggaacagtgacaggactagctgtcaatattgccgcactgctctctgtcatgctgcagccctacatgcctaccgtcagtgcaactatacaggcccagctgcaactgccccctcctgcatgctccatactgctgacaaacttcctgtgcacgctccccgcaggccaccagatcggaacagtttcaccactgtttcagaaactggagaatgatcagatcgagtcccttcgtcaaaggttcggcggtggccaggccaagacaagcccaaaacctgccgtagtagagactgttacgaccgccaagcctcaacagatccaggccctgatggatgaagtgaccaaacaaggtaatatcgtgcgggaactgaaagctcagaaagcagacaagaacgaggtggccgctgaggtcgctaagttgttggacctcaaaaaacagcttgccgtggcagaggggaagccacccgaagcccctaaaggtaagaaaaaaaagtag

SEQ ID NO: 151589 - DNA, 1908 bp, Artificial Sequence
  derived and/or modified sequence
atggccgtcaccgcgtgggaaaaaggactcgaatcgttgccacctctaagaccccagcagaaccccgttttacccgtcgctggagaaagaaacgtactgataacttctgccctgccatatgtcaacaatgtcccccatctggggaacatcatcgggtgtgtgttatctgccgatgtctttgctagatacagccgcctgagacaatggaacaccctgtacttgtgtggcacagatgaatatggcaccgcaaccgaaactaaggcactcgaggaagggctcactcctcaggaaatatgtgacaagtatcacatcatccatgcagacatataccgctggtttaacatctccttcgatatctttggacgcaccaccaccccacaacagaccaagatcacccaggatatcttccagcagctactcaaaagaggcttcgtactgcaggataccgttgaacagcttaggtgcgagcactgcgccagattcctagccgaccgcttcgtggagggcgtctgccccttctgtggatacgaagaggctagaggagaccagtgcgataaatgcggaaagctgatcaatgccgtcgaactgaagaagccacagtgcaaagtgtgtaggtcctgtccggtcgtacagagtagtcaacacctctttctggacctccctaagctcgaaaaaagacttgaggaatggcttggacgcactctgcctggcagcgattggactccaaatgctcagttcatcactcgcagctggctcagagatggcctcaagcccaggtgcatcacgcgcgacctgaaatgggggacaccagtgcccttggagggatttgaggataaggtattctatgtgtggttcgatgcgactatcgggtatttgagcatcaccgcaaattatactgatcagtgggaacgctggtggaaaaatccagagcaagtggatctgtatcagtttatggcaaaagataacgttcccttccattccctggttttcccttgctcggctctgggtgctgaagataattacacgctggtaagtcatttgattgccacagaatatcttaactatgaggacggcaagttttcaaagagcaggggggtcggggtgttcggcgacatggctcaagacacggggatccccgcagacatttggcgcttttatctgttgtacatacggcctgaaggccaagatagcgctttcagctggacagacctgctgttgaaaaacaacagcgaactactgaataacctgggaaacttcattaacagggccggaatgtttgtctcaaagtttttcggaggctacgtgcccgaaatggtgcttactccagacgatcagagactgctggcccatgtcacactagaattgcagcactatcatcagctcctcgagaaggttcgcattagggacgccctaaggagcatcctgactataagcaggcatggcaatcagtacatccaggtgaacgagccatggaaaaggataaagggtagcgaggctgacaggcagcgcgctgggaccgttacaggcttagccgtgaatatcgccgcactcctctctgtgatgctgcagccatatatgccgaccgtttccgcaaccatccaggcccagctgcagttgccgccacccgcatgctccatcctgcttaccaacttcctttgtaccctcccagcaggccaccagatagggacagtctcccctctgtttcagaagttggaaaacgatcaaatcgagtcactgcggcaaaggtttggaggtgggcaggtgcgtaagcttaaagcggtccccagtttgcacaatagtcactctattacatccctgatctccttgagtagtccacatcctagtctcttccccagcttcgggcctgcagcatcatctctaactgtgtttctgtcttgtctgaactag

SEQ ID NO: 151590 - DNA, 2703 bp, Artificial Sequence
  derived and/or modified sequence
atgagactgttcgtgagcgacggcgtgcccggctgcctgcccgtgctggccgccgccggcagagccagaggcagagccgaggtgctgatcagcaccgtgggccccgaggactgcgtggtgcccttcctgaccagacccaaggtgcccgtgctgcagctggacagcggcaactacctgttcagcaccagcgccatctgcagatacttcttcctgctgagcggctgggagcaggacgacctgaccaaccagtggctggagtgggaggccaccgagctgcagcccgccctgagcgccgccctgtactacctggtggtgcagggcaagaagggcgaggacgtgctgggcagcgtgagaagagccctgacccacatcgaccacagcctgagcagacagaactgccccttcctggccggcgagaccgagagcctggccgacatcgtgctgtggggcgccctgtaccccctgctgcaggaccccgcctacctgcccgaggagctgagcgccctgcacagctggttccagaccctgagcacccaggagccctgccagagagccgccgagaccgtgctgaagcagcagggcgtgctggccctgagaccctacctgcagaagcagccccagcccagccccgccgagggcagagccgtgaccaacgagcccgaggaggaggagctggccaccctgagcgaggaggagatcgccatggccgtgaccgcctgggagaagggcctggagagcctgccccccctgagaccccagcagaaccccgtgctgcccgtggccggcgagagaaacgtgctgatcaccagcgccctgccctacgtgaacaacgtgccccacctgggcaacatcatcggctgcgtgctgagcgccgacgtgttcgccagatacagcagactgagacagtggaacaccctgtacctgtgcggcaccgacgagtacggcaccgccaccgagaccaaggccctggaggagggcctgaccccccaggagatctgcgacaagtaccacatcatccacgccgacatctacagatggttcaacatcagcttcgacatcttcggcagaaccaccaccccccagcagaccaagatcacccaggacatcttccagcagctgctgaagagaggcttcgtgctgcaggacaccgtggagcagctgagatgcgagcactgcgccagattcctggccgacagattcgtggagggcgtgtgccccttctgcggctacgaggaggccagaggcgaccagtgcgacaagtgcggcaagctgatcaacgccgtggagctgaagaagccccagtgcaaggtgtgcagaagctgccccgtggtgcagagcagccagcacctgttcctggacctgcccaagctggagaagagactggaggagtggctgggcagaaccctgcccggcagcgactggacccccaacgcccagttcatcaccagaagctggctgagagacggcctgaagcccagatgcatcaccagagacctgaagtggggcacccccgtgcccctggagggcttcgaggacaaggtgttctacgtgtggttcgacgccaccatcggctacctgagcatcaccgccaactacaccgaccagtgggagagatggtggaagaaccccgagcaggtggacctgtaccagttcatggccaaggacaacgtgcccttccacagcctggtgttcccctgcagcgccctgggcgccgaggacaactacaccctggtgagccacctgatcgccaccgagtacctgaactacgaggacggcaagttcagcaagagcagaggcgtgggcgtgttcggcgacatggcccaggacaccggcatccccgccgacatctggagattctacctgctgtacatcagacccgagggccaggacagcgccttcagctggaccgacctgctgctgaagaacaacagcgagctgctgaacaacctgggcaacttcatcaacagagccggcatgttcgtgagcaagttcttcggcggctacgtgcccgagatggtgctgacccccgacgaccagagactgctggcccacgtgaccctggagctgcagcactaccaccagctgctggagaaggtgagaatcagagacgccctgagaagcatcctgaccatcagcagacacggcaaccagtacatccaggtgaacgagccctggaagagaatcaagggcagcgaggccgacagacagagagccggcaccgtgaccggcctggccgtgaacatcgccgccctgctgagcgtgatgctgcagccctacatgcccaccgtgagcgccaccatccaggcccagctgcagctgcccccccccgcctgcagcatcctgctgaccaacttcctgtgcaccctgcccgccggccaccagatcggcaccgtgagccccctgttccagaagctggagaacgaccagatcgagagcctgagacagagattcggcggcggccaggccaagaccagccccaagcccgccgtggtggagaccgtgaccaccgccaagccccagcagatccaggccctgatggacgaggtgaccaagcagggcaacatcgtgagagagctgaaggcccagaaggccgacaagaacgaggtggccgccgaggtggccaagctgctggacctgaagaagcagctggccgtggccgagggcaagccccccgaggcccccaagggcaagaagaagaagtag

SEQ ID NO: 151591 - DNA, 1908 bp, Artificial Sequence
  derived and/or modified sequence
atggccgtgaccgcctgggagaagggcctggagagcctgccccccctgagaccccagcagaaccccgtgctgcccgtggccggcgagagaaacgtgctgatcaccagcgccctgccctacgtgaacaacgtgccccacctgggcaacatcatcggctgcgtgctgagcgccgacgtgttcgccagatacagcagactgagacagtggaacaccctgtacctgtgcggcaccgacgagtacggcaccgccaccgagaccaaggccctggaggagggcctgaccccccaggagatctgcgacaagtaccacatcatccacgccgacatctacagatggttcaacatcagcttcgacatcttcggcagaaccaccaccccccagcagaccaagatcacccaggacatcttccagcagctgctgaagagaggcttcgtgctgcaggacaccgtggagcagctgagatgcgagcactgcgccagattcctggccgacagattcgtggagggcgtgtgccccttctgcggctacgaggaggccagaggcgaccagtgcgacaagtgcggcaagctgatcaacgccgtggagctgaagaagccccagtgcaaggtgtgcagaagctgccccgtggtgcagagcagccagcacctgttcctggacctgcccaagctggagaagagactggaggagtggctgggcagaaccctgcccggcagcgactggacccccaacgcccagttcatcaccagaagctggctgagagacggcctgaagcccagatgcatcaccagagacctgaagtggggcacccccgtgcccctggagggcttcgaggacaaggtgttctacgtgtggttcgacgccaccatcggctacctgagcatcaccgccaactacaccgaccagtgggagagatggtggaagaaccccgagcaggtggacctgtaccagttcatggccaaggacaacgtgcccttccacagcctggtgttcccctgcagcgccctgggcgccgaggacaactacaccctggtgagccacctgatcgccaccgagtacctgaactacgaggacggcaagttcagcaagagcagaggcgtgggcgtgttcggcgacatggcccaggacaccggcatccccgccgacatctggagattctacctgctgtacatcagacccgagggccaggacagcgccttcagctggaccgacctgctgctgaagaacaacagcgagctgctgaacaacctgggcaacttcatcaacagagccggcatgttcgtgagcaagttcttcggcggctacgtgcccgagatggtgctgacccccgacgaccagagactgctggcccacgtgaccctggagctgcagcactaccaccagctgctggagaaggtgagaatcagagacgccctgagaagcatcctgaccatcagcagacacggcaaccagtacatccaggtgaacgagccctggaagagaatcaagggcagcgaggccgacagacagagagccggcaccgtgaccggcctggccgtgaacatcgccgccctgctgagcgtgatgctgcagccctacatgcccaccgtgagcgccaccatccaggcccagctgcagctgcccccccccgcctgcagcatcctgctgaccaacttcctgtgcaccctgcccgccggccaccagatcggcaccgtgagccccctgttccagaagctggagaacgaccagatcgagagcctgagacagagattcggcggcggccaggtgagaaagctgaaggccgtgcccagcctgcacaacagccacagcatcaccagcctgatcagcctgagcagcccccaccccagcctgttccccagcttcggccccgccgccagcagcctgaccgtgttcctgagctgcctgaactag

SEQ ID NO: 151592 - protein, 68 aa, Artificial Sequence
  derived and/or modified sequence
MKSEDYPHETMAPDIHEERQYRCEDCDQLFESKAELADHQKFPCSTPHSAFSMVEEDFQQKLESENDL

SEQ ID NO: 151593 - DNA, 4835 bp, Artificial Sequence
  derived and/or modified sequence
ccttgccaagtaacagctttgctgtccaacatcgtgtgctgcttcgcgagaaagtcacattcggaccctttggctagattatcttagacgaattttacaatgtgaagttctgcatagatgccagtcaaccagatgttggaagctggctcaagtacattagattcgctggctgttatgatcagcacaaccttgttgcatgccagataaatgatcagatattctatagagtagttgcagacattgcgccgggagaggagcttctgctgttcatgaagagcgaagactatccccatgaaactatggcgccggatatccacgaagaacggcaatatcgctgcgaagactgtgaccagctctttgaatctaaggctgaactagcagatcaccaaaagtttccatgcagtactcctcactcagcattttcaatggttgaagaggactttcagcaaaaactcgaaagcgagaatgatctccaagagatacacacgatccaggagtgtaaggaatgtgaccaagtttttcctgatttgcaaagcctggagaaacacatgctgtcacatactgaagagagggaatacaagtgtgatcagtgtcccaaggcatttaactggaagtccaatttaattcgccaccagatgtcacatgacagtggaaagcactatgaatgtgaaaactgtgccaaggttttcacggaccctagcaaccttcagcggcacattcgctctcagcatgtcggtgcccgggcccatgcatgcccggagtgtggcaaaacgtttgccacttcgtcgggcctcaaacaacacaagcacatccacagcagtgtgaagccctttatctgtgaggtctgccataaatcctatactcagttttcaaacctttgccgtcataagcgcatgcatgctgattgcagaacccaaatcaagtgcaaagactgtggacaaatgttcagcactacgtcttccttaaataaacacaggaggttttgtgagggcaagaaccattttgcggcaggtggattttttggccaaggcatttcacttcctggaaccccagctatggataaaacgtccatggttaatatgagtcatgccaacccgggccttgctgactattttggcgccaataggcatcctgctggtcttacctttccaacagctcctggattttcttttagcttccctggtctgtttccttccggcttgtaccacaggcctcctttgatacctgctagttctcctgttaaaggactatcaagtactgaacagacaaacaaaagtcaaagtcccctcatgacacatcctcagatactgccagctacacaggatattttgaaggcactatctaaacacccatctgtaggggacaataagccagtggagctccagcccgagaggtcctctgaagagaggccctttgagaaaatcagtgaccagtcagagagtagtgaccttgatgatgtcagtacaccaagtggcagtgacctggaaacaacctcgggctctgatctggaaagtgacattgaaagtgataaagagaaatttaaagaaaatggtaaaatgttcaaagacaaagtaagccctcttcagaatctggcttcaataaataataagaaagaatacagcaatcattccattttctcaccatctttagaggagcagactgcggtgtcaggagctgtgaatgattctataaaggctattgcttctattgctgaaaaatactttggttcaacaggactggtggggctgcaagacaaaaaagttggagctttaccttacccttccatgtttcccctcccattttttccagcattctctcaatcaatgtacccatttcctgatagagacttgagatcgttacctttgaaaatggaaccccaatcaccaggtgaagtaaagaaactgcagaagggcagctctgagtccccctttgatctcaccactaagcgaaaggatgagaagcccttgactccagtcccctccaagcctccagtgacacctgccacaagccaagaccagcccctggatctaagtatgggcagtaggagtagagccagtgggacaaagctgactgagcctcgaaaaaaccacgtgtttgggggaaaaaaaggaagcaacgtcgaatcaagacctgcttcagatggttccttgcagcatgcaagacccactcctttctttatggaccctatttacagagtagagaaaagaaaactaactgacccacttgaagctttaaaagagaaatacttgaggccttctccaggattcttgtttcacccacaattccaactgcctgatcagagaacttggatgtcagctattgaaaacatggcagaaaagctagagagcttcagtgccctgaaacctgaggccagtgagctcttacagtcagtgccctctatgttcaacttcagggcgcctcccaatgccctgccagagaaccttctgcggaagggaaaggagcgctatacctgcagatactgtggcaagatttttccaaggtctgcaaacctaacacggcacttgagaacccacacaggagagcagccttacagatgcaaatactgtgacagatcatttagcatatcttctaacttgcaaaggcatgttcgcaacatccacaataaagagaagccatttaagtgtcacttatgtgataggtgttttggtcaacaaaccaatttagacagacacctaaagaaacatgagaatgggaacatgtccggtacagcaacatcgtcgcctcattctgaactggaaagtacaggtgcgattctggatgacaaagaagatgcttacttcacagaaattcgaaatttcattgggaacagcaaccatggcagccaatctcccaggaatgtggaggagagaatgaatggcagtcattttaaagatgaaaaggctttggtgaccagtcaaaattcagacttgctggatgatgaagaagttgaagatgaggtgttgttagatgaggaggatgaagacaatgatattactggaaaaacaggaaaggaaccagtgacaagtaatttacatgaaggaaaccctgaggatgactatgaagaaaccagtgccctggagatgagttgcaagacatccccagtgaggtataaagaggaagaatataaaagtggactttctgctctagatcatataaggcacttcacagatagcctcaaaatgaggaaaatggaagataatcaatattctgaagctgagctgtcttcttttagtacttcccatgtgccagaggaacttaagcagccgttacacagaaagtccaaatcgcaggcatatgctatgatgctgtcactgtctgacaaggagtccctccattctacatcccacagttcttccaacgtgtggcacagtatggccagggctgcggcggaatccagtgctatccagtccataagccacgtatgacgttatcaaggttgaccagagtgggaccaagtccaacagtagcatggctctttcatataggactatttacaagactgctgagcagaatgccttataaacctgcagggtcactcatctaaagtctagtgaccttaaactgaatgatttaaaaaagaaaagaaagaaaaaagaaactatttattctcgatattttgttttgcacagcaaaggcagctgctgacttctggaagatcaatcaatgcgacttaaagtgattcagtgaaaacaaaaaacttggtgggctgaaggcatcttccagtttaccccaccttagggtatgggtgggtgagaagggcagttgagatggcagcattgatatgaatgaacactccatagaaactgaattctcttttgtacaagatcacctgacatgattgggaacagttgcttttaattacagatttaatttttttcttcgttaaagttttatgtaatttaaccctttgaagacagaagtagttggatgaaatgcacagtcaattattatagaaactgataacagggagtacttgttcccccttttgccttcttaagtacattgtttaaaactagggaaaaagggtatgtgtatattgtaaactatggatgttaacactcaaagaggttaagtcagtgaagtaacctattcatcaccagtaccgctgtaccactaataaattgtttgccaaatccttgtaataacatcttaattttagacaatcatgtcactgtttttaatgtttatttttttgtgtgtgttgcgtgtatcatgtatttatttgttggcaaactattgtttgttgattaaaatagcactgttccagtcagccactactttatgacgtctgaggcacacccctttccgaatttcaaggaccaaggtgacccgacctgtgtatgagagtgccaaatggtgtttggcttttcttaacattcctttttgtttgtttgttttgttttccttcttaatgaactaaatacgaatagatgcaacttagtttttgtaatactgaaatcgattcaattgtataaacgattataatttctttcatggaagcatgattcttctgattaaaaactgtactccatattttatgctggttgtctgcaagcttgtgcgatgttatgttcatgttaatcctatttgtaaaatgaagtgttcccaaccttatgttaaaagagagaagtaaataacagactgtattcagttattttgccctttattgaggaaccagatttgttttctttttgtttgtaatctcattttgaaataatcagcaagttgaggtactttcttcaaatgctttgtacaatataaactgttatgcctttcagtgcattactatgggaggagcaactaaaaaataaagacttacaaaaaggagtattttt

SEQ ID NO: 151594 - DNA, 5533 bp, Artificial Sequence
  derived and/or modified sequence
gattgccatctgacaagatctccaaatcaaagtgataaatcgctccaaactttttttggcggcgctgagatgttggaggggcgtctagcgcgcatgtgcgaaggtgtccaaactgacaatgctggagagatagcgagtgtggattgagagaaagggagagagggagggagagagagtgaaagaagaaaatacagagagtgagtgtgtggaagagagagagaaacaggagagaaacaggagggagggagagagagagagagagagagagagagagagagagagagagagagagagagagagacaggagagagagggagggagcgagagggagagcaaaagaaggaaaggatccaagaaaaaaaagccccaaccacacaccagcggctgcaggactgggcacagcatgagatccaaaggcagggcaaggaaactggccacaaataatgagtgtgtatatggcaactaccctgaaatacctttggaagaaatgccagatgcagatggagtagccagcactccctccctcaatattcaagagccatgctctcctgccacatccagtgaagcattcactccaaaggagggttctccttacaaagcccccatctacatccctgatgatatccccattcctgctgagtttgaacttcgagagtcaaatatgcctggggcaggactaggaatatggaccaaaaggaagatcgaagtaggtgaaaagtttgggccttatgtgggagagcagaggtcaaacctgaaagaccccagttatggatgggagatcttagacgaattttacaatgtgaagttctgcatagatgccagtcaaccagatgttggaagctggctcaagtacattagattcgctggctgttatgatcagcacaaccttgttgcatgccagataaatgatcagatattctatagagtagttgcagacattgcgccgggagaggagcttctgctgttcatgaagagcgaagactatccccatgaaactatggcgccggatatccacgaagaacggcaatatcgctgcgaagactgtgaccagctctttgaatctaaggctgaactagcagatcaccaaaagtttccatgcagtactcctcactcagcattttcaatggttgaagaggactttcagcaaaaactcgaaagcgagaatgatctccaagagatacacacgatccaggagtgtaaggaatgtgaccaagtttttcctgatttgcaaagcctggagaaacacatgctgtcacatactgaagagagggaatacaagtgtgatcagtgtcccaaggcatttaactggaagtccaatttaattcgccaccagatgtcacatgacagtggaaagcactatgaatgtgaaaactgtgccaaggttttcacggaccctagcaaccttcagcggcacattcgctctcagcatgtcggtgcccgggcccatgcatgcccggagtgtggcaaaacgtttgccacttcgtcgggcctcaaacaacacaagcacatccacagcagtgtgaagccctttatctgtgaggtctgccataaatcctatactcagttttcaaacctttgccgtcataagcgcatgcatgctgattgcagaacccaaatcaagtgcaaagactgtggacaaatgttcagcactacgtcttccttaaataaacacaggaggttttgtgagggcaagaaccattttgcggcaggtggattttttggccaaggcatttcacttcctggaaccccagctatggataaaacgtccatggttaatatgagtcatgccaacccgggccttgctgactattttggcgccaataggcatcctgctggtcttacctttccaacagctcctggattttcttttagcttccctggtctgtttccttccggcttgtaccacaggcctcctttgatacctgctagttctcctgttaaaggactatcaagtactgaacagacaaacaaaagtcaaagtcccctcatgacacatcctcagatactgccagctacacaggatattttgaaggcactatctaaacacccatctgtaggggacaataagccagtggagctccagcccgagaggtcctctgaagagaggccctttgagaaaatcagtgaccagtcagagagtagtgaccttgatgatgtcagtacaccaagtggcagtgacctggaaacaacctcgggctctgatctggaaagtgacattgaaagtgataaagagaaatttaaagaaaatggtaaaatgttcaaagacaaagtaagccctcttcagaatctggcttcaataaataataagaaagaatacagcaatcattccattttctcaccatctttagaggagcagactgcggtgtcaggagctgtgaatgattctataaaggctattgcttctattgctgaaaaatactttggttcaacaggactggtggggctgcaagacaaaaaagttggagctttaccttacccttccatgtttcccctcccattttttccagcattctctcaatcaatgtacccatttcctgatagagacttgagatcgttacctttgaaaatggaaccccaatcaccaggtgaagtaaagaaactgcagaagggcagctctgagtccccctttgatctcaccactaagcgaaaggatgagaagcccttgactccagtcccctccaagcctccagtgacacctgccacaagccaagaccagcccctggatctaagtatgggcagtaggagtagagccagtgggacaaagctgactgagcctcgaaaaaaccacgtgtttgggggaaaaaaaggaagcaacgtcgaatcaagacctgcttcagatggttccttgcagcatgcaagacccactcctttctttatggaccctatttacagagtagagaaaagaaaactaactgacccacttgaagctttaaaagagaaatacttgaggccttctccaggattcttgtttcacccacaattccaactgcctgatcagagaacttggatgtcagctattgaaaacatggcagaaaagctagagagcttcagtgccctgaaacctgaggccagtgagctcttacagtcagtgccctctatgttcaacttcagggcgcctcccaatgccctgccagagaaccttctgcggaagggaaaggagcgctatacctgcagatactgtggcaagatttttccaaggtctgcaaacctaacacggcacttgagaacccacacaggagagcagccttacagatgcaaatactgtgacagatcatttagcatatcttctaacttgcaaaggcatgttcgcaacatccacaataaagagaagccatttaagtgtcacttatgtgataggtgttttggtcaacaaaccaatttagacagacacctaaagaaacatgagaatgggaacatgtccggtacagcaacatcgtcgcctcattctgaactggaaagtacaggtgcgattctggatgacaaagaagatgcttacttcacagaaattcgaaatttcattgggaacagcaaccatggcagccaatctcccaggaatgtggaggagagaatgaatggcagtcattttaaagatgaaaaggctttggtgaccagtcaaaattcagacttgctggatgatgaagaagttgaagatgaggtgttgttagatgaggaggatgaagacaatgatattactggaaaaacaggaaaggaaccagtgacaagtaatttacatgaaggaaaccctgaggatgactatgaagaaaccagtgccctggagatgagttgcaagacatccccagtgaggtataaagaggaagaatataaaagtggactttctgctctagatcatataaggcacttcacagatagcctcaaaatgaggaaaatggaagataatcaatattctgaagctgagctgtcttcttttagtacttcccatgtgccagaggaacttaagcagccgttacacagaaagtccaaatcgcaggcatatgctatgatgctgtcactgtctgacaaggagtccctccattctacatcccacagttcttccaacgtgtggcacagtatggccagggctgcggcggaatccagtgctatccagtccataagccacgtatgacgttatcaaggttgaccagagtgggaccaagtccaacagtagcatggctctttcatataggactatttacaagactgctgagcagaatgccttataaacctgcagggtcactcatctaaagtctagtgaccttaaactgaatgatttaaaaaagaaaagaaagaaaaaagaaactatttattctcgatattttgttttgcacagcaaaggcagctgctgacttctggaagatcaatcaatgcgacttaaagtgattcagtgaaaacaaaaaacttggtgggctgaaggcatcttccagtttaccccaccttagggtatgggtgggtgagaagggcagttgagatggcagcattgatatgaatgaacactccatagaaactgaattctcttttgtacaagatcacctgacatgattgggaacagttgcttttaattacagatttaatttttttcttcgttaaagttttatgtaatttaaccctttgaagacagaagtagttggatgaaatgcacagtcaattattatagaaactgataacagggagtacttgttcccccttttgccttcttaagtacattgtttaaaactagggaaaaagggtatgtgtatattgtaaactatggatgttaacactcaaagaggttaagtcagtgaagtaacctattcatcaccagtaccgctgtaccactaataaattgtttgccaaatccttgtaataacatcttaattttagacaatcatgtcactgtttttaatgtttatttttttgtgtgtgttgcgtgtatcatgtatttatttgttggcaaactattgtttgttgattaaaatagcactgttccagtcagccactactttatgacgtctgaggcacacccctttccgaatttcaaggaccaaggtgacccgacctgtgtatgagagtgccaaatggtgtttggcttttcttaacattcctttttgtttgtttgttttgttttccttcttaatgaactaaatacgaatagatgcaacttagtttttgtaatactgaaatcgattcaattgtataaacgattataatttctttcatggaagcatgattcttctgattaaaaactgtactccatattttatgctggttgtctgcaagcttgtgcgatgttatgttcatgttaatcctatttgtaaaatgaagtgttcccaaccttatgttaaaagagagaagtaaataacagactgtattcagttattttgccctttattgaggaaccagatttgttttctttttgtttgtaatctcattttgaaataatcagcaagttgaggtactttcttcaaatgctttgtacaatataaactgttatgcctttcagtgcattactatgggaggagcaactaaaaaataaagacttacaaaaaggagtattttt

SEQ ID NO: 151595 - DNA, 3691 bp, Artificial Sequence
  derived and/or modified sequence
aaagtttgtcacttcggacagtttcctgccggggcaccgtttctacgggcgccccccgcccccagccttctttcctcctcgcccgcagtctcgcggagccctgctgcttatctacgttgctaagccgggcgatttccttgttcctcctgcgaaacggtgcggtctggacacgtctccggggtgggtcgtccggccttcgatcttagacgaattttacaatgtgaagttctgcatagatgccagtcaaccagatgttggaagctggctcaagtacattagattcgctggctgttatgatcagcacaaccttgttgcatgccagataaatgatcagatattctatagagtagttgcagacattgcgccgggagaggagcttctgctgttcatgaagagcgaagactatccccatgaaactatggcgccggatatccacgaagaacggcaatatcgctgcgaagactgtgaccagctctttgaatctaaggctgaactagcagatcaccaaaagtttccatgcagtactcctcactcagcattttcaatggttgaagaggactttcagcaaaaactcgaaagcgagaatgatctccaagagatacacacgatccaggagtgtaaggaatgtgaccaagtttttcctgatttgcaaagcctggagaaacacatgctgtcacatactgaagagagggaatacaagtgtgatcagtgtcccaaggcatttaactggaagtccaatttaattcgccaccagatgtcacatgacagtggaaagcactatgaatgtgaaaactgtgccaaggttttcacggaccctagcaaccttcagcggcacattcgctctcagcatgtcggtgcccgggcccatgcatgcccggagtgtggcaaaacgtttgccacttcgtcgggcctcaaacaacacaagcacatccacagcagtgtgaagccctttatctgtgaggtctgccataaatcctatactcagttttcaaacctttgccgtcataagcgcatgcatgctgattgcagaacccaaatcaagtgcaaagactgtggacaaatgttcagcactacgtcttccttaaataaacacaggaggttttgtgagggcaagaaccattttgcggcaggtggattttttggccaaggcatttcacttcctggaaccccagctatggataaaacgtccatggttaatatgagtcatgccaacccgggccttgctgactattttggcgccaataggcatcctgctggtcttacctttccaacagctcctggattttcttttagcttccctggtctgtttccttccggcttgtaccacaggcctcctttgatacctgctagttctcctgttaaaggactatcaagtactgaacagacaaacaaaagtcaaagtcccctcatgacacatcctcagatactgccagctacacaggatattttgaaggcactatctaaacacccatctgtaggggacaataagccagtggagctccagcccgagaggtcctctgaagagaggccctttgagaaaatcagtgaccagtcagagagtagtgaccttgatgatgtcagtacaccaagtggcagtgacctggaaacaacctcgggctctgatctggaaagtgacattgaaagtgataaagagaaatttaaagaaaatggtaaaatgttcaaagacaaagtaagccctcttcagaatctggcttcaataaataataagaaagaatacagcaatcattccattttctcaccatctttagaggagcagactgcggtgtcaggagctgtgaatgattctataaaggctattgcttctattgctgaaaaatactttggttcaacaggactggtggggctgcaagacaaaaaagttggagctttaccttacccttccatgtttcccctcccattttttccagcattctctcaatcaatgtacccatttcctgatagagacttgagatcgttacctttgaaaatggaaccccaatcaccaggtgaagtaaagaaactgcagaagggcagctctgagtccccctttgatctcaccactaagcgaaaggatgagaagcccttgactccagtcccctccaagcctccagtgacacctgccacaagccaagaccagcccctggatctaagtatgggcagtaggagtagagccagtgggacaaagctgactgagcctcgaaaaaaccacgtgtttgggggaaaaaaaggaagcaacgtcgaatcaagacctgcttcagatggttccttgcagcatgcaagacccactcctttctttatggaccctatttacagagtagagaaaagaaaactaactgacccacttgaagctttaaaagagaaatacttgaggccttctccaggattcttgtttcacccacaattccaactgcctgatcagagaacttggatgtcagctattgaaaacatggcagaaaagctagagagcttcagtgccctgaaacctgaggccagtgagctcttacagtcagtgccctctatgttcaacttcagggcgcctcccaatgccctgccagagaaccttctgcggaagggaaaggagcgctatacctgcagatactgtggcaagatttttccaaggtctgcaaacctaacacggcacttgagaacccacacaggagagcagccttacagatgcaaatactgtgacagatcatttagcatatcttctaacttgcaaaggcatgttcgcaacatccacaataaagagaagccatttaagtgtcacttatgtgataggtgttttggtcaacaaaccaatttagacagacacctaaagaaacatgagaatgggaacatgtccggtacagcaacatcgtcgcctcattctgaactggaaagtacaggtgcgattctggatgacaaagaagatgcttacttcacagaaattcgaaatttcattgggaacagcaaccatggcagccaatctcccaggaatgtggaggagagaatgaatggcagtcattttaaagatgaaaaggctttggtgaccagtcaaaattcagacttgctggatgatgaagaagttgaagatgaggtgttgttagatgaggaggatgaagacaatgatattactggaaaaacaggaaaggaaccagtgacaagtaatttacatgaaggaaaccctgaggatgactatgaagaaaccagtgccctggagatgagttgcaagacatccccagtgaggtataaagaggaagaatataaaagtggactttctgctctagatcatataaggcacttcacagatagcctcaaaatgaggaaaatggaagataatcaatattctgaagctgagctgtcttcttttagtacttcccatgtgccagaggaacttaagcagccgttacacagaaagtccaaatcgcaggcatatgctatgatgctgtcactgtctgacaaggagtccctccattctacatcccacagttcttccaacgtgtggcacagtatggccagggctgcggcggaatccagtgctatccagtccataagccacgtatgacgttatcaaggttgaccagagtgggaccaagtccaacagtagcatggctctttcatataggactatttacaagactgctgagcagaatgccttataaacctgcagggtcactcatctaaagtctagtgaccttaaactgaatgattt

SEQ ID NO: 151596 - protein, 486 aa, Artificial Sequence
  derived and/or modified sequence
MVAGMLGLREEKSEDQDLQGLKDKPLKFKKVKKDKKEEKEGKHEPVQPSAHHSAEPAEAGKAETSEGSGSAPAVPEASASPKQRRSIIRDRGPMYDDPTLPEGWTRKLKQRKSGRSAGKYDVYLINPQGKAFRSKVELIAYFEKVGDTSLDPNDFDFTVTGRGSPSRREQKPPKKPKSPKAPGTGRGRGRPKGSGTTRPKAATSEGVQVKRVLEKSPGKLLVKMPFQTSPGGKAEGGGATTSTQVMVIKRPGRKRKAEADPQAIPKKRGRKPGSVVAAAAAEAKKKAVKESSIRSVQETVLPIKKRKTRETVSIEVKEVVKPLLVSTLGEKSGKGLKTCKSPGRKSKESSPKGRSSSASSPPKKEHHHHHHHSESPKAPVPLLPPLPPPPPEPESSEDPTSPPEPQDLSSSVCKEEKMPRGGSLESDGCPKEPAKTQPAVATAATAAEKYKHRGEGERKDIVSSSMPRPNREEPVDSRTPVTERVS

SEQ ID NO: 151597 - protein, 271 aa, Artificial Sequence
  derived and/or modified sequence
MVAGMLGLREEKSEDQDLQGLKDKPLKFKKVKKDKKEEKEGKHEPVQPSAHHSAEPAEAGKAETSEGSGSAPAVPEASASPKQRRSIIRDRGPMYDDPTLPEGWTRKLKQRKSGRSAGKYDVYLINPQGKAFRSKVELIAYFEKVGDTSLDPNDFDFTVTGRGSPSRREQKPPKKPKSPKAPGTGRGRGRPKGSGTTRPKAATSEGVQVKRVLEKSPGKLLVKMPFQTSPGGKAEGGGATTSTQVMVIKRPGRKRSPRAPRTPPAPLSPRT

SEQ ID NO: 151598 - protein, 50 aa, Artificial Sequence
  derived and/or modified sequence
MVAGMLGLREEKSEDQDLQGLKDKPLKFKKVKKDKKEEKEGKHEPVQPSA

SEQ ID NO: 151599 - protein, 394 aa, Artificial Sequence
  derived and/or modified sequence
MVAGMLGLREEKSEDQDLQGLKDKPLKFKKVKKDKKEEKEGKHEPVQPSAHHSAEPAEAGKAETSEGSGSAPAVPEASASPKQRRSIIRDRGPMYDDPTLPEGWTRKLKQRKSGRSAGKYDVYLINPQGKAFRSKVELIAYFEKVGDTSLDPNDFDFTVTGRGSPSRREQKPPKKPKSPKAPGTGRGRGRPKGSGTTRPKAATSEGVQVKRVLEKSPGKLLVKMPFQTSPGGKAEGGGATTSTQVMVIKRPGRKRKAEADPQAIPKKRGRKPGSVVAAAAAEAKKKAVKESSIRSVQETVLPIKKRKTRETVSIEVKEVVKPLLVSTLGEKSGKGLKTCKSPGRKSKESSPKGRSSSASSPPKKEHHHHHHHSESPKAPVPTRIKAAVVSSPYG

SEQ ID NO: 151600 - DNA, 10241 bp, Artificial Sequence
  derived and/or modified sequence
ccggcgtcggcggcgcgcgcgctccctcctctcggagagagggctgtggtaaaagccgtccggaaaatggccgccgccgccgccgccgcgccgagcggaggaggaggaggaggcgaggaggagagactgctccataaaaatacagactcaccagttcctgctttgatgtgacatgtgactccccagaatacaccttgcttctgtagaccagctccaacaggattccatggtagctgggatgttagggctcagggaagaaaagtcagaagaccaggacctccagggcctcaaggacaaacccctcaagtttaaaaaggtgaagaaagataagaaagaagagaaagagggcaagcatgagcccgtgcagccatcagcccaccactctgctgagcccgcagaggcaggcaaagcagagacatcagaagggtcaggctccgccccggctgtgccggaagcttctgcctcccccaaacagcggcgctccatcatccgtgaccggggacccatgtatgatgaccccaccctgcctgaaggctggacacggaagcttaagcaaaggaaatctggccgctctgctgggaagtatgatgtgtatttgatcaatccccagggaaaagcctttcgctctaaagtggagttgattgcgtacttcgaaaaggtaggcgacacatccctggaccctaatgattttgacttcacggtaactgggagagggagcccctcccggcgagagcagaaaccacctaagaagcccaaatctcccaaagctccaggaactggcagaggccggggacgccccaaagggagcggcaccacgagacccaaggcggccacgtcagagggtgtgcaggtgaaaagggtcctggagaaaagtcctgggaagctccttgtcaagatgccttttcaaacttcgccagggggcaaggctgaggggggtggggccaccacatccacccaggtcatggtgatcaaacgccccggcaggaagcgaaaagctgaggccgaccctcaggccattcccaagaaacggggccgaaagccggggagtgtggtggcagccgctgccgccgaggccaaaaagaaagccgtgaaggagtcttctatccgatctgtgcaggagaccgtactccccatcaagaagcgcaagacccgggagacggtcagcatcgaggtcaaggaagtggtgaagcccctgctggtgtccaccctcggtgagaagagcgggaaaggactgaagacctgtaagagccctgggcggaaaagcaaggagagcagccccaaggggcgcagcagcagcgcctcctcaccccccaagaaggagcaccaccaccatcaccaccactcagagtccccaaaggcccccgtgccactgctcccacccctgcccccacctccacctgagcccgagagctccgaggaccccaccagcccccctgagccccaggacttgagcagcagcgtctgcaaagaggagaagatgcccagaggaggctcactggagagcgacggctgccccaaggagccagctaagactcagcccgcggttgccaccgccgccacggccgcagaaaagtacaaacaccgaggggagggagagcgcaaagacattgtttcatcctccatgccaaggccaaacagagaggagcctgtggacagccggacgcccgtgaccgagagagttagctgactttacacggagcggattgcaaagcaaaccaacaagaataaaggcagctgttgtctcttctccttatgggtagggctctgacaaagcttcccgattaactgaaataaaaaatatttttttttctttcagtaaacttagagtttcgtggcttcagggtgggagtagttggagcattggggatgtttttcttaccgacaagcacagtcaggttgaagacctaaccagggccagaagtagctttgcacttttctaaactaggctccttcaacaaggcttgctgcagatactactgaccagacaagctgttgaccaggcacctcccctcccgcccaaacctttcccccatgtggtcgttagagacagagcgacagagcagttgagaggacactcccgttttcggtgccatcagtgccccgtctacagctcccccagctccccccacctcccccactcccaaccacgttgggacagggaggtgtgaggcaggagagacagttggattctttagagaagatggatatgaccagtggctatggcctgtgcgatcccacccgtggtggctcaagtctggccccacaccagccccaatccaaaactggcaaggacgcttcacaggacaggaaagtggcacctgtctgctccagctctggcatggctaggaggggggagtcccttgaactactgggtgtagactggcctgaaccacaggagaggatggcccagggtgaggtggcatggtccattctcaagggacgtcctccaacgggtggcgctagaggccatggaggcagtaggacaaggtgcaggcaggctggcctggggtcaggccgggcagagcacagcggggtgagagggattcctaatcactcagagcagtctgtgacttagtggacaggggagggggcaaagggggaggagaagaaaatgttcttccagttactttccaattctcctttagggacagcttagaattatttgcactattgagtcttcatgttcccacttcaaaacaaacagatgctctgagagcaaactggcttgaattggtgacatttagtccctcaagccaccagatgtgacagtgttgagaactacctggatttgtatatatacctgcgcttgttttaaagtgggctcagcacatagggttcccacgaagctccgaaactctaagtgtttgctgcaattttataaggacttcctgattggtttctcttctccccttccatttctgccttttgttcatttcatcctttcacttctttcccttcctccgtcctcctccttcctagttcatcccttctcttccaggcagccgcggtgcccaaccacacttgtcggctccagtccccagaactctgcctgccctttgtcctcctgctgccagtaccagccccaccctgttttgagccctgaggaggccttgggctctgctgagtccgacctggcctgtctgtgaagagcaagagagcagcaaggtcttgctctcctaggtagccccctcttccctggtaagaaaaagcaaaaggcatttcccaccctgaacaacgagccttttcacccttctactctagagaagtggactggaggagctgggcccgatttggtagttgaggaaagcacagaggcctcctgtggcctgccagtcatcgagtggcccaacaggggctccatgccagccgaccttgacctcactcagaagtccagagtctagcgtagtgcagcagggcagtagcggtaccaatgcagaactcccaagacccgagctgggaccagtacctgggtccccagcccttcctctgctcccccttttccctcggagttcttcttgaatggcaatgttttgcttttgctcgatgcagacagggggccagaacaccacacatttcactgtctgtctggtccatagctgtggtgtaggggcttagaggcatgggcttgctgtgggtttttaattgatcagttttcatgtgggatcccatctttttaacctctgttcaggaagtccttatctagctgcatatcttcatcatattggtatatccttttctgtgtttacagagatgtctcttatatctaaatctgtccaactgagaagtaccttatcaaagtagcaaatgagacagcagtcttatgcttccagaaacacccacaggcatgtcccatgtgagctgctgccatgaactgtcaagtgtgtgttgtcttgtgtatttcagttattgtccctggcttccttactatggtgtaatcatgaaggagtgaaacatcatagaaactgtctagcacttccttgccagtctttagtgatcaggaaccatagttgacagttccaatcagtagcttaagaaaaaaccgtgtttgtctcttctggaatggttagaagtgagggagtttgccccgttctgtttgtagagtctcatagttggactttctagcatatatgtgtccatttccttatgctgtaaaagcaagtcctgcaaccaaactcccatcagcccaatccctgatccctgatcccttccacctgctctgctgatgacccccccagcttcacttctgactcttccccaggaagggaaggggggtcagaagagagggtgagtcctccagaactcttcctccaaggacagaaggctcctgcccccatagtggcctcgaactcctggcactaccaaaggacacttatccacgagagcgcagcatccgaccaggttgtcactgagaagatgtttattttggtcagttgggtttttatgtattatacttagtcaaatgtaatgtggcttctggaatcattgtccagagctgcttccccgtcacctgggcgtcatctggtcctggtaagaggagtgcgtggcccaccaggcccccctgtcacccatgacagttcattcagggccgatggggcagtcgtggttgggaacacagcatttcaagcgtcactttatttcattcgggccccacctgcagctccctcaaagaggcagttgcccagcctctttcccttccagtttattccagagctgccagtggggcctgaggctccttagggttttctctctatttccccctttcttcctcattccctcgtctttcccaaaggcatcacgagtcagtcgcctttcagcaggcagccttggcggtttatcgccctggcaggcaggggccctgcagctctcatgctgcccctgccttggggtcaggttgacaggaggttggagggaaagccttaagctgcaggattctcaccagctgtgtccggcccagttttggggtgtgacctcaatttcaattttgtctgtacttgaacattatgaagatgggggcctctttcagtgaatttgtgaacagcagaattgaccgacagctttccagtacccatggggctaggtcattaaggccacatccacagtctcccccacccttgttccagttgttagttactacctcctctcctgacaatactgtatgtcgtcgagctccccccaggtctacccctcccggccctgcctgctggtgggcttgtcatagccagtgggattgccggtcttgacagctcagtgagctggagatacttggtcacagccaggcgctagcacagctcccttctgttgatgctgtattcccatatcaaaagacacaggggacacccagaaacgccacatcccccaatccatcagtgccaaactagccaacggccccagcttctcagctcgctggatggcggaagctgctactcgtgagcgccagtgcgggtgcagacaatcttctgttgggtggcatcattccaggcccgaagcatgaacagtgcacctgggacagggagcagccccaaattgtcacctgcttctctgcccagcttttcattgctgtgacagtgatggcgaaagagggtaataaccagacacaaactgccaagttgggtggagaaaggagtttctttagctgacagaatctctgaattttaaatcacttagtaagcggctcaagcccaggagggagcagagggatacgagcggagtcccctgcgcgggaccatctggaattggtttagcccaagtggagcctgacagccagaactctgtgtcccccgtctaaccacagctccttttccagagcattccagtcaggctctctgggctgactgggccaggggaggttacaggtaccagttctttaagaagatctttgggcatatacatttttagcctgtgtcattgccccaaatggattcctgtttcaagttcacacctgcagattctaggacctgtgtcctagacttcagggagtcagctgtttctagagttcctaccatggagtgggtctggaggacctgcccggtgggggggcagagccctgctccctccgggtcttcctactcttctctctgctctgacgggatttgttgattctctccattttggtgtctttctcttttagatattgtatcaatctttagaaaaggcatagtctacttgttataaatcgttaggatactgcctcccccagggtctaaaattacatattagaggggaaaagctgaacactgaagtcagttctcaacaatttagaaggaaaacctagaaaacatttggcagaaaattacatttcgatgtttttgaatgaatacgagcaagcttttacaacagtgctgatctaaaaatacttagcacttggcctgagatgcctggtgagcattacaggcaaggggaatctggaggtagccgacctgaggacatggcttctgaacctgtcttttgggagtggtatggaaggtggagcgttcaccagtgacctggaaggcccagcaccaccctccttcccactcttctcatcttgacagagcctgccccagcgctgacgtgtcaggaaaacacccagggaactaggaaggcacttctgcctgaggggcagcctgccttgcccactcctgctctgctcgcctcggatcagctgagccttctgagctggcctctcactgcctccccaaggccccctgcctgccctgtcaggaggcagaaggaagcaggtgtgagggcagtgcaaggagggagcacaacccccagctcccgctccgggctccgacttgtgcacaggcagagcccagaccctggaggaaatcctacctttgaattcaagaacatttggggaatttggaaatctctttgcccccaaacccccattctgtcctacctttaatcaggtcctgctcagcagtgagagcagatgaggtgaaaaggccaagaggtttggctcctgcccactgatagcccctctccccgcagtgtttgtgtgtcaagtggcaaagctgttcttcctggtgaccctgattatatccagtaacacatagactgtgcgcataggcctgctttgtctcctctatcctgggcttttgttttgctttttagttttgcttttagtttttctgtcccttttatttaacgcaccgactagacacacaaagcagttgaatttttatatatatatctgtatattgcacaattataaactcattttgcttgtggctccacacacacaaaaaaagacctgttaaaattatacctgttgcttaattacaatatttctgataaccatagcataggacaagggaaaataaaaaaagaaaaaaaagaaaaaaaaacgacaaatctgtctgctggtcacttcttctgtccaagcagattcgtggtcttttcctcgcttctttcaagggctttcctgtgccaggtgaaggaggctccaggcagcacccaggttttgcactcttgtttctcccgtgcttgtgaaagaggtcccaaggttctgggtgcaggagcgctcccttgacctgctgaagtccggaacgtagtcggcacagcctggtcgccttccacctctgggagctggagtccactggggtggcctgactcccccagtccccttcccgtgacctggtcagggtgagcccatgtggagtcagcctcgcaggcctccctgccagtagggtccgagtgtgtttcatccttcccactctgtcgagcctgggggctggagcggagacgggaggcctggcctgtctcggaacctgtgagctgcaccaggtagaacgccagggaccccagaatcatgtgcgtcagtccaaggggtcccctccaggagtagtgaagactccagaaatgtccctttcttctcccccatcctacgagtaattgcatttgcttttgtaattcttaatgagcaatatctgctagagagtttagctgtaacagttctttttgatcatctttttttaataattagaaacaccaaaaaaatccagaaacttgttcttccaaagcagagagcattataatcaccagggccaaaagcttccctccctgctgtcattgcttcttctgaggcctgaatccaaaagaaaaacagccataggccctttcagtggccgggctacccgtgagcccttcggaggaccagggctggggcagcctctgggcccacatccggggccagctccggcgtgtgttcagtgttagcagtgggtcatgatgctctttcccacccagcctgggataggggcagaggaggcgaggaggccgttgccgctgatgtttggccgtgaacaggtgggtgtctgcgtgcgtccacgtgcgtgttttctgactgacatgaaatcgacgcccgagttagcctcacccggtgacctctagccctgcccggatggagcggggcccacccggttcagtgtttctggggagctggacagtggagtgcaaaaggcttgcagaacttgaagcctgctccttcccttgctaccacggcctcctttccgtttgatttgtcactgcttcaatcaataacagccgctccagagtcagtagtcaatgaatatatgaccaaatatcaccaggactgttactcaatgtgtgccgagcccttgcccatgctgggctcccgtgtatctggacactgtaacgtgtgctgtgtttgctccccttccccttccttctttgccctttacttgtctttctggggtttttctgtttgggtttggtttggtttttatttctccttttgtgttccaaacatgaggttctctctactggtcctcttaactgtggtgttgaggcttatatttgtgtaatttttggtgggtgaaaggaattttgctaagtaaatctcttctgtgtttgaactgaagtctgtattgtaactatgtttaaagtaattgttccagagacaaatatttctagacactttttctttacaaacaaaagcattcggagggagggggatggtgactgagatgagaggggagagctgaacagatgacccctgcccagatcagccagaagccacccaaagcagtggagcccaggagtcccactccaagccagcaagccgaatagctgatgtgttgccactttccaagtcactgcaaaaccaggttttgttccgcccagtggattcttgttttgcttcccctccccccgagattattaccaccatcccgtgcttttaaggaaaggcaagattgatgtttccttgaggggagccaggaggggatgtgtgtgtgcagagctgaagagctggggagaatggggctgggcccacccaagcaggaggctgggacgctctgctgtgggcacaggtcaggctaatgttggcagatgcagctcttcctggacaggccaggtggtgggcattctctctccaaggtgtgccccgtgggcattactgtttaagacacttccgtcacatcccaccccatcctccagggctcaacactgtgacatctctattccccaccctccccttcccagggcaataaaatgaccatggagggggcttgcactctcttggctgtcacccgatcgccagcaaaacttagatgtgagaaaaccccttcccattccatggcgaaaacatctccttagaaaagccattaccctcattaggcatggttttgggctcccaaaacacctgacagcccctccctcctctgagaggcggagagtgctgactgtagtgaccattgcatgccgggtgcagcatctggaagagctaggcagggtgtctgccccctcctgagttgaagtcatgctcccctgtgccagcccagaggccgagagctatggacagcattgccagtaacacaggccaccctgtgcagaagggagctggctccagcctggaaacctgtctgaggttgggagaggtgcacttggggcacagggagaggccgggacacacttagctggagatgtctctaaaagccctgtatcgtattcaccttcagtttttgtgttttgggacaattactttagaaaataagtaggtcgttttaaaaacaaaaattattgattgcttttttgtagtgttcagaaaaaaggttctttgtgtatagccaaatgactgaaagcactgatatatttaaaaacaaaaggcaatttattaaggaaatttgtaccatttcagtaaacctgtctgaatgtacctgtatacgtttcaaaaacaccccccccccactgaatccctgtaacctatttattatataaagagtttgccttataaattt

SEQ ID NO: 151601 - DNA, 1461 bp, Artificial Sequence
  derived and/or modified sequence
atggttgccggtatgctcgggttaagggaagaaaagagcgaagatcaggatctgcaggggctaaaagacaaaccactgaagtttaaaaaagttaagaaagacaagaaggaggagaaggagggaaaacacgaacccgttcaaccttcggcacaccatagcgccgagcccgccgaggcaggcaaagcggagacaagcgaggggtccggaagtgcaccagcggttccggaggcgtccgcctctccaaagcagaggagatccatcatccgtgacaggggccccatgtatgacgaccctactctcccagagggctggactaggaagttgaaacagagaaagagcggccgatctgccggcaagtacgatgtgtacctgattaacccccaaggcaaggccttcaggtctaaagttgagctcatcgcttacttcgaaaaagtgggagacaccagtcttgacccaaacgatttcgactttaccgtcacaggtcggggcagtccgtctagacgcgagcaaaaaccacccaaaaaacccaaatcgcctaaagctcctggcaccggaagaggccggggaagacccaagggatcagggacaaccaggccaaaggccgcaacatctgaaggggtacaggtgaaaagagtcctggagaaatcaccagggaaactattagtcaaaatgcccttccagacatctccgggcggcaaagcagagggaggtggagcgacaacttcaacacaggttatggtgattaaaaggccaggacgcaaaagaaaggccgaggctgacccccaggccattcctaaaaagcggggaaggaagccaggctccgttgtcgccgcggcagcagcagaagcaaaaaaaaaggccgttaaggagtctagcatccgaagtgtccaagagacagtgctgcccattaaaaagaggaaaacccgagaaacagtatccatcgaagtcaaggaggttgtgaagcccctgctggtcagtacacttggcgagaaatcaggaaagggacttaaaacttgcaaatctcccggccgtaaatcgaaggagtcatcccctaagggacgctcaagctccgcctccagcccccctaaaaaggagcaccaccaccatcaccatcattctgagagtcccaaagcgcctgtgcctctgctaccccctctgccccctccacctcccgagccagagagctccgaagacccaacctcgcccccggagcctcaagacctctcttcgtctgtgtgcaaagaggaaaagatgccgcgaggagggtcactggagagtgacggctgtcccaaagagccggccaaaacacaacccgccgttgccacggccgctaccgccgcagagaaatataagcataggggcgagggagagcgaaaggacatagtttcctccagtatgcctcgtcctaacagagaggagcccgtggattctagaactccagttaccgagcgggtgagctag

SEQ ID NO: 151602 - DNA, 816 bp, Artificial Sequence
  derived and/or modified sequence
atggttgccgggatgctaggcctgcgtgaggaaaagagtgaagaccaggatcttcagggcctgaaagataaaccccttaagttcaagaaagtgaaaaaggataaaaaggaggaaaaggagggaaaacatgaacccgtacagccttcagcccaccatagcgccgagccagcagaggctggcaaagctgagacctccgaagggagcgggtcagcaccagctgtgcctgaggccagtgcctcacccaagcagagacggtcgattattcgggatagaggccccatgtacgacgatcccacactcccggaaggatggactaggaagctgaaacagagaaagtcggggcggagtgccggtaaatacgatgtttatctcatcaacccccaaggtaaagcatttcgctctaaggtggagctgatcgcctactttgagaaggtcggagacacatccctggacccgaatgactttgatttcacggtgaccggcagaggctccccctcccggcgggaacagaagccacccaagaagcccaaaagcccaaaagcccctggtacaggtaggggccgaggcagacccaaaggcagtggaaccacaaggccaaaggccgcaacttccgaaggggtacaggttaaaagggtgttggagaagagtcccggcaagcttcttgtaaagatgccattccagacgagccctggggggaaagctgagggaggaggggccacgacatccacccaggtcatggttatcaagaggcccggccgcaagcggtccccccgggcaccacgcacccctcccgcccctctctccccacgaacctag

SEQ ID NO: 151603 - DNA, 153 bp, Artificial Sequence
  derived and/or modified sequence
atggtggccggtatgttgggtttaagggaggaaaagagcgaggaccaggatctgcagggcttaaaggacaagccccttaaatttaagaaggtgaagaaagataaaaaggaagaaaaagagggtaagcacgaacctgttcaaccctctgcctag

SEQ ID NO: 151604 - DNA, 1185 bp, Artificial Sequence
  derived and/or modified sequence
atggtggctggcatgttgggccttagggaagagaagtccgaagaccaggatctccaaggtttaaaagataagcctcttaaattcaagaaggtcaagaaagacaaaaaagaggagaaagaaggcaagcacgagccagttcagccaagtgcccaccatagcgcagagccagccgaggcaggaaaggcagagaccagtgaggggagtggctccgcccccgcggtccctgaggccagtgcatctccgaagcagaggagatccatcatccgggacagaggcccaatgtacgatgaccccacgctccccgagggctggacaaggaagctgaaacagaggaaaagtggaaggagcgccggcaagtacgacgtgtacctgatcaacccacaggggaaggcttttcggtctaaggtggagctcattgcctactttgaaaaggttggcgacacgagtttggaccccaatgactttgattttacagtgaccggacgcgggtccccctctcgccgggagcagaagccacccaaaaagcctaaatcgcctaaggctccaggaacagggcgaggtagggggcgtcccaaaggcagcgggaccaccaggccaaaggccgccacatccgaaggggtccaggttaaacgcgtcctggagaagtcgccagggaagcttcttgttaaaatgccgtttcagacctctccagggggaaaagcagagggcgggggcgccaccacttctactcaggtgatggtcattaaacgacctggacgtaaaagaaaagccgaggccgaccctcaagccataccgaagaagcgtggccggaagcccgggagtgttgtggctgcagctgcggctgaggctaagaagaaggcagttaaagagtcttcgattagaagcgtgcaggagactgtgctcccaatcaaaaagcgtaagaccagggagactgtctccattgaggtgaaagaagttgtgaagccgcttcttgtgagcaccctgggggaaaaatcaggaaagggactcaagacttgcaaatcccccggccggaaaagcaaggagtcttccccaaaaggtcggtcctcctctgcatcatcgccgcctaaaaaagaacatcatcatcatcatcaccacagcgagtcacccaaggccccagtgccaactcgaataaaggccgctgtggtgagttccccctatgggtag

SEQ ID NO: 151605 - DNA, 1461 bp, Artificial Sequence
  derived and/or modified sequence
atggtggccggcatgctgggcctgcgggaggagaagtctgaggaccaggacctgcagggcctgaaggacaagcccctgaagttcaagaaggtgaagaaggacaagaaggaggagaaggagggcaagcatgagcctgtgcagcccagcgcccaccacagcgctgagcctgctgaggccggcaaggccgagaccagcgagggcagcggcagcgccccagctgtgcctgaggccagcgccagccccaagcagaggaggagcatcatccgggaccggggccccatgtatgatgaccccaccctgcctgagggctggaccaggaagctgaagcagaggaagagcggccgctctgctgggaagtatgatgtgtacctgatcaacccccagggcaaggccttccgcagcaaggtggagctgattgcctactttgagaaggtgggggacaccagcctggaccccaatgactttgacttcaccgtgacaggccggggcagccccagcagaagagagcagaagccacccaagaagcccaagagccccaaggcccctggcaccggccggggccggggccggcccaagggcagcggcaccacccggcccaaggccgccaccagcgagggcgtgcaggtgaagagggtgctggagaagagccctgggaagctgctggtgaagatgcccttccagaccagccctgggggcaaggccgagggcggcggggccaccaccagcacccaggtgatggtgatcaagaggcctggcaggaagaggaaggccgaggccgacccccaggccatccccaagaagaggggcaggaagccaggctctgtggtggccgctgctgctgctgaggccaagaagaaggctgtgaaggagagcagcatccgctctgtgcaggagaccgtgctgcccatcaagaagaggaagacccgggagaccgtgtccattgaggtgaaggaggtggtgaagcccctgctggtgtccaccctgggggagaagagcggcaagggcctgaagacctgcaagagccctggcaggaagagcaaggagagcagccccaagggccgcagcagcagcgccagcagcccccccaagaaggagcaccaccaccaccaccaccacagcgagagccccaaggcccctgtgcccctgctgccccccctgcccccacctcctcctgagcctgagagcagcgaggaccccaccagccccccagagccccaggacctgagcagctctgtgtgcaaggaggagaagatgccccggggcggcagcctggagagtgatggctgccccaaggagcccgccaagacccagcctgctgtggccacagctgccacagctgctgagaagtacaagcacagaggagagggggagaggaaggacatcgtgagcagctccatgccccggcccaaccgggaggagcctgtggacagcaggacccctgtgacagagcgggtgtcctag

SEQ ID NO: 151606 - DNA, 816 bp, Artificial Sequence
  derived and/or modified sequence
atggtggccggcatgctgggcctgcgggaggagaagtctgaggaccaggacctgcagggcctgaaggacaagcccctgaagttcaagaaggtgaagaaggacaagaaggaggagaaggagggcaagcatgagcctgtgcagcccagcgcccaccacagcgctgagcctgctgaggccggcaaggccgagaccagcgagggcagcggcagcgccccagctgtgcctgaggccagcgccagccccaagcagaggaggagcatcatccgggaccggggccccatgtatgatgaccccaccctgcctgagggctggaccaggaagctgaagcagaggaagagcggccgctctgctgggaagtatgatgtgtacctgatcaacccccagggcaaggccttccgcagcaaggtggagctgattgcctactttgagaaggtgggggacaccagcctggaccccaatgactttgacttcaccgtgacaggccggggcagccccagcagaagagagcagaagccacccaagaagcccaagagccccaaggcccctggcaccggccggggccggggccggcccaagggcagcggcaccacccggcccaaggccgccaccagcgagggcgtgcaggtgaagagggtgctggagaagagccctgggaagctgctggtgaagatgcccttccagaccagccctgggggcaaggccgagggcggcggggccaccaccagcacccaggtgatggtgatcaagaggcctggcaggaagaggagcccccgggcccccaggaccccaccagcccccctgagccccaggacatag

SEQ ID NO: 151607 - DNA, 153 bp, Artificial Sequence
  derived and/or modified sequence
atggtggccggcatgctgggcctgcgggaggagaagtctgaggaccaggacctgcagggcctgaaggacaagcccctgaagttcaagaaggtgaagaaggacaagaaggaggagaaggagggcaagcatgagcctgtgcagcccagcgcctag

SEQ ID NO: 151608 - DNA, 1185 bp, Artificial Sequence
  derived and/or modified sequence
atggtggccggcatgctgggcctgcgggaggagaagtctgaggaccaggacctgcagggcctgaaggacaagcccctgaagttcaagaaggtgaagaaggacaagaaggaggagaaggagggcaagcatgagcctgtgcagcccagcgcccaccacagcgctgagcctgctgaggccggcaaggccgagaccagcgagggcagcggcagcgccccagctgtgcctgaggccagcgccagccccaagcagaggaggagcatcatccgggaccggggccccatgtatgatgaccccaccctgcctgagggctggaccaggaagctgaagcagaggaagagcggccgctctgctgggaagtatgatgtgtacctgatcaacccccagggcaaggccttccgcagcaaggtggagctgattgcctactttgagaaggtgggggacaccagcctggaccccaatgactttgacttcaccgtgacaggccggggcagccccagcagaagagagcagaagccacccaagaagcccaagagccccaaggcccctggcaccggccggggccggggccggcccaagggcagcggcaccacccggcccaaggccgccaccagcgagggcgtgcaggtgaagagggtgctggagaagagccctgggaagctgctggtgaagatgcccttccagaccagccctgggggcaaggccgagggcggcggggccaccaccagcacccaggtgatggtgatcaagaggcctggcaggaagaggaaggccgaggccgacccccaggccatccccaagaagaggggcaggaagccaggctctgtggtggccgctgctgctgctgaggccaagaagaaggctgtgaaggagagcagcatccgctctgtgcaggagaccgtgctgcccatcaagaagaggaagacccgggagaccgtgtccattgaggtgaaggaggtggtgaagcccctgctggtgtccaccctgggggagaagagcggcaagggcctgaagacctgcaagagccctggcaggaagagcaaggagagcagccccaagggccgcagcagcagcgccagcagcccccccaagaaggagcaccaccaccaccaccaccacagcgagagccccaaggcccctgtgcccacccgcatcaaggctgctgtggtgagcagcccctatggatag

SEQ ID NO: 151609 - DNA, 10505 bp, Artificial Sequence
  derived and/or modified sequence
gcgcgacgtcggccgtgcggggtcccggcgtcggcggcgcgcgcgctccctcctctcggagagagggctgtggtaaaagccgtccggaaaatggccgccgccgccgccgccgcgccgagcggaggaggaggaggaggcgaggaggagagactgctccataaaaatacagactcaccagttcctgctttgatgtgacatgtgactccccagaatacaccttgcttctgtagaccagctccaacaggattccatggtagctgggatgttagggctcagggaagaaaagtcagaagaccaggacctccagggcctcaaggacaaacccctcaagtttaaaaaggtgaagaaagataagaaagaagagaaagagggcaagcatgagcccgtgcagccatcagcccaccactctgctgagcccgcagaggcaggcaaagcagagacatcagaagggtcaggctccgccccggctgtgccggaagcttctgcctcccccaaacagcggcgctccatcatccgtgaccggggacccatgtatgatgaccccaccctgcctgaaggctggacacggaagcttaagcaaaggaaatctggccgctctgctgggaagtatgatgtgtatttgatcaatccccagggaaaagcctttcgctctaaagtggagttgattgcgtacttcgaaaaggtaggcgacacatccctggaccctaatgattttgacttcacggtaactgggagagggagcccctcccggcgagagcagaaaccacctaagaagcccaaatctcccaaagctccaggaactggcagaggccggggacgccccaaagggagcggcaccacgagacccaaggcggccacgtcagagggtgtgcaggtgaaaagggtcctggagaaaagtcctgggaagctccttgtcaagatgccttttcaaacttcgccagggggcaaggctgaggggggtggggccaccacatccacccaggtcatggtgatcaaacgccccggcaggaagcgaaaagctgaggccgaccctcaggccattcccaagaaacggggccgaaagccggggagtgtggtggcagccgctgccgccgaggccaaaaagaaagccgtgaaggagtcttctatccgatctgtgcaggagaccgtactccccatcaagaagcgcaagacccgggagacggtcagcatcgaggtcaaggaagtggtgaagcccctgctggtgtccaccctcggtgagaagagcgggaaaggactgaagacctgtaagagccctgggcggaaaagcaaggagagcagccccaaggggcgcagcagcagcgcctcctcaccccccaagaaggagcaccaccaccatcaccaccactcagagtccccaaaggcccccgtgccactgctcccacccctgcccccacctccacctgagcccgagagctccgaggaccccaccagcccccctgagccccaggacttgagcagcagcgtctgcaaagaggagaagatgcccagaggaggctcactggagagcgacggctgccccaaggagccagctaagactcagcccgcggttgccaccgccgccacggccgcagaaaagtacaaacaccgaggggagggagagcgcaaagacattgtttcatcctccatgccaaggccaaacagagaggagcctgtggacagccggacgcccgtgaccgagagagttagctgactttacacggagcggattgcaaagcaaaccaacaagaataaaggcagctgttgtctcttctccttatgggtagggctctgacaaagcttcccgattaactgaaataaaaaatatttttttttctttcagtaaacttagagtttcgtggcttcagggtgggagtagttggagcattggggatgtttttcttaccgacaagcacagtcaggttgaagacctaaccagggccagaagtagctttgcacttttctaaactaggctccttcaacaaggcttgctgcagatactactgaccagacaagctgttgaccaggcacctcccctcccgcccaaacctttcccccatgtggtcgttagagacagagcgacagagcagttgagaggacactcccgttttcggtgccatcagtgccccgtctacagctcccccagctccccccacctcccccactcccaaccacgttgggacagggaggtgtgaggcaggagagacagttggattctttagagaagatggatatgaccagtggctatggcctgtgcgatcccacccgtggtggctcaagtctggccccacaccagccccaatccaaaactggcaaggacgcttcacaggacaggaaagtggcacctgtctgctccagctctggcatggctaggaggggggagtcccttgaactactgggtgtagactggcctgaaccacaggagaggatggcccagggtgaggtggcatggtccattctcaagggacgtcctccaacgggtggcgctagaggccatggaggcagtaggacaaggtgcaggcaggctggcctggggtcaggccgggcagagcacagcggggtgagagggattcctaatcactcagagcagtctgtgacttagtggacaggggagggggcaaagggggaggagaagaaaatgttcttccagttactttccaattctcctttagggacagcttagaattatttgcactattgagtcttcatgttcccacttcaaaacaaacagatgctctgagagcaaactggcttgaattggtgacatttagtccctcaagccaccagatgtgacagtgttgagaactacctggatttgtatatatacctgcgcttgttttaaagtgggctcagcacatagggttcccacgaagctccgaaactctaagtgtttgctgcaattttataaggacttcctgattggtttctcttctccccttccatttctgccttttgttcatttcatcctttcacttctttcccttcctccatcctcctccttcctagttcatcccttctcttccaggcagccgcggtgcccaaccacacttgtcggctccagtccccagaactctgcctgccctttgtcctcctgctgccagtaccagccccaccctgttttgagccctgaggaggccttgggctctgctgagtccgacctggcctgtctgtgaagagcaagagagcagcaaggtcttgctctcctaggtagccccctcttccctggtaagaaaaagcaaaaggcatttcccaccctgaacaacgagccttttcacccttctactctagagaagtggactggaggagctgggcccgatttggtagttgaggaaagcacagaggcctcctgtggcctgccagtcatcgagtggcccaacaggggctccatgccagccgaccttgacctcactcagaagtccagagtctagcgtagtgcagcagggcagtagcggtaccaatgcagaactcccaagacccgagctgggaccagtacctgggtccccagcccttcctctgctcccccttttccctcggagttcttcttgaatggcaatgttttgcttttgctcgatgcagacagggggccagaacaccacacatttcactgtctgtctggtccatagctgtggtgtaggggcttagaggcatgggcttgctgtgggtttttaattgatcagttttcatgtgggatcccatctttttaacctctgttcaggaagtccttatctagctgcatatcttcatcatattggtatatccttttctgtgtttacagagatgtctcttatatctaaatctgtccaactgagaagtaccttatcaaagtagcaaatgagacagcagtcttatgcttccagaaacacccacaggcatgtcccatgtgagctgctgccatgaactgtcaagtgtgtgttgtcttgtgtatttcagttattgtccctggcttccttactatggtgtaatcatgaaggagtgaaacatcatagaaactgtctagcacttccttgccagtctttagtgatcaggaaccatagttgacagttccaatcagtagcttaagaaaaaaccgtgtttgtctcttctggaatggttagaagtgagggagtttgccccgttctgtttgtagagtctcatagttggactttctagcatatatgtgtccatttccttatgctgtaaaagcaagtcctgcaaccaaactcccatcagcccaatccctgatccctgatcccttccacctgctctgctgatgacccccccagcttcacttctgactcttccccaggaagggaaggggggtcagaagagagggtgagtcctccagaactcttcctccaaggacagaaggctcctgcccccatagtggcctcgaactcctggcactaccaaaggacacttatccacgagagcgcagcatccgaccaggttgtcactgagaagatgtttattttggtcagttgggtttttatgtattatacttagtcaaatgtaatgtggcttctggaatcattgtccagagctgcttccccgtcacctgggcgtcatctggtcctggtaagaggagtgcgtggcccaccaggcccccctgtcacccatgacagttcattcagggccgatggggcagtcgtggttgggaacacagcatttcaagcgtcactttatttcattcgggccccacctgcagctccctcaaagaggcagttgcccagcctctttcccttccagtttattccagagctgccagtggggcctgaggctccttagggttttctctctatttccccctttcttcctcattccctcgtctttcccaaaggcatcacgagtcagtcgcctttcagcaggcagccttggcggtttatcgccctggcaggcaggggccctgcagctctcatgctgcccctgccttggggtcaggttgacaggaggttggagggaaagccttaagctgcaggattctcaccagctgtgtccggcccagttttggggtgtgacctcaatttcaattttgtctgtacttgaacattatgaagatgggggcctctttcagtgaatttgtgaacagcagaattgaccgacagctttccagtacccatggggctaggtcattaaggccacatccacagtctcccccacccttgttccagttgttagttactacctcctctcctgacaatactgtatgtcgtcgagctccccccaggtctacccctcccggccctgcctgctggtgggcttgtcatagccagtgggattgccggtcttgacagctcagtgagctggagatacttggtcacagccaggcgctagcacagctcccttctgttgatgctgtattcccatatcaaaagacacaggggacacccagaaacgccacatcccccaatccatcagtgccaaactagccaacggccccagcttctcagctcgctggatggcggaagctgctactcgtgagcgccagtgcgggtgcagacaatcttctgttgggtggcatcattccaggcccgaagcatgaacagtgcacctgggacagggagcagccccaaattgtcacctgcttctctgcccagcttttcattgctgtgacagtgatggcgaaagagggtaataaccagacacaaactgccaagttgggtggagaaaggagtttctttagctgacagaatctctgaattttaaatcacttagtaagcggctcaagcccaggagggagcagagggatacgagcggagtcccctgcgcgggaccatctggaattggtttagcccaagtggagcctgacagccagaactctgtgtcccccgtctaaccacagctccttttccagagcattccagtcaggctctctgggctgactgggccaggggaggttacaggtaccagttctttaagaagatctttgggcatatacatttttagcctgtgtcattgccccaaatggattcctgtttcaagttcacacctgcagattctaggacctgtgtcctagacttcagggagtcagctgtttctagagttcctaccatggagtgggtctggaggacctgcccggtgggggggcagagccctgctccctccgggtcttcctactcttctctctgctctgacgggatttgttgattctctccattttggtgtctttctcttttagatattgtatcaatctttagaaaaggcatagtctacttgttataaatcgttaggatactgcctcccccagggtctaaaattacatattagaggggaaaagctgaacactgaagtcagttctcaacaatttagaaggaaaacctagaaaacatttggcagaaaattacatttcgatgtttttgaatgaatacgagcaagcttttacaacagtgctgatctaaaaatacttagcacttggcctgagatgcctggtgagcattacaggcaaggggaatctggaggtagccgacctgaggacatggcttctgaacctgtcttttgggagtggtatggaaggtggagcgttcaccagtgacctggaaggcccagcaccaccctccttcccactcttctcatcttgacagagcctgccccagcgctgacgtgtcaggaaaacacccagggaactaggaaggcacttctgcctgaggggcagcctgccttgcccactcctgctctgctcgcctcggatcagctgagccttctgagctggcctctcactgcctccccaaggccccctgcctgccctgtcaggaggcagaaggaagcaggtgtgagggcagtgcaaggagggagcacaacccccagctcccgctccgggctccgacttgtgcacaggcagagcccagaccctggaggaaatcctacctttgaattcaagaacatttggggaatttggaaatctctttgcccccaaacccccattctgtcctacctttaatcaggtcctgctcagcagtgagagcagatgaggtgaaaaggccaagaggtttggctcctgcccactgatagcccctctccccgcagtgtttgtgtgtcaagtggcaaagctgttcttcctggtgaccctgattatatccagtaacacatagactgtgcgcataggcctgctttgtctcctctatcctgggcttttgttttgctttttagttttgcttttagtttttctgtcccttttatttaacgcaccgactagacacacaaagcagttgaatttttatatatatatctgtatattgcacaattataaactcattttgcttgtggctccacacacacaaaaaaagacctgttaaaattatacctgttgcttaattacaatatttctgataaccatagcataggacaagggaaaataaaaaaagaaaaaaaagaaaaaaaaacgacaaatctgtctgctggtcacttcttctgtccaagcagattcgtggtcttttcctcgcttctttcaagggctttcctgtgccaggtgaaggaggctccaggcagcacccaggttttgcactcttgtttctcccgtgcttgtgaaagaggtcccaaggttctgggtgcaggagcgctcccttgacctgctgaagtccggaacgtagtcggcacagcctggtcgccttccacctctgggagctggagtccactggggtggcctgactcccccagtccccttcccgtgacctggtcagggtgagcccatgtggagtcagcctcgcaggcctccctgccagtagggtccgagtgtgtttcatccttcccactctgtcgagcctgggggctggagcggagacgggaggcctggcctgtctcggaacctgtgagctgcaccaggtagaacgccagggaccccagaatcatgtgcgtcagtccaaggggtcccctccaggagtagtgaagactccagaaatgtccctttcttctcccccatcctacgagtaattgcatttgcttttgtaattcttaatgagcaatatctgctagagagtttagctgtaacagttctttttgatcatctttttttaataattagaaacaccaaaaaaatccagaaacttgttcttccaaagcagagagcattataatcaccagggccaaaagcttccctccctgctgtcattgcttcttctgaggcctgaatccaaaagaaaaacagccataggccctttcagtggccgggctacccgtgagcccttcggaggaccagggctggggcagcctctgggcccacatccggggccagctccggcgtgtgttcagtgttagcagtgggtcatgatgctctttcccacccagcctgggataggggcagaggaggcgaggaggccgttgccgctgatgtttggccgtgaacaggtgggtgtctgcgtgcgtccacgtgcgtgttttctgactgacatgaaatcgacgcccgagttagcctcacccggtgacctctagccctgcccggatggagcggggcccacccggttcagtgtttctggggagctggacagtggagtgcaaaaggcttgcagaacttgaagcctgctccttcccttgctaccacggcctcctttccgtttgatttgtcactgcttcaatcaataacagccgctccagagtcagtagtcaatgaatatatgaccaaatatcaccaggactgttactcaatgtgtgccgagcccttgcccatgctgggctcccgtgtatctggacactgtaacgtgtgctgtgtttgctccccttccccttccttctttgccctttacttgtctttctggggtttttctgtttgggtttggtttggtttttatttctccttttgtgttccaaacatgaggttctctctactggtcctcttaactgtggtgttgaggcttatatttgtgtaatttttggtgggtgaaaggaattttgctaagtaaatctcttctgtgtttgaactgaagtctgtattgtaactatgtttaaagtaattgttccagagacaaatatttctagacactttttctttacaaacaaaagcattcggagggagggggatggtgactgagatgagaggggagagctgaacagatgacccctgcccagatcagccagaagccacccaaagcagtggagcccaggagtcccactccaagccagcaagccgaatagctgatgtgttgccactttccaagtcactgcaaaaccaggttttgttccgcccagtggattcttgttttgcttcccctccccccgagattattaccaccatcccgtgcttttaaggaaaggcaagattgatgtttccttgaggggagccaggaggggatgtgtgtgtgcagagctgaagagctggggagaatggggctgggcccacccaagcaggaggctgggacgctctgctgtgggcacaggtcaggctaatgttggcagatgcagctcttcctggacaggccaggtggtgggcattctctctccaaggtgtgccccgtgggcattactgtttaagacacttccgtcacatcccaccccatcctccagggctcaacactgtgacatctctattccccaccctccccttcccagggcaataaaatgaccatggagggggcttgcactctcttggctgtcacccgatcgccagcaaaacttagatgtgagaaaaccccttcccattccatggcgaaaacatctccttagaaaagccattaccctcattaggcatggttttgggctcccaaaacacctgacagcccctccctcctctgagaggcggagagtgctgactgtagtgaccattgcatgccgggtgcagcatctggaagagctaggcagggtgtctgccccctcctgagttgaagtcatgctcccctgtgccagcccagaggccgagagctatggacagcattgccagtaacacaggccaccctgtgcagaagggagctggctccagcctggaaacctgtctgaggttgggagaggtgcacttggggcacagggagaggccgggacacacttagctggagatgtctctaaaagccctgtatcgtattcaccttcagtttttgtgttttgggacaattactttagaaaataagtaggtcgttttaaaaacaaaaattattgattgcttttttgtagtgttcagaaaaaaggttctttgtgtatagccaaatgactgaaagcactgatatatttaaaaacaaaaggcaatttattaaggaaatttgtaccatttcagtaaacctgtctgaatgtacctgtatacgtttcaaaaacaccccccccccactgaatccctgtaacctatttattatataaagagtttgccttataaatttacataaaaatgtccgtttgtgtcttttgttgtaaaaatcaagtgattttttcataaggttcttttactattggaaaagatgggcagcacgcagttttattttatttttgtaagttttttaatacatgtgaaagcaaagaatactcagcatgcctttctaagtgacgcgtttgcaccttttgttgggaagtactgtatcctgtgctgttagcattctcgataaatctctctgtgaaagtga

SEQ ID NO: 151610 - DNA, 1052 bp, Artificial Sequence
  derived and/or modified sequence
atggtagctgggatgttagggctcagggaagaaaagtcagaagaccaggacctccagggcctcaaggacaaacccctcaagtttaaaaaggtgaagaaagataagaaagaagagaaagagggcaagcatgagcccgtgcagccatcagcccaccactctgctgagcccgcagaggcaggcaaagcagagacatcagaagggtcaggctccgccccggctgtgccggaagcttctgcctcccccaaacagcggcgctccatcatccgtgaccggggacccatgtatgatgaccccaccctgcctgaaggctggacacggaagcttaagcaaaggaaatctggccgctctgctgggaagtatgatgtgtatttgatcaatccccagggaaaagcctttcgctctaaagtggagttgattgcgtacttcgaaaaggtaggcgacacatccctggaccctaatgattttgacttcacggtaactgggagagggagcccctcccggcgagagcagaaaccacctaagaagcccaaatctcccaaagctccaggaactggcagaggccggggacgccccaaagggagcggcaccacgagacccaaggcggccacgtcagagggtgtgcaggtgaaaagggtcctggagaaaagtcctgggaagctccttgtcaagatgccttttcaaacttcgccagggggcaaggctgaggggggtggggccaccacatccacccaggtcatggtgatcaaacgccccggcaggaagcgaagcccgagagctccgaggaccccaccagcccccctgagccccaggacttgagcagcagcgtctgcaaagaggagaagatgcccagaggaggctcactggagagcgacggctgccccaaggagccagctaagactcagcccgcggttgccaccgccgccacggccgcagaaaagtacaaacaccgaggggagggagagcgcaaagacattgtttcatcctccatgccaaggccaaacagagaggagcctgtggacagccggacgcccgtgaccgagagagttagctga

SEQ ID NO: 151611 - DNA, 414 bp, Artificial Sequence
  derived and/or modified sequence
gcaggaacaagtaggtggggattattatccacaaaagggactagacattgtgttctgggtcccacaactcatcataaagaggtggttatagttcccatcaggagccgtgggtaggggactgtgcgtccagcagcacccgaggctcttcggcgccagaggctctaaggctccataaaaatacagactcaccagttcctgctttgatgtgacatgtgactccccagaatacaccttgcttctgtagaccagctccaacaggattccatggtagctgggatgttagggctcagggaagaaaagtcagaagaccaggacctccagggcctcaaggacaaacccctcaagtttaaaaaggtgaagaaagataagaaagaagagaaagagggcaagcatgagcccgtgcagccatcagcc

SEQ ID NO: 151612 - DNA, 1685 bp, Artificial Sequence
  derived and/or modified sequence
ggcgcgcgcgctccctcctctcggagagagggctgtggtaaaagccgtccggaaaatggccgccgccgccgccgccgcgccgagcggaggaggaggaggaggcgaggaggagagactggaagaaaagtcagaagaccaggacctccagggcctcaaggacaaacccctcaagtttaaaaaggtgaagaaagataagaaagaagagaaagagggcaagcatgagcccgtgcagccatcagcccaccactctgctgagcccgcagaggcaggcaaagcagagacatcagaagggtcaggctccgccccggctgtgccggaagcttctgcctcccccaaacagcggcgctccatcatccgtgaccggggacccatgtatgatgaccccaccctgcctgaaggctggacacggaagcttaagcaaaggaaatctggccgctctgctgggaagtatgatgtgtatttgatcaatccccagggaaaagcctttcgctctaaagtggagttgattgcgtacttcgaaaaggtaggcgacacatccctggaccctaatgattttgacttcacggtaactgggagagggagcccctcccggcgagagcagaaaccacctaagaagcccaaatctcccaaagctccaggaactggcagaggccggggacgccccaaagggagcggcaccacgagacccaaggcggccacgtcagagggtgtgcaggtgaaaagggtcctggagaaaagtcctgggaagctccttgtcaagatgccttttcaaacttcgccagggggcaaggctgaggggggtggggccaccacatccacccaggtcatggtgatcaaacgccccggcaggaagcgaaaagctgaggccgaccctcaggccattcccaagaaacggggccgaaagccggggagtgtggtggcagccgctgccgccgaggccaaaaagaaagccgtgaaggagtcttctatccgatctgtgcaggagaccgtactccccatcaagaagcgcaagacccgggagacggtcagcatcgaggtcaaggaagtggtgaagcccctgctggtgtccaccctcggtgagaagagcgggaaaggactgaagacctgtaagagccctgggcggaaaagcaaggagagcagccccaaggggcgcagcagcagcgcctcctcaccccccaagaaggagcaccaccaccatcaccaccactcagagtccccaaaggcccccgtgccactgctcccacccctgcccccacctccacctgagcccgagagctccgaggaccccaccagcccccctgagccccaggacttgagcagcagcgtctgcaaagaggagaagatgcccagaggaggctcactggagagcgacggctgccccaaggagccagctaagactcagcccgcggttgccaccgccgccacggccgcagaaaagtacaaacaccgaggggagggagagcgcaaagacattgtttcatcctccatgccaaggccaaacagagaggagcctgtggacagccggacgcccgtgaccgagagagttagctgactttacacggagcggattgcaaagcaaaccaacaagaataaaggcagctgttgtctcttctccttatgggtagggctctgacaaagcttcccgattaactgaaataaaaaatatttttttttctttcagtaaa

SEQ ID NO: 151613 - DNA, 9892 bp, Artificial Sequence
  derived and/or modified sequence
ccggcgtcggcggcgcgcgcgctccctcctctcggagagagggctgtggtaaaagccgtccggaaaatggccgccgccgccgccgccgcgccgagcggaggaggaggaggaggcgaggaggagagactgctccataaaaatacagactcaccagttcctgctttgatgtgacatgtgactccccagaatacaccttgcttctgtagaccagctccaacaggattccatggtagctgggatgttagggctcagggaagaaaagtcagaagaccaggacctccagggcctcaaggacaaacccctcaagtttaaaaaggtgaagaaagataagaaagaagagaaagagggcaagcatgagcccgtgcagccatcagcccaccactctgctgagcccgcagaggcaggcaaagcagagacatcagaagggtcaggctccgccccggctgtgccggaagcttctgcctcccccaaacagcggcgctccatcatccgtgaccggggacccatgtatgatgaccccaccctgcctgaaggctggacacggaagcttaagcaaaggaaatctggccgctctgctgggaagtatgatgtgtatttgatcaatccccagggaaaagcctttcgctctaaagtggagttgattgcgtacttcgaaaaggtaggcgacacatccctggaccctaatgattttgacttcacggtaactgggagagggagcccctcccggcgagagcagaaaccacctaagaagcccaaatctcccaaagctccaggaactggcagaggccggggacgccccaaagggagcggcaccacgagacccaaggcggccacgtcagagggtgtgcaggtgaaaagggtcctggagaaaagtcctgggaagctccttgtcaagatgccttttcaaacttcgccagggggcaaggctgaggggggtggggccaccacatccacccaggtcatggtgatcaaacgccccggcaggaagcgaaaagctgaggccgaccctcaggccattcccaagaaacggggccgaaagccggggagtgtggtggcagccgctgccgccgaggccaaaaagaaagccgtgaaggagtcttctatccgatctgtgcaggagaccgtactccccatcaagaagcgcaagacccgggagacggtcagcatcgaggtcaaggaagtggtgaagcccctgctggtgtccaccctcggtgagaagagcgggaaaggactgaagacctgtaagagccctgggcggaaaagcaaggagagcagccccaaggggcgcagcagcagcgcctcctcaccccccaagaaggagcaccaccaccatcaccaccactcagagtccccaaaggcccccgtaccaacaagaataaaggcagctgttgtctcttctccttatgggtagggctctgacaaagcttcccgattaactgaaataaaaaatatttttttttctttcagtaaacttagagtttcgtggcttcagggtgggagtagttggagcattggggatgtttttcttaccgacaagcacagtcaggttgaagacctaaccagggccagaagtagctttgcacttttctaaactaggctccttcaacaaggcttgctgcagatactactgaccagacaagctgttgaccaggcacctcccctcccgcccaaacctttcccccatgtggtcgttagagacagagcgacagagcagttgagaggacactcccgttttcggtgccatcagtgccccgtctacagctcccccagctccccccacctcccccactcccaaccacgttgggacagggaggtgtgaggcaggagagacagttggattctttagagaagatggatatgaccagtggctatggcctgtgcgatcccacccgtggtggctcaagtctggccccacaccagccccaatccaaaactggcaaggacgcttcacaggacaggaaagtggcacctgtctgctccagctctggcatggctaggaggggggagtcccttgaactactgggtgtagactggcctgaaccacaggagaggatggcccagggtgaggtggcatggtccattctcaagggacgtcctccaacgggtggcgctagaggccatggaggcagtaggacaaggtgcaggcaggctggcctggggtcaggccgggcagagcacagcggggtgagagggattcctaatcactcagagcagtctgtgacttagtggacaggggagggggcaaagggggaggagaagaaaatgttcttccagttactttccaattctcctttagggacagcttagaattatttgcactattgagtcttcatgttcccacttcaaaacaaacagatgctctgagagcaaactggcttgaattggtgacatttagtccctcaagccaccagatgtgacagtgttgagaactacctggatttgtatatatacctgcgcttgttttaaagtgggctcagcacatagggttcccacgaagctccgaaactctaagtgtttgctgcaattttataaggacttcctgattggtttctcttctccccttccatttctgccttttgttcatttcatcctttcacttctttcccttcctccatcctcctccttcctagttcatcccttctcttccaggcagccgcggtgcccaaccacacttgtcggctccagtccccagaactctgcctgccctttgtcctcctgctgccagtaccagccccaccctgttttgagccctgaggaggccttgggctctgctgagtccgacctggcctgtctgtgaagagcaagagagcagcaaggtcttgctctcctaggtagccccctcttccctggtaagaaaaagcaaaaggcatttcccaccctgaacaacgagccttttcacccttctactctagagaagtggactggaggagctgggcccgatttggtagttgaggaaagcacagaggcctcctgtggcctgccagtcatcgagtggcccaacaggggctccatgccagccgaccttgacctcactcagaagtccagagtctagcgtagtgcagcagggcagtagcggtaccaatgcagaactcccaagacccgagctgggaccagtacctgggtccccagcccttcctctgctcccccttttccctcggagttcttcttgaatggcaatgttttgcttttgctcgatgcagacagggggccagaacaccacacatttcactgtctgtctggtccatagctgtggtgtaggggcttagaggcatgggcttgctgtgggtttttaattgatcagttttcatgtgggatcccatctttttaacctctgttcaggaagtccttatctagctgcatatcttcatcatattggtatatccttttctgtgtttacagagatgtctcttatatctaaatctgtccaactgagaagtaccttatcaaagtagcaaatgagacagcagtcttatgcttccagaaacacccacaggcatgtcccatgtgagctgctgccatgaactgtcaagtgtgtgttgtcttgtgtatttcagttattgtccctggcttccttactatggtgtaatcatgaaggagtgaaacatcatagaaactgtctagcacttccttgccagtctttagtgatcaggaaccatagttgacagttccaatcagtagcttaagaaaaaaccgtgtttgtctcttctggaatggttagaagtgagggagtttgccccgttctgtttgtagagtctcatagttggactttctagcatatatgtgtccatttccttatgctgtaaaagcaagtcctgcaaccaaactcccatcagcccaatccctgatccctgatcccttccacctgctctgctgatgacccccccagcttcacttctgactcttccccaggaagggaaggggggtcagaagagagggtgagtcctccagaactcttcctccaaggacagaaggctcctgcccccatagtggcctcgaactcctggcactaccaaaggacacttatccacgagagcgcagcatccgaccaggttgtcactgagaagatgtttattttggtcagttgggtttttatgtattatacttagtcaaatgtaatgtggcttctggaatcattgtccagagctgcttccccgtcacctgggcgtcatctggtcctggtaagaggagtgcgtggcccaccaggcccccctgtcacccatgacagttcattcagggccgatggggcagtcgtggttgggaacacagcatttcaagcgtcactttatttcattcgggccccacctgcagctccctcaaagaggcagttgcccagcctctttcccttccagtttattccagagctgccagtggggcctgaggctccttagggttttctctctatttccccctttcttcctcattccctcgtctttcccaaaggcatcacgagtcagtcgcctttcagcaggcagccttggcggtttatcgccctggcaggcaggggccctgcagctctcatgctgcccctgccttggggtcaggttgacaggaggttggagggaaagccttaagctgcaggattctcaccagctgtgtccggcccagttttggggtgtgacctcaatttcaattttgtctgtacttgaacattatgaagatgggggcctctttcagtgaatttgtgaacagcagaattgaccgacagctttccagtacccatggggctaggtcattaaggccacatccacagtctcccccacccttgttccagttgttagttactacctcctctcctgacaatactgtatgtcgtcgagctccccccaggtctacccctcccggccctgcctgctggtgggcttgtcatagccagtgggattgccggtcttgacagctcagtgagctggagatacttggtcacagccaggcgctagcacagctcccttctgttgatgctgtattcccatatcaaaagacacaggggacacccagaaacgccacatcccccaatccatcagtgccaaactagccaacggccccagcttctcagctcgctggatggcggaagctgctactcgtgagcgccagtgcgggtgcagacaatcttctgttgggtggcatcattccaggcccgaagcatgaacagtgcacctgggacagggagcagccccaaattgtcacctgcttctctgcccagcttttcattgctgtgacagtgatggcgaaagagggtaataaccagacacaaactgccaagttgggtggagaaaggagtttctttagctgacagaatctctgaattttaaatcacttagtaagcggctcaagcccaggagggagcagagggatacgagcggagtcccctgcgcgggaccatctggaattggtttagcccaagtggagcctgacagccagaactctgtgtcccccgtctaaccacagctccttttccagagcattccagtcaggctctctgggctgactgggccaggggaggttacaggtaccagttctttaagaagatctttgggcatatacatttttagcctgtgtcattgccccaaatggattcctgtttcaagttcacacctgcagattctaggacctgtgtcctagacttcagggagtcagctgtttctagagttcctaccatggagtgggtctggaggacctgcccggtgggggggcagagccctgctccctccgggtcttcctactcttctctctgctctgacgggatttgttgattctctccattttggtgtctttctcttttagatattgtatcaatctttagaaaaggcatagtctacttgttataaatcgttaggatactgcctcccccagggtctaaaattacatattagaggggaaaagctgaacactgaagtcagttctcaacaatttagaaggaaaacctagaaaacatttggcagaaaattacatttcgatgtttttgaatgaatacgagcaagcttttacaacagtgctgatctaaaaatacttagcacttggcctgagatgcctggtgagcattacaggcaaggggaatctggaggtagccgacctgaggacatggcttctgaacctgtcttttgggagtggtatggaaggtggagcgttcaccagtgacctggaaggcccagcaccaccctccttcccactcttctcatcttgacagagcctgccccagcgctgacgtgtcaggaaaacacccagggaactaggaaggcacttctgcctgaggggcagcctgccttgcccactcctgctctgctcgcctcggatcagctgagccttctgagctggcctctcactgcctccccaaggccccctgcctgccctgtcaggaggcagaaggaagcaggtgtgagggcagtgcaaggagggagcacaacccccagctcccgctccgggctccgacttgtgcacaggcagagcccagaccctggaggaaatcctacctttgaattcaagaacatttggggaatttggaaatctctttgcccccaaacccccattctgtcctacctttaatcaggtcctgctcagcagtgagagcagatgaggtgaaaaggccaagaggtttggctcctgcccactgatagcccctctccccgcagtgtttgtgtgtcaagtggcaaagctgttcttcctggtgaccctgattatatccagtaacacatagactgtgcgcataggcctgctttgtctcctctatcctgggcttttgttttgctttttagttttgcttttagtttttctgtcccttttatttaacgcaccgactagacacacaaagcagttgaatttttatatatatatctgtatattgcacaattataaactcattttgcttgtggctccacacacacaaaaaaagacctgttaaaattatacctgttgcttaattacaatatttctgataaccatagcataggacaagggaaaataaaaaaagaaaaaaaagaaaaaaaaacgacaaatctgtctgctggtcacttcttctgtccaagcagattcgtggtcttttcctcgcttctttcaagggctttcctgtgccaggtgaaggaggctccaggcagcacccaggttttgcactcttgtttctcccgtgcttgtgaaagaggtcccaaggttctgggtgcaggagcgctcccttgacctgctgaagtccggaacgtagtcggcacagcctggtcgccttccacctctgggagctggagtccactggggtggcctgactcccccagtccccttcccgtgacctggtcagggtgagcccatgtggagtcagcctcgcaggcctccctgccagtagggtccgagtgtgtttcatccttcccactctgtcgagcctgggggctggagcggagacgggaggcctggcctgtctcggaacctgtgagctgcaccaggtagaacgccagggaccccagaatcatgtgcgtcagtccaaggggtcccctccaggagtagtgaagactccagaaatgtccctttcttctcccccatcctacgagtaattgcatttgcttttgtaattcttaatgagcaatatctgctagagagtttagctgtaacagttctttttgatcatctttttttaataattagaaacaccaaaaaaatccagaaacttgttcttccaaagcagagagcattataatcaccagggccaaaagcttccctccctgctgtcattgcttcttctgaggcctgaatccaaaagaaaaacagccataggccctttcagtggccgggctacccgtgagcccttcggaggaccagggctggggcagcctctgggcccacatccggggccagctccggcgtgtgttcagtgttagcagtgggtcatgatgctctttcccacccagcctgggataggggcagaggaggcgaggaggccgttgccgctgatgtttggccgtgaacaggtgggtgtctgcgtgcgtccacgtgcgtgttttctgactgacatgaaatcgacgcccgagttagcctcacccggtgacctctagccctgcccggatggagcggggcccacccggttcagtgtttctggggagctggacagtggagtgcaaaaggcttgcagaacttgaagcctgctccttcccttgctaccacggcctcctttccgtttgatttgtcactgcttcaatcaataacagccgctccagagtcagtagtcaatgaatatatgaccaaatatcaccaggactgttactcaatgtgtgccgagcccttgcccatgctgggctcccgtgtatctggacactgtaacgtgtgctgtgtttgctccccttccccttccttctttgccctttacttgtctttctggggtttttctgtttgggtttggtttggtttttatttctccttttgtgttccaaacatgaggttctctctactggtcctcttaactgtggtgttgaggcttatatttgtgtaatttttggtgggtgaaaggaattttgctaagtaaatctcttctgtgtttgaactgaagtctgtattgtaactatgtttaaagtaattgttccagagacaaatatttctagacactttttctttacaaacaaaagcattcggagggagggggatggtgactgagatgagaggggagagctgaacagatgacccctgcccagatcagccagaagccacccaaagcagtggagcccaggagtcccactccaagccagcaagccgaatagctgatgtgttgccactttccaagtcactgcaaaaccaggttttgttccgcccagtggattcttgttttgcttcccctccccccgagattattaccaccatcccgtgcttttaaggaaaggcaagattgatgtttccttgaggggagccaggaggggatgtgtgtgtgcagagctgaagagctggggagaatggggctgggcccacccaagcaggaggctgggacgctctgctgtgggcacaggtcaggctaatgttggcagatgcagctcttcctggacaggccaggtggtgggcattctctctccaaggtgtgccccgtgggcattactgtttaagacacttccgtcacatcccaccccatcctccagggctcaacactgtgacatctctattccccaccctccccttcccagggcaataaaatgaccatggagggggcttgcactctcttggctgtcacccgatcgccagcaaaacttagatgtgagaaaaccccttcccattccatggcgaaaacatctccttagaaaagccattaccctcattaggcatggttttgggctcccaaaacacctgacagcccctccctcctctgagaggcggagagtgctgactgtagtgaccattgcatgccgggtgcagcatctggaagagctaggcagggtgtctgccccctcctgagttgaagtcatgctcccctgtgccagcccagaggccgagagctatggacagcattgccagtaacacaggccaccctgtgcagaagggagctggctccagcctggaaacctgtctgaggttgggagaggtgcacttggggcacagggagaggccgggacacacttagctggagatgtctctaaaagccctgtatcgtattcaccttcagtttttgtgttttgggacaattactttagaaaataagtaggtcgttttaaaaacaaaaattattgattgcttttttgtagtgttcagaaaaaaggttctttgtgtatagccaaatgactgaaagcactgatatatttaaaaacaaaaggcaatttattaaggaaatttgtaccatttcagtaaacctgtctgaatgtacctgtatacgtttcaaaaacaccccccccccactgaatccctgtaacctatttattatataaagagtttgccttataaattt

SEQ ID NO: 151614 - DNA, 1461 bp, Artificial Sequence
  derived and/or modified sequence
atggtggccggcatgctgggcctgcgggaggagaagagcgaggaccaggacctgcagggcctgaaagacaagccacttaaatttaaaaaagtgaaaaaggataaaaaggaggaaaaggaaggtaagcacgagccagtacagcccagtgcgcaccactcagccgaaccagccgaagctggcaaagccgaaacctccgagggatcaggcagtgcacccgcggtaccggaggcatctgcgtctcctaaacaacggcgatccattattcgagatcggggtccaatgtatgacgacccaactctcccagaaggttggacccgcaagctgaagcagagaaagtcaggccgttccgctggtaaatacgatgtgtacctcatcaatccccaggggaaagccttccgtagcaaagtggaattgatcgcctacttcgaaaaggtaggtgatactagcctggatcctaacgatttcgatttcactgttacaggtaggggctctccttcccgccgcgagcagaaaccccccaaaaaaccaaaatctcctaaagcccctggcacgggacgtggccgaggccggcccaaggggagcgggacaactcgaccaaaggccgccactagcgaaggtgtacaagtgaaaagggtcctggagaaaagccccgggaagctgctggttaaaatgccgtttcaaacatccccaggaggcaaggccgaagggggaggcgccacaactagcacacaggtgatggtgataaaacggccaggccggaaaaggaaggcagaggcagatccacaggccattcccaagaaacgaggccgaaagcctgggagtgtagtggctgccgcggccgctgaggccaaaaaaaaggctgtgaaagagagcagtattaggtctgttcaggagaccgtgcttccaatcaaaaaaagaaaaaccagggagacggtgtcaatcgaggtgaaggaggtagtgaagccacttctggtgagcactctgggcgagaagtctggcaaaggactgaagacttgcaagagcccgggcagaaaaagcaaagaatcctcccccaagggacgcagctcttcagcaagttccccccctaagaaggaacatcaccaccatcaccaccatagcgagagccctaaggcccctgtgccactcttgccaccactaccaccaccaccgccagagccagagtcttcagaggatcctacctcaccacccgagccacaggaccttagctcctctgtctgtaaggaagaaaagatgccaaggggtggtagcctagaatctgacggttgtcctaaagagcctgcaaagacccagccagctgtggcaacggctgccaccgcagcggagaagtataagcacagaggtgaaggtgagcggaaagatattgtttctagctcgatgcccagacccaacagggaggagccagtagacagtaggacccccgtaaccgaacgcgtgagctag

SEQ ID NO: 151615 - DNA, 816 bp, Artificial Sequence
  derived and/or modified sequence
atggtggccggcatgctgggcctgcgggaggagaagagcgaggaccaagaccttcagggcttaaaagacaagccactgaaattcaagaaggtgaagaaggataagaaggaagagaaggagggcaagcatgaacctgtacagccatcagctcaccacagcgccgagcccgctgaagccgggaaggcggagacctctgagggttctggttccgcccccgccgtccccgaggcttctgccagccctaagcagagacgatccatcatccgggacaggggtcccatgtacgacgaccctacactgcctgagggctggactaggaagctgaagcaacgtaagtcaggtaggtctgctgggaaatacgatgtttaccttattaatccgcagggaaaggcttttagatctaaggtcgaacttattgcctacttcgaaaaggtaggcgacaccagcctagacccaaacgacttcgacttcactgtgactggaagaggaagtcctagccgaagggaacagaagcccccgaagaaacctaagtcccctaaggctcctggtacagggcgcgggaggggtcggcccaagggctcgggaaccacacgtccgaaggctgcaacatcagagggggtccaggttaagcgcgtgctggagaagagtccagggaagctccttgtcaagatgccgttccagacatccccggggggaaaggcggaagggggcggagccacaacttcaacacaggtgatggtcattaagaggcccggccgtaagcggagtccgcgagccccccggactccccccgcccctcttagccctcggacatag

SEQ ID NO: 151616 - DNA, 153 bp, Artificial Sequence
  derived and/or modified sequence
atggtggccggcatgctgggcctgcgggaggagaagagcgaggaccaagacctgcagggcctgaaagataagccactgaagtttaaaaaggtgaaaaaggacaaaaaggaggaaaaagagggcaaacatgaaccagtgcagccctccgcttag

SEQ ID NO: 151617 - DNA, 1185 bp, Artificial Sequence
  derived and/or modified sequence
atggtggccggcatgctgggcctgcgggaggagaagagcgaggaccaggacctgcagggcttgaaagacaaacccctgaagttcaagaaggtgaagaaagataaaaaggaggagaaggaaggcaagcacgaacctgtgcagccaagcgctcaccacagcgccgaacctgcagaagctgggaaagcagagacctctgagggttcgggttctgcccccgcagtgccggaggcctctgcctcccctaaacagagacggagtattatcagagaccggggacctatgtatgacgaccctacgttacccgagggctggacacggaagctgaagcagaggaagtccgggcgatctgcagggaagtacgacgtgtacttgattaatccgcaaggtaaggcatttagatccaaagttgaactgatcgcctactttgagaaagtgggcgataccagcctggaccctaacgattttgatttcactgtcacaggacggggtagtccctcaagacgagaacaaaagcctccgaagaagcccaagtccccaaaggcgcctggcaccggtcggggcaggggcagaccgaagggatctggcaccaccaggcctaaggccgcaacatcagaaggagtccaagttaaacgagtcctcgagaagtctcccggcaagcttctggtgaagatgccctttcagaccagccccggcggcaaggccgagggagggggagcgacaaccagcacgcaggtgatggtaatcaaaagaccgggtcggaagcgaaaagcggaggcagatccgcaggccattcccaaaaagcgaggccgcaagccggggagcgtagtggccgctgcggccgcggaagcaaagaaaaaggctgtcaaagaatccagcattagatcagtccaggagaccgttcttcccatcaagaagagaaagacccgcgaaacagtcagtatagaagtcaaggaagtggtgaaacccttattggtctctacgcttggcgagaaatccgggaaaggactgaagacatgtaagtctcctggacgcaaatctaaggagtccagccctaaaggcaggtcttcatctgctagctcgcctcctaaaaaagagcatcaccatcatcaccaccacagcgagagcccaaaggctcctgtgccaactcgaataaaggctgccgttgtgtcgtccccatacggctag

SEQ ID NO: 151618 - DNA, 1461 bp, Artificial Sequence
  derived and/or modified sequence
atggtggccggaatgttaggcttacgggaggagaaatcagaggaccaggacctgcagggcctgaaggacaagcctcttaaattcaagaaggtcaagaaggataaaaaggaggagaaagagggcaaacacgagcctgtgcagccttccgcgcaccactccgccgaacccgctgaagctggcaaggcagaaaccagcgaaggatcgggatctgccccagccgtccctgaagctagcgcatcaccaaaacagcgaaggtctataatccgagaccgtggccctatgtatgacgatcccaccctgcctgaaggctggactaggaaacttaagcagcggaaaagcggcaggagcgccggaaaatatgacgtgtacctcatcaatccccagggaaaagccttcaggtcaaaggtagaactcattgcttattttgaaaaggtgggagacaccagccttgacccaaatgacttcgattttaccgtcacaggaaggggctccccctctaggagagaacagaaaccaccaaaaaagccaaaaagtccgaaggcccctggcaccgggagagggcgtggtcggccaaaaggctccggcactacgagacctaaggctgccacctccgaaggcgtgcaggtgaagagggttttggagaaaagtcctggcaaacttctggttaaaatgccctttcagacctcccccggaggaaaggctgagggaggaggggcaaccaccagtacccaggtcatggttattaagagacccggacgcaaacggaaagcagaggcagatccacaggctatccccaaaaaacgcggtaggaagccaggaagcgttgtggccgctgccgcagctgaggctaaaaaaaaagctgttaaggaaagctcaataaggtcagtacaggagacggtgttgcctatcaagaagagaaagactagggaaaccgtgtcaatcgaagtgaaagaggtggtgaagcctcttcttgtgtccacgctgggggaaaaatcaggtaaaggcttgaaaacatgcaaaagcccaggcagaaagagcaaagagtcctccccgaaaggacgaagctcttcagccagctcccccccaaaaaaggagcatcatcaccatcatcatcacagtgagagcccaaaagctccggtgccgttgctgcccccacttccacccccaccgcctgagccagagagctctgaagacccgactagtccgccagaaccccaggatctgagttccagtgtttgcaaggaggagaaaatgccgcgaggtggcagcctggagtcagacggatgtccaaaagagcccgcaaagacacaaccagctgtggcgaccgcggcaaccgctgccgaaaaatacaaacatagaggagagggagagcggaaggacattgtctcatcctccatgccgaggccaaacagggaggagccagttgatagccggacccctgtcaccgaaagggtatcatag

SEQ ID NO: 151619 - DNA, 816 bp, Artificial Sequence
  derived and/or modified sequence
atggtggccggaatgctagggctgagggaggagaagtctgaggaccaggacctacagggactaaaggacaaaccgctgaagtttaagaaggtaaagaaggataaaaaggaagagaaagaaggtaaacacgagcctgtccagcccagcgctcaccacagcgccgaacctgctgaagcaggcaaagcggagactagtgaaggctcgggttctgctcctgccgtccctgaggcaagcgctagcccaaagcagaggcgaagcatcattagagatcgagggcctatgtacgacgaccctacgctccctgagggatggaccagaaagctcaagcaacggaagagcggcaggagtgctggaaagtacgatgtttatctaattaacccgcaggggaaggccttcaggtccaaagtagaactcatcgcttatttcgaaaaagtgggagataccagcctcgatccgaacgacttcgatttcactgtgacaggaagagggagcccaagcaggcgagagcagaaaccacctaagaaacccaagtcacccaaagccccaggcaccggcaggggtcgcggaagaccaaagggctcaggaactacacggcctaaggcggctacatctgagggagtgcaggtgaaacgcgtacttgaaaaaagccccggtaaactgctggtcaagatgccattccagacatccccaggtgggaaagccgagggtgggggtgcgactaccagtacccaggtgatggtgatcaaaagaccagggagaaagcgaagtcccagggcccctagaacccctcctgctccacttagcccgaggacttag

SEQ ID NO: 151620 - DNA, 153 bp, Artificial Sequence
  derived and/or modified sequence
atggtagccggaatgttaggcttacgggaggaaaagagcgaggatcaggatctacaggggctgaaggacaagcccctgaaatttaagaaagtgaagaaagacaagaaggaagagaaagaaggaaagcacgagccggtgcagccttcagcgtag

SEQ ID NO: 151621 - DNA, 1185 bp, Artificial Sequence
  derived and/or modified sequence
atggttgcaggcatgctgggcctgcgggaggaaaagtctgaggaccaggacctgcaaggtttgaaagataaacccttaaaattcaaaaaagttaaaaaagataaaaaagaagagaaggaagggaagcacgaacctgtgcagcctagcgcacaccattcagcagagcccgcagaggctggcaaagctgagacatctgaaggatctgggagcgcccctgctgtgccagaggctagcgcctcacctaagcagcgaagatctatcatacgagacagaggacctatgtatgatgaccccactctccctgagggatggacacgtaagctgaagcagcggaaatcggggcgaagcgccggaaagtacgacgtatatctgatcaatccccaaggaaaagccttccgctctaaggtggagctaattgcttacttcgagaaagtcggcgacacctccctggatcccaacgatttcgatttcaccgttacagggaggggtagtcccagtagacgcgagcagaagccacctaagaagccaaaaagcccaaaggccccagggactggcaggggccgaggcagacctaagggttcggggacaacacgtcctaaggcagcaactagcgaaggagttcaggtgaagagagttcttgagaaaagccctggaaaattgctcgtgaaaatgccatttcagacgagccccggaggtaaggcagagggaggcggtgctacgacaagtacacaggtgatggtaatcaagcgcccagggcgtaaacgaaaagccgaggccgacccacaggccattcctaaaaaaagagggaggaaaccaggctcggtagtggcagctgctgccgcagaggcgaagaagaaagcagtcaaggagtccagcattcgtagcgtccaggaaacagtcttaccaattaagaaacgcaaaacaagggagactgtctccattgaggtgaaagaggtggtcaaacctttgctcgttagtacgctgggagagaaatcagggaaggggttaaaaacttgcaaaagcccagggaggaagagcaaggagagttcacctaagggccgttcttcttccgccagttctccacctaagaaggagcaccatcatcaccaccaccactcagaatcccctaaagccccagtacctacccgaattaaagcagccgtggtgtcgtccccctatggctag

SEQ ID NO: 151622 - DNA, 1461 bp, Artificial Sequence
  derived and/or modified sequence
atggtggccggcatgctgggcctgagagaggagaagagcgaggaccaggacctgcagggcctgaaggacaagcccctgaagttcaagaaggtgaagaaggacaagaaggaggagaaggagggcaagcacgagcccgtgcagcccagcgcccaccacagcgccgagcccgccgaggccggcaaggccgagaccagcgagggcagcggcagcgcccccgccgtgcccgaggccagcgccagccccaagcagagaagaagcatcatcagagacagaggccccatgtacgacgaccccaccctgcccgagggctggaccagaaagctgaagcagagaaagagcggcagaagcgccggcaagtacgacgtgtacctgatcaacccccagggcaaggccttcagaagcaaggtggagctgatcgcctacttcgagaaggtgggcgacaccagcctggaccccaacgacttcgacttcaccgtgaccggcagaggcagccccagcagaagagagcagaagccccccaagaagcccaagagccccaaggcccccggcaccggcagaggcagaggcagacccaagggcagcggcaccaccagacccaaggccgccaccagcgagggcgtgcaggtgaagagagtgctggagaagagccccggcaagctgctggtgaagatgcccttccagaccagccccggcggcaaggccgagggcggcggcgccaccaccagcacccaggtgatggtgatcaagagacccggcagaaagagaaaggccgaggccgacccccaggccatccccaagaagagaggcagaaagcccggcagcgtggtggccgccgccgccgccgaggccaagaagaaggccgtgaaggagagcagcatcagaagcgtgcaggagaccgtgctgcccatcaagaagagaaagaccagagagaccgtgagcatcgaggtgaaggaggtggtgaagcccctgctggtgagcaccctgggcgagaagagcggcaagggcctgaagacctgcaagagccccggcagaaagagcaaggagagcagccccaagggcagaagcagcagcgccagcagcccccccaagaaggagcaccaccaccaccaccaccacagcgagagccccaaggcccccgtgcccctgctgccccccctgcccccccccccccccgagcccgagagcagcgaggaccccaccagcccccccgagccccaggacctgagcagcagcgtgtgcaaggaggagaagatgcccagaggcggcagcctggagagcgacggctgccccaaggagcccgccaagacccagcccgccgtggccaccgccgccaccgccgccgagaagtacaagcacagaggcgagggcgagagaaaggacatcgtgagcagcagcatgcccagacccaacagagaggagcccgtggacagcagaacccccgtgaccgagagagtgagctag

SEQ ID NO: 151623 - DNA, 816 bp, Artificial Sequence
  derived and/or modified sequence
atggtggccggcatgctgggcctgagagaggagaagagcgaggaccaggacctgcagggcctgaaggacaagcccctgaagttcaagaaggtgaagaaggacaagaaggaggagaaggagggcaagcacgagcccgtgcagcccagcgcccaccacagcgccgagcccgccgaggccggcaaggccgagaccagcgagggcagcggcagcgcccccgccgtgcccgaggccagcgccagccccaagcagagaagaagcatcatcagagacagaggccccatgtacgacgaccccaccctgcccgagggctggaccagaaagctgaagcagagaaagagcggcagaagcgccggcaagtacgacgtgtacctgatcaacccccagggcaaggccttcagaagcaaggtggagctgatcgcctacttcgagaaggtgggcgacaccagcctggaccccaacgacttcgacttcaccgtgaccggcagaggcagccccagcagaagagagcagaagccccccaagaagcccaagagccccaaggcccccggcaccggcagaggcagaggcagacccaagggcagcggcaccaccagacccaaggccgccaccagcgagggcgtgcaggtgaagagagtgctggagaagagccccggcaagctgctggtgaagatgcccttccagaccagccccggcggcaaggccgagggcggcggcgccaccaccagcacccaggtgatggtgatcaagagacccggcagaaagagaagccccagagcccccagaaccccccccgcccccctgagccccagaacctag

SEQ ID NO: 151624 - DNA, 153 bp, Artificial Sequence
  derived and/or modified sequence
atggtggccggcatgctgggcctgagagaggagaagagcgaggaccaggacctgcagggcctgaaggacaagcccctgaagttcaagaaggtgaagaaggacaagaaggaggagaaggagggcaagcacgagcccgtgcagcccagcgcctag

SEQ ID NO: 151625 - DNA, 1185 bp, Artificial Sequence
  derived and/or modified sequence
atggtggccggcatgctgggcctgagagaggagaagagcgaggaccaggacctgcagggcctgaaggacaagcccctgaagttcaagaaggtgaagaaggacaagaaggaggagaaggagggcaagcacgagcccgtgcagcccagcgcccaccacagcgccgagcccgccgaggccggcaaggccgagaccagcgagggcagcggcagcgcccccgccgtgcccgaggccagcgccagccccaagcagagaagaagcatcatcagagacagaggccccatgtacgacgaccccaccctgcccgagggctggaccagaaagctgaagcagagaaagagcggcagaagcgccggcaagtacgacgtgtacctgatcaacccccagggcaaggccttcagaagcaaggtggagctgatcgcctacttcgagaaggtgggcgacaccagcctggaccccaacgacttcgacttcaccgtgaccggcagaggcagccccagcagaagagagcagaagccccccaagaagcccaagagccccaaggcccccggcaccggcagaggcagaggcagacccaagggcagcggcaccaccagacccaaggccgccaccagcgagggcgtgcaggtgaagagagtgctggagaagagccccggcaagctgctggtgaagatgcccttccagaccagccccggcggcaaggccgagggcggcggcgccaccaccagcacccaggtgatggtgatcaagagacccggcagaaagagaaaggccgaggccgacccccaggccatccccaagaagagaggcagaaagcccggcagcgtggtggccgccgccgccgccgaggccaagaagaaggccgtgaaggagagcagcatcagaagcgtgcaggagaccgtgctgcccatcaagaagagaaagaccagagagaccgtgagcatcgaggtgaaggaggtggtgaagcccctgctggtgagcaccctgggcgagaagagcggcaagggcctgaagacctgcaagagccccggcagaaagagcaaggagagcagccccaagggcagaagcagcagcgccagcagcccccccaagaaggagcaccaccaccaccaccaccacagcgagagccccaaggcccccgtgcccaccagaatcaaggccgccgtggtgagcagcccctacggctag

SEQ ID NO: 151626 - protein, 369 aa, Artificial Sequence
  derived and/or modified sequence
MESIFHEKQEGSLCAQHCLNNLLQGEYFSPVELSSIAHQLDEEERMRMAEGGVTSEDYRTFLQQPSGNMDDSGFFSIQVISNALKVWGLELILFNSPEYQRLRIDPINERSFICNYKEHWFTVRKLGKQWFNLNSLLTGPELISDTYLALFLAQLQQEGYSIFVVKGDLPDCEADQLLQMIRVQQMHRPKLIGEELAQLKEQRVHKTDLERVLEANDGSGMLDEDEEDLQRALALSRQEIDMEDEEADLRRAIQLSMQGSSRNISQDMTQTSGTNLTSEELRKRREAYFEKDQHFHILKQQQKQQQQQQQQQQGDLSGQSSHPCERPATSSGALGSDLGDAMSEEDMLQAAVTMSLETVRNDLKTEGKK

SEQ ID NO: 151627 - protein, 361 aa, Artificial Sequence
  derived and/or modified sequence
MESIFHEKQEGSLCAQHCLNNLLQGEYFSPVELSSIAHQLDEEERMRMAEGGVTSEDYRTFLQQPSGNMDDSGFFSIQVISNALKVWGLELILFNSPEYQRLRIDPINERSFICNYKEHWFTVRKLGKQWFNLNSLLTGPELISDTYLALFLAQLQQEGYSIFVVKGDLPDCEADQLLQMIRVQQMHRPKLIGEELAQLKEQRVHKTDLERVLEANDGSGMLDEDEEDLQRALALSRQEIDMEDEEADLRRAIQLSMQGSSRNISQDMTQTSGTNLTSEELRKRREAYFEKQQQKQQQQQQQQQQGDLSGQSSHPCERPATSSGALGSDLGDAMSEEDMLQAAVTMSLETVRNDLKTEGKK

SEQ ID NO: 151628 - protein, 366 aa, Artificial Sequence
  derived and/or modified sequence
MESIFHEKQEGSLCAQHCLNNLLQGEYFSPVELSSIAHQLDEEERMRMAEGGVTSEDYRTFLQQPSGNMDDSGFFSIQVISNALKVWGLELILFNSPEYQRLRIDPINERSFICNYKEHWFTVRKLGKQWFNLNSLLTGPELISDTYLALFLAQLQQEGYSIFVVKGDLPDCEADQLLQMIRVQQMHRPKLIGEELAQLKEQRVHKTDLERVLEANDGSGMLDEDEEDLQRALALSRQEIDMEDEEADLRRAIQLSMQGSSRNISQDMTQTSGTNLTSEELRKRREAYFENDYFDSQQQKQQQQQQQQQQGDLSGQSSHPCERPATSSGALGSDLGDAMSEEDMLQAAVTMSLETVRNDLKTEGKK

SEQ ID NO: 151629 - protein, 370 aa, Artificial Sequence
  derived and/or modified sequence
MESIFHEKQEGSLCAQHCLNNLLQGEYFSPVELSSIAHQLDEEERMRMAEGGVTSEDYRTFLQQPSGNMDDSGFFSIQVISNALKVWGLELILFNSPEYQRLRIDPINERSFICNYKEHWFTVRKLGKQWFNLNSLLTGPELISDTYLALFLAQLQQEGYSIFVVKGDLPDCEADQLLQMIRVQQMHRPKLIGEELAQLKEQRVHKTDLERVLEANDGSGMLDEDEEDLQRALALSRQEIDMEDEEADLRRAIQLSMQGSSRNISQDMTQTSGTNLTSEELRKRREAYFEKTESRSVAQAQQQKQQQQQQQQQQGDLSGQSSHPCERPATSSGALGSDLGDAMSEEDMLQAAVTMSLETVRNDLKTEGKK

SEQ ID NO: 151630 - protein, 364 aa, Artificial Sequence
  derived and/or modified sequence
MESIFHEKQEGSLCAQHCLNNLLQGEYFSPVELSSIAHQLDEEERMRMAEGGVTSEDYRTFLQQPSGNMDDSGFFSIQVISNALKVWGLELILFNSPEYQRLRIDPINERSFICNYKEHWFTVRKLGKQWFNLNSLLTGPELISDTYLALFLAQLQQEGYSIFVVKGDLPDCEADQLLQMIRVQQMHRPKLIGEELAQLKEQRVHKTDLERVLEANDGSGMLDEDEEDLQRALALSRQEIDMEDEEADLRRAIQLSMQGSSRNISQDMTQTSGTNLTSEELRKRREAYFEKQQQKQQQQQQQQQQGDLSGQSSHPCERPATSSGALGSDLGKACSPFIMFATFTLYLTYELHVIFALHYSSFPL

SEQ ID NO: 151631 - protein, 372 aa, Artificial Sequence
  derived and/or modified sequence
MESIFHEKQEGSLCAQHCLNNLLQGEYFSPVELSSIAHQLDEEERMRMAEGGVTSEDYRTFLQQPSGNMDDSGFFSIQVISNALKVWGLELILFNSPEYQRLRIDPINERSFICNYKEHWFTVRKLGKQWFNLNSLLTGPELISDTYLALFLAQLQQEGYSIFVVKGDLPDCEADQLLQMIRVQQMHRPKLIGEELAQLKEQRVHKTDLERVLEANDGSGMLDEDEEDLQRALALSRQEIDMEDEEADLRRAIQLSMQGSSRNISQDMTQTSGTNLTSEELRKRREAYFEKFGRPRRADCLRQQQKQQQQQQQQQQGDLSGQSSHPCERPATSSGALGSDLGDAMSEEDMLQAAVTMSLETVRNDLKTEGKK

SEQ ID NO: 151632 - protein, 375 aa, Artificial Sequence
  derived and/or modified sequence
DSVSKKKQEGSLCAQHCLNNLLQGEYFSPVELSSIAHQLDEEERMRMAEGGVTSEDYRTFLQQPSGNMDDSGFFSIQVISNALKVWGLELILFNSPEYQRLRIDPINERSFICNYKEHWFTVRKLGKQWFNLNSLLTGPELISDTYLALFLAQLQQEGYSIFVVKGDLPDCEADQLLQMIRVQQMHRPKLIGEELAQLKEQRVHKTDLERVLEANDGSGMLDEDEEDLQRALALSRQEIDMEDEEADLRRAIQLSMQGSSRNISQDMTQTSGTNLTSEELRKRREAYFEKKFTANRTDQHFHILKQQQKQQQQQQQQQQGDLSGQSSHPCERPATSSGALGSDLGDAMSEEDMLQAAVTMSLETVRNDLKTEGKK

SEQ ID NO: 151633 - protein, 374 aa, Artificial Sequence
  derived and/or modified sequence
MESIFHEKQEGSLCAQHCLNNLLQGEYFSPVELSSIAHQLDEEERMRMAEGGVTSEDYRTFLQQPSGNMDDSGFFSIQVISNALKVWGLELILFNSPEYQRLRIDPINERSFICNYKEHWFTVRKLGKQWFNLNSLLTGPELISDTYLALFLAQLQQEGYSIFVVKGDLPDCEADQLLQMIRVQQMHRPKLIGEELAQLKEQRVHKTDLERVLEANDGSGMLDEDEEDLQRALALSRQEIDMEDEEADLRRAIQLSMQGSSRNISQDMTQTSGTNLTSEELRKRREAYFEKVFFKNLQQIGRARQQQKQQQQQQQQQQGDLSGQSSHPCERPATSSGALGSDLGDAMSEEDMLQAAVTMSLETVRNDLKTEGKK

SEQ ID NO: 151634 - protein, 370 aa, Artificial Sequence
  derived and/or modified sequence
MESIFHEKQEGSLCAQHCLNNLLQGEYFSPVELSSIAHQLDEEERMRMAEGGVTSEDYRTFLQQPSGNMDDSGFFSIQVISNALKVWGLELILFNSPEYQRLRIDPINERSFICNYKEHWFTVRKLGKQWFNLNSLLTGPELISDTYLALFLAQLQQEGYSIFVVKGDLPDCEADQLLQMIRVQQMHRPKLIGEELAQLKEQRVHKTDLERVLEANDGSGMLDEDEEDLQRALALSRQEIDMEDEEADLRRAIQLSMQGSSRNISQDMTQTSGTNLTSEELRKRREAYFEKIYFTFECFRQQQKQQQQQQQQQQGDLSGQSSHPCERPATSSGALGSDLGDAMSEEDMLQAAVTMSLETVRNDLKTEGKK

SEQ ID NO: 151635 - protein, 377 aa, Artificial Sequence
  derived and/or modified sequence
MESIFHEKQEGSLCAQHCLNNLLQGEYFSPVELSSIAHQLDEEERMRMAEGGVTSEDYRTFLQQPSGNMDDSGFFSIQVISNALKVWGLELILFNSPEYQRLRIDPINERSFICNYKEHWFTVRKLGKQWFNLNSLLTGPELISDTYLALFLAQLQQEGYSIFVVKGDLPDCEADQLLQMIRVQQMHRPKLIGEELAQLKEQRVHKTDLERVLEANDGSGMLDEDEEDLQRALALSRQEIDMEDEEADLRRAIQLSMQGSSRNISQDMTQTSGTNLTSEELRKRREAYFEKVFFKNLQQNQHFHILKQQQKQQQQQQQQQQGDLSGQSSHPCERPATSSGALGSDLGDAMSEEDMLQAAVTMSLETVRNDLKTEGKK

SEQ ID NO: 151636 - DNA, 1110 bp, Artificial Sequence
  derived and/or modified sequence
atggagagcattttccacgagaaacaggagggttcgctgtgtgcacagcactgcttgaataatttactccaaggcgagtatttcagtccggtggaactgtcgagtattgcccatcagcttgacgaagaagagcgcatgcgcatggcggaaggcggagttacgagtgaagactaccgaaccttcttacaacagcctagcggaaacatggatgactccggatttttctcaattcaggtcatcagtaacgctctaaaagtatggggtcttgaacttatcctctttaattctcccgaatatcagcgcctccgtatcgaccctattaacgagagatcttttatttgtaattataaggagcactggtttaccgttagaaagctcgggaagcaatggttcaacctgaattcattactgactggacccgaactaattagtgatacataccttgctctcttcctggcccaactgcaacaagaaggatatagcatcttcgtagtgaagggcgatctgccagattgcgaagcagatcagttgctgcagatgatccgagtacaacagatgcatagaccaaagctgatcggtgaagaactcgcccagctcaaggagcagagggtccataagacagacctggaacgcgttctggaggcaaatgatggatccggcatgttagacgaggatgaggaggacctccagcgggccctcgcactcagccgccaggaaatcgacatggaggacgaggaagcagacctcaggcgggccattcagctcagcatgcaagggtccagccggaacatcagccaggacatgactcaaacatctggaacaaatttgacatccgaggagctgagaaagaggagggaggcctatttcgaaaaagaccagcattttcatattcttaagcagcaacagaagcaacagcagcagcagcaacagcaacagcagggcgatttgagcggccagagcagccacccctgtgagagacctgccacctcaagcggtgccctgggcagcgacctcggcgatgccatgtcagaagaagacatgctacaggccgccgtgacaatgtctctcgagaccgtccgaaacgacctgaagactgaggggaaaaagtag

SEQ ID NO: 151637 - DNA, 1086 bp, Artificial Sequence
  derived and/or modified sequence
atggaatcgatatttcatgagaagcaagagggcagcctgtgcgcacagcactgtctcaataacctcttacagggggaatatttctctcccgtcgagctatcttctatcgcccaccagctcgatgaagaggaacgaatgcggatggcagagggcggtgtgactagtgaagactataggaccttcttgcaacaaccgtctggaaacatggacgacagcggctttttttcaatccaggtcattagtaatgcactaaaagtctggggtctagaattaatcctgttcaactctccagagtatcaacgcttgcggattgaccctatcaacgaaaggtctttcatatgcaactacaaggaacattggttcacagtgcgcaagttggggaagcagtggtttaacctcaattctctgctgactggaccggagctgatctccgacacttacctggccttatttttggcccagttgcagcaggagggctacagtattttcgtggtgaagggggatctgccagattgtgaagctgatcagctgcttcagatgattcgggtccagcagatgcatagaccaaagttgattggggaggaactggcccaactcaaagagcaacgcgtgcataaaacagatctagagagagtgttggaggcaaatgacgggagcggcatgttagacgaagacgaagaagatctgcagagggcactggccctgagcaggcaggagatcgatatggaagatgaggaggcagatctcagaagagcaatccagctctccatgcagggcagctctaggaatatttcgcaagacatgacccagaccagcggcacaaatctgacgtccgaggaacttaggaagcgccgcgaagcttatttcgaaaagcaacaacaaaagcagcaacagcagcagcaacagcagcagcagggcgacttgagtggacagtcatcacatccgtgtgaaaggcctgcaaccagttccggcgccctcggatctgacctgggggacgcaatgtctgaggaggatatgctccaggctgcagtgactatgagtctagaaaccgtccggaacgatcttaagacagaaggtaagaagtag

SEQ ID NO: 151638 - DNA, 1101 bp, Artificial Sequence
  derived and/or modified sequence
atggagtcaatttttcacgaaaagcaggagggctccttgtgtgcgcagcattgtctgaacaatttattgcagggagaatactttagtccagtcgagctctccagtattgcgcaccagctcgatgaagaggagaggatgcggatggctgagggcggtgtgacaagtgaggactaccgtacattcctccagcagccatcgggcaacatggatgactctgggtttttctctattcaggttatttctaatgctctgaaagtgtgggggcttgagctgatcctgtttaattctcccgagtatcagcgactccgaatagacccaattaatgaacgatccttcatttgtaattataaagaacattggtttaccgtgcgaaaattaggtaagcagtggtttaatctgaactctcttctcaccgggcctgagctgatttcagacacttacttagctctgttcctggcccagctccagcaagaggggtattccattttcgttgtcaaaggcgacctccccgattgcgaggctgaccagctactgcagatgatccgagtccagcagatgcatagacccaaattaatcggcgaagagctcgcccagctaaaggagcagcgggtgcataaaacagatctagagagagtcctcgaggctaacgatgggtcagggatgctcgacgaagatgaagaagatttgcaaagagctctggcactttcacggcaggagatcgacatggaagatgaggaggcagacctcaggcgagctatccagctctcaatgcaggggtcatctcgcaacataagtcaggatatgacccagactagcggaaccaacctgacctccgaagaattgagaaagaggcgagaggcctatttcgagaatgattactttgattctcaacagcagaaacagcagcagcagcaacagcagcagcaacagggagatctctcgggacagtcaagccacccttgcgagagaccagctacctcttccggagctctggggagtgacctcggcgacgccatgtcagaggaagacatgctgcaagccgcggttactatgagcctggagacagtacgcaatgacttgaaaacagagggaaagaagtag

SEQ ID NO: 151639 - DNA, 1113 bp, Artificial Sequence
  derived and/or modified sequence
atggagagtatatttcacgagaagcaagagggctctttatgtgcgcagcattgcctgaacaatctgctacagggggaatactttagtcctgtggagctcagcagtatcgcacaccagcttgatgaagaggaacgaatgaggatggcagaagggggggttacttctgaagactatagaacctttttgcagcagccatctggcaacatggacgactcaggctttttctcgatccaggtcatcagcaatgccttgaaggtttggggtttggagctcattctgtttaatagtcctgagtaccagcgattgagaattgaccctattaatgaacgcagctttatttgcaattataaggagcactggtttactgtgcgcaagctaggaaaacaatggttcaacttgaacagtctactgaccgggccggagctgatctcagatacatatctcgccctgtttcttgctcagctgcaacaggaaggctattcaatattcgtggtcaaaggggatctccccgattgcgaagctgatcaactgctgcaaatgattcgggtccaacagatgcaccgtccaaagctgataggcgaggagctggcgcagctaaaagagcaacgcgttcacaagacggaccttgagcgcgttcttgaagccaatgatggctccggcatgttagatgaggacgaagaggatctgcagagagccctggccctgagcagacaggagatcgacatggaagacgaagaggctgatctccggagggcgattcagctgtcgatgcagggatcctcaagaaacatctctcaggacatgacccagacctctggcaccaacttaacgagtgaggagctgcgtaaaagacgcgaagcatacttcgagaagacagagtccaggtcggttgcgcaggctcagcagcagaaacagcaacaacagcaacagcagcagcaacagggcgacctctcagggcagagtagccatccatgcgagcggcctgccacatcctccggagctctgggtagcgacctaggggacgccatgagtgaagaggacatgctgcaggccgcagtgacaatgagtctcgaaactgtgaggaatgatctcaagactgaaggcaagaaatag

SEQ ID NO: 151640 - DNA, 1095 bp, Artificial Sequence
  derived and/or modified sequence
atggaatcgatttttcacgaaaaacaggagggaagtctgtgcgcccagcactgtctcaataacctgctgcaaggtgagtacttttcaccagtggagctgtcctccatcgcacaccagctcgacgaggaggagcggatgcggatggccgagggcggggtcaccagtgaggattatcgtacgttcctgcaacagccatccgggaatatggacgactcggggtttttctcaatccaggtcatctccaacgctctgaaggtttggggcttagaactgatccttttcaactccccagaataccagagactgcgcatcgaccccatcaatgagagatcctttatatgcaactataaggagcactggttcacagtgcgaaaattaggcaagcaatggtttaatctgaatagcttgctgactggtcctgaactcatctccgacacttatctcgctctctttctggcacaactgcagcaggaaggatatagcattttcgtcgtgaagggcgacctgccagactgcgaagccgaccagttactgcaaatgattcgggtgcagcagatgcaccgcccaaaactgattggcgaggagctggcccagctgaaggagcagagggtgcataaaacagatctggaaagggtcctggaagcaaacgacgggtcagggatgctcgatgaagacgaagaagatttgcagagggcacttgccctcagccgtcaggaaattgatatggaggacgaggaagccgatctgaggagggctatccagctcagcatgcaaggcagctcgcgaaacattagtcaggatatgacccagacgagtggcacgaacctgactagtgaggaattgcggaagcgcagagaggcttatttcgagaagcagcagcaaaaacagcaacagcagcagcagcagcagcagcaaggagacctgagcggccaaagttcccacccatgtgagcgacccgcaacatcttccggagccctgggctccgacctgggcaaggcttgctcaccattcattatgttcgccactttcaccctgtacttaacgtatgagctgcacgtgattttcgccctacattatagctcctttccattgtag

SEQ ID NO: 151641 - DNA, 1119 bp, Artificial Sequence
  derived and/or modified sequence
atggagtcaatttttcacgagaagcaggaagggtctctatgcgcacaacactgtctgaacaacttactgcagggggagtatttctctcctgtggagttatcaagcattgcccatcaactggatgaggaagagcgcatgcgcatggctgaaggcggcgtaaccagtgaggactataggacctttctgcagcaaccttctggaaatatggacgacagcggattcttcagcattcaggttattagtaatgcattgaaagtctggggccttgagctgattctcttcaattctcccgagtaccagcggctacgaattgaccccattaatgagaggagcttcatatgtaattacaaggagcattggttcaccgtcaggaagttggggaagcagtggttcaatcttaatagcctgctgacagggcccgagcttatctctgacacttatctggctctgttccttgctcagttgcaacaggaaggatactctatctttgtcgtgaaaggcgacctgccagactgtgaagccgatcagcttttacagatgatcagagtgcagcagatgcaccgccctaagctcattggagaggagctggcacagctaaaagagcagagagttcacaagaccgacctcgaacgggtcctcgaggcaaatgatggttccgggatgttggacgaagacgaggaagacctgcagagagccttggcactaagtcgccaggaaatagatatggaagacgaggaagctgacctcaggagggccattcagttgtccatgcagggcagcagtaggaacatatctcaggatatgacccaaacgagcggcacaaatctgaccagtgaggagcttagaaaaaggagggaggcatacttcgagaagttcgggagaccgcgaagggcggactgccttaggcaacagcagaagcaacagcagcagcaacaacagcagcaacaaggggatttgtccggccagtcatctcatccttgtgagaggccggccacgtcatcgggggctctgggctcagatctcggtgacgctatgtccgaggaggatatgttacaggcggccgttaccatgtcgctcgagaccgtgcgcaacgatttaaaaactgaaggcaaaaagtag

SEQ ID NO: 151642 - DNA, 1128 bp, Artificial Sequence
  derived and/or modified sequence
gactccgttagcaagaaaaaacaggaagggagcttatgtgcccaacactgcttaaacaatcttctccagggtgaatacttcagtcctgttgagctctcctccattgcacaccagctggacgaggaggaaagaatgcggatggccgagggcggcgtgactagtgaggactaccgtaccttccttcaacagcccagcggcaatatggacgacagtggttttttctccattcaggtgatcagcaatgcactaaaggtgtgggggcttgaacttattctctttaactccccagagtaccagcggctcagaattgatccaatcaacgagcgcagtttcatctgcaactacaaagagcactggttcacagtaaggaaactggggaagcaatggttcaacctgaattcactcctcaccggccccgagctgatcagcgatacataccttgcccttttcctcgcacaattgcagcaggagggttactccatattcgttgtgaagggtgacctccccgattgtgaggccgaccagttactgcagatgatccgagttcagcagatgcaccgacccaagctcattggtgaggaactagcccagcttaaggagcagagggtgcacaagaccgatctagagagagtgttggaagcaaatgacggttcaggaatgctagacgaagatgaagaggacctgcagagggctttggctctgtcaaggcaggagattgacatggaagacgaggaggccgatctccgccgggcgattcagctttccatgcagggctcgagtcggaatatcagtcaggatatgactcaaaccagtggtactaacctaaccagtgaggaactgaggaagagacgggaagcttacttcgagaagaaattcacagccaatcggaccgaccagcacttccacattctgaagcaacaacaaaagcagcagcagcagcaacaacaacagcagcaaggggacctgagcggccaatccagtcatccatgtgagcggcctgccacctcttccggcgcactgggaagcgatctcggggacgctatgagcgaggaggacatgcttcaagcagccgtgaccatgagcctggaaaccgtgcggaatgaccttaagacggaaggtaaaaaatag

SEQ ID NO: 151643 - DNA, 1125 bp, Artificial Sequence
  derived and/or modified sequence
atggagagcatcttccatgaaaagcaggagggttcgctgtgcgctcagcactgtctgaacaatctgttacagggagagtacttttccccagtggagctcagttcaatcgcccatcaacttgacgaagaagaacgaatgcgaatggctgagggaggggtcacatctgaggactaccggactttcctacaacagccctctggaaatatggacgactcaggatttttttcaatccaagtgatctcaaatgcattgaaagtttggggcctcgaattgatcctgtttaacagccccgagtatcagcggttgcgaatcgaccccattaatgaacgaagcttcatttgcaactataaggagcactggttcaccgtacgcaaactgggtaagcagtggttcaatctgaactcactgctaaccggacccgaactcatttccgatacctacctcgctctgtttctggcacagctacagcaggaaggatactcaatctttgtggtgaagggcgacctccctgattgtgaggcggatcagctcctgcagatgatccgtgtacaacagatgcatcggcctaagcttatcggcgaggagctggcccagttgaaagaacaacgagtccataagacagacttagaacgagttctggaagccaacgatggcagtggtatgttagacgaggatgaggaggaccttcagagagctctagcactgagtcggcaagagatcgatatggaggacgaggaagccgatttgcggcgggccatccagttatccatgcaggggagtagtaggaatatatcccaagatatgacacagactagcggaacaaacctgacatcagaagaactaagaaagagacgcgaggcttactttgaaaaggtatttttcaaaaacctacagcagatcggccgtgcacgtcagcaacagaagcagcagcagcagcagcagcagcaacagcagggcgatctgtcagggcagtcctcccatccgtgtgagaggccagccacaagctccggggcactcggtagcgacctgggcgatgccatgtccgaggaggacatgctacaggctgccgttaccatgagcctagagaccgtcaggaacgatctgaagacagagggcaaaaagtag

SEQ ID NO: 151644 - DNA, 1113 bp, Artificial Sequence
  derived and/or modified sequence
atggagtccatcttccatgagaaacaggagggcagcttgtgcgctcaacactgtctgaataatctccttcagggagagtacttcagcccagtcgaactgtcaagcatagcgcaccaattggacgaggaggagcggatgcggatggccgaagggggagtgacctcagaggattaccggacctttcttcagcagcccagtggaaacatggacgactctggcttcttttcaatccaggtgatcagcaacgccctcaaggtgtgggggttggagctcatactgtttaacagtccagagtaccagcggctgcgcatagacccaatcaacgagaggtcttttatctgcaattacaaggagcactggttcacagtgcgcaagttagggaagcagtggttcaatttgaattctcttctcacaggaccagaactcatctctgacacgtacttagctctctttttggctcagctgcagcaggaaggatactctatcttcgtcgtcaaaggggatctaccagattgtgaagccgatcagctactgcagatgatccgcgtgcagcaaatgcatcgaccaaaactgatcggggaggagctcgctcaacttaaggaacagcgggtccacaagactgatctcgaacgcgtactggaggcgaatgacgggtctggtatgcttgacgaggacgaagaggatcttcagagagcgttggccctcagccgccaggaaattgatatggaggacgaggaagccgacctccgtcgggccatccagctttccatgcagggcagtagcagaaatatctcccaggatatgactcagacttctgggacgaacctcactagcgaagagctccggaaacgaagggaggcatatttcgaaaaaatctacttcaccttcgagtgtttcagacagcagcaaaaacagcagcagcagcaacagcaacagcagcagggcgacttgagtggacagtcctctcatccgtgcgagcggccagcaacctctagcggcgcactggggtccgaccttggcgacgccatgagcgaagaagatatgctacaggctgcagttacaatgagcctcgagacagttcggaatgatctcaagaccgaaggcaaaaaatag

SEQ ID NO: 151645 - DNA, 1134 bp, Artificial Sequence
  derived and/or modified sequence
atggagtccatctttcatgaaaagcaggagggctctttatgcgcacagcactgcttgaacaatctgctacaaggtgagtattttagtcccgtcgagctgtccagcatcgcgcaccaactcgacgaggaagaacgtatgagaatggcagagggtggggtgacgtccgaggattaccggactttccttcagcaaccaagtggcaacatggatgatagcgggtttttctcaatccaggtgatttcaaacgcactgaaggtatggggcttagaactgatcctgtttaactccccagagtaccagcggctgcgaattgacccgataaatgagcgatcatttatctgcaactacaaggagcactggtttacagtgcggaagcttggaaagcagtggttcaatctgaatagcctgttgaccggccccgaacttatctctgacacctacctagcactcttcctggcacaattgcagcaggagggttacagcatctttgtggtgaagggagatttgcccgactgtgaggcagaccagttgcttcagatgatccgagtgcaacagatgcacaggccaaaactcatcggtgaagaactggctcagttgaaggagcaacgagtccataaaactgatttagagcgcgtgctagaggccaacgacggttctggaatgttggacgaagatgaagaagatctgcagcgagcgctggcccttagtcgccaagagattgatatggaggatgaggaagccgacctcaggcgtgctattcagctaagtatgcaagggtcctccaggaacatctctcaggatatgactcagacatccggaacaaatttaaccagtgaagaactcagaaagcgacgtgaagcatacttcgagaaggtgttctttaaaaacctgcagcaaaaccagcacttccatatcctcaagcagcaacaaaaacagcagcagcagcagcaacagcagcagcagggcgacctctctggacaatcatcacacccttgtgagagacccgctaccagctctggcgccctgggtagcgacctgggggatgccatgtcggaagaggatatgctgcaggctgccgtgaccatgtcattggagacagtccgtaacgaccttaagacagaaggcaaaaagtag

SEQ ID NO: 151646 - DNA, 1110 bp, Artificial Sequence
  derived and/or modified sequence
atggagagcatcttccacgagaagcaggagggcagcctgtgtgcccagcactgcctgaacaacctgctgcagggcgagtacttcagccctgtggagctgagcagcatcgcccaccagctggatgaggaggagaggatgaggatggccgagggcggcgtgaccagcgaggactaccgcaccttcctgcagcagcccagcggcaacatggatgacagcggcttcttcagcatccaggtgatcagcaatgccctgaaggtgtggggcctggagctgatcctcttcaacagccctgagtaccagaggctgagaattgaccccatcaatgaaagaagcttcatctgcaactacaaggagcactggttcaccgtgaggaagctgggcaagcagtggttcaacctgaacagcctgctgaccggccctgagctgatcagtgacacctacctggccctcttcctggcccagctgcagcaggagggctacagcatctttgtggtgaagggggacctgcctgactgtgaggccgaccagctgctgcagatgatccgggtgcagcagatgcaccggcccaagctgattggagaggagctggcccagctgaaggagcagagggtgcacaagacagacctggagcgggtgctggaggccaatgatggcagcggcatgctggatgaagatgaggaggacctgcagagggccctggccctgagccggcaggagattgacatggaggatgaggaggccgacctgcggcgggccatccagctgtccatgcagggcagcagcaggaacatcagccaggacatgacccagaccagcggcaccaacctgaccagcgaggagctgaggaagaggcgggaggcctactttgagaaggaccagcacttccacatcctgaagcagcagcagaagcagcagcagcagcagcagcagcagcagcagggcgacctgagcggccagagcagccacccctgtgagaggcctgccaccagcagcggggccctgggcagtgacctgggagatgccatgtctgaggaggacatgctgcaggccgctgtgaccatgagcctggagaccgtgagaaatgacctgaagacagagggcaagaagtag

SEQ ID NO: 151647 - DNA, 1086 bp, Artificial Sequence
  derived and/or modified sequence
atggagagcatcttccacgagaagcaggagggcagcctgtgtgcccagcactgcctgaacaacctgctgcagggcgagtacttcagccctgtggagctgagcagcatcgcccaccagctggatgaggaggagaggatgaggatggccgagggcggcgtgaccagcgaggactaccgcaccttcctgcagcagcccagcggcaacatggatgacagcggcttcttcagcatccaggtgatcagcaatgccctgaaggtgtggggcctggagctgatcctcttcaacagccctgagtaccagaggctgagaattgaccccatcaatgaaagaagcttcatctgcaactacaaggagcactggttcaccgtgaggaagctgggcaagcagtggttcaacctgaacagcctgctgaccggccctgagctgatcagtgacacctacctggccctcttcctggcccagctgcagcaggagggctacagcatctttgtggtgaagggggacctgcctgactgtgaggccgaccagctgctgcagatgatccgggtgcagcagatgcaccggcccaagctgattggagaggagctggcccagctgaaggagcagagggtgcacaagacagacctggagcgggtgctggaggccaatgatggcagcggcatgctggatgaagatgaggaggacctgcagagggccctggccctgagccggcaggagattgacatggaggatgaggaggccgacctgcggcgggccatccagctgtccatgcagggcagcagcaggaacatcagccaggacatgacccagaccagcggcaccaacctgaccagcgaggagctgaggaagaggcgggaggcctactttgagaagcagcagcagaagcagcagcagcagcagcagcagcagcagcagggcgacctgagcggccagagcagccacccctgtgagaggcctgccaccagcagcggggccctgggcagtgacctgggagatgccatgtctgaggaggacatgctgcaggccgctgtgaccatgagcctggagaccgtgagaaatgacctgaagacagagggcaagaagtag

SEQ ID NO: 151648 - DNA, 1101 bp, Artificial Sequence
  derived and/or modified sequence
atggagagcatcttccacgagaagcaggagggcagcctgtgtgcccagcactgcctgaacaacctgctgcagggcgagtacttcagccctgtggagctgagcagcatcgcccaccagctggatgaggaggagaggatgaggatggccgagggcggcgtgaccagcgaggactaccgcaccttcctgcagcagcccagcggcaacatggatgacagcggcttcttcagcatccaggtgatcagcaatgccctgaaggtgtggggcctggagctgatcctcttcaacagccctgagtaccagaggctgagaattgaccccatcaatgaaagaagcttcatctgcaactacaaggagcactggttcaccgtgaggaagctgggcaagcagtggttcaacctgaacagcctgctgaccggccctgagctgatcagtgacacctacctggccctcttcctggcccagctgcagcaggagggctacagcatctttgtggtgaagggggacctgcctgactgtgaggccgaccagctgctgcagatgatccgggtgcagcagatgcaccggcccaagctgattggagaggagctggcccagctgaaggagcagagggtgcacaagacagacctggagcgggtgctggaggccaatgatggcagcggcatgctggatgaagatgaggaggacctgcagagggccctggccctgagccggcaggagattgacatggaggatgaggaggccgacctgcggcgggccatccagctgtccatgcagggcagcagcaggaacatcagccaggacatgacccagaccagcggcaccaacctgaccagcgaggagctgaggaagaggcgggaggcctactttgaaaatgactactttgacagccagcagcagaagcagcagcagcagcagcagcagcagcagcagggcgacctgagcggccagagcagccacccctgtgagaggcctgccaccagcagcggggccctgggcagtgacctgggagatgccatgtctgaggaggacatgctgcaggccgctgtgaccatgagcctggagaccgtgagaaatgacctgaagacagagggcaagaagtag

SEQ ID NO: 151649 - DNA, 1113 bp, Artificial Sequence
  derived and/or modified sequence
atggagagcatcttccacgagaagcaggagggcagcctgtgtgcccagcactgcctgaacaacctgctgcagggcgagtacttcagccctgtggagctgagcagcatcgcccaccagctggatgaggaggagaggatgaggatggccgagggcggcgtgaccagcgaggactaccgcaccttcctgcagcagcccagcggcaacatggatgacagcggcttcttcagcatccaggtgatcagcaatgccctgaaggtgtggggcctggagctgatcctcttcaacagccctgagtaccagaggctgagaattgaccccatcaatgaaagaagcttcatctgcaactacaaggagcactggttcaccgtgaggaagctgggcaagcagtggttcaacctgaacagcctgctgaccggccctgagctgatcagtgacacctacctggccctcttcctggcccagctgcagcaggagggctacagcatctttgtggtgaagggggacctgcctgactgtgaggccgaccagctgctgcagatgatccgggtgcagcagatgcaccggcccaagctgattggagaggagctggcccagctgaaggagcagagggtgcacaagacagacctggagcgggtgctggaggccaatgatggcagcggcatgctggatgaagatgaggaggacctgcagagggccctggccctgagccggcaggagattgacatggaggatgaggaggccgacctgcggcgggccatccagctgtccatgcagggcagcagcaggaacatcagccaggacatgacccagaccagcggcaccaacctgaccagcgaggagctgaggaagaggcgggaggcctactttgagaagacagagagccgctctgtggcccaggcccagcagcagaagcagcagcagcagcagcagcagcagcagcagggcgacctgagcggccagagcagccacccctgtgagaggcctgccaccagcagcggggccctgggcagtgacctgggagatgccatgtctgaggaggacatgctgcaggccgctgtgaccatgagcctggagaccgtgagaaatgacctgaagacagagggcaagaagtag

SEQ ID NO: 151650 - DNA, 1095 bp, Artificial Sequence
  derived and/or modified sequence
atggagagcatcttccacgagaagcaggagggcagcctgtgtgcccagcactgcctgaacaacctgctgcagggcgagtacttcagccctgtggagctgagcagcatcgcccaccagctggatgaggaggagaggatgaggatggccgagggcggcgtgaccagcgaggactaccgcaccttcctgcagcagcccagcggcaacatggatgacagcggcttcttcagcatccaggtgatcagcaatgccctgaaggtgtggggcctggagctgatcctcttcaacagccctgagtaccagaggctgagaattgaccccatcaatgaaagaagcttcatctgcaactacaaggagcactggttcaccgtgaggaagctgggcaagcagtggttcaacctgaacagcctgctgaccggccctgagctgatcagtgacacctacctggccctcttcctggcccagctgcagcaggagggctacagcatctttgtggtgaagggggacctgcctgactgtgaggccgaccagctgctgcagatgatccgggtgcagcagatgcaccggcccaagctgattggagaggagctggcccagctgaaggagcagagggtgcacaagacagacctggagcgggtgctggaggccaatgatggcagcggcatgctggatgaagatgaggaggacctgcagagggccctggccctgagccggcaggagattgacatggaggatgaggaggccgacctgcggcgggccatccagctgtccatgcagggcagcagcaggaacatcagccaggacatgacccagaccagcggcaccaacctgaccagcgaggagctgaggaagaggcgggaggcctactttgagaagcagcagcagaagcagcagcagcagcagcagcagcagcagcagggcgacctgagcggccagagcagccacccctgtgagaggcctgccaccagcagcggggccctgggcagtgacctgggcaaggcctgcagccccttcatcatgtttgccaccttcaccctgtacctgacctatgagctgcacgtgatctttgccctgcactacagcagcttccccctgtag

SEQ ID NO: 151651 - DNA, 1119 bp, Artificial Sequence
  derived and/or modified sequence
atggagagcatcttccacgagaagcaggagggcagcctgtgtgcccagcactgcctgaacaacctgctgcagggcgagtacttcagccctgtggagctgagcagcatcgcccaccagctggatgaggaggagaggatgaggatggccgagggcggcgtgaccagcgaggactaccgcaccttcctgcagcagcccagcggcaacatggatgacagcggcttcttcagcatccaggtgatcagcaatgccctgaaggtgtggggcctggagctgatcctcttcaacagccctgagtaccagaggctgagaattgaccccatcaatgaaagaagcttcatctgcaactacaaggagcactggttcaccgtgaggaagctgggcaagcagtggttcaacctgaacagcctgctgaccggccctgagctgatcagtgacacctacctggccctcttcctggcccagctgcagcaggagggctacagcatctttgtggtgaagggggacctgcctgactgtgaggccgaccagctgctgcagatgatccgggtgcagcagatgcaccggcccaagctgattggagaggagctggcccagctgaaggagcagagggtgcacaagacagacctggagcgggtgctggaggccaatgatggcagcggcatgctggatgaagatgaggaggacctgcagagggccctggccctgagccggcaggagattgacatggaggatgaggaggccgacctgcggcgggccatccagctgtccatgcagggcagcagcaggaacatcagccaggacatgacccagaccagcggcaccaacctgaccagcgaggagctgaggaagaggcgggaggcctactttgagaagtttggccggccccggcgggctgactgcctgcggcagcagcagaagcagcagcagcagcagcagcagcagcagcagggcgacctgagcggccagagcagccacccctgtgagaggcctgccaccagcagcggggccctgggcagtgacctgggagatgccatgtctgaggaggacatgctgcaggccgctgtgaccatgagcctggagaccgtgagaaatgacctgaagacagagggcaagaagtag

SEQ ID NO: 151652 - DNA, 1128 bp, Artificial Sequence
  derived and/or modified sequence
gacagcgtgtccaagaagaagcaggagggcagcctgtgtgcccagcactgcctgaacaacctgctgcagggcgagtacttcagccctgtggagctgagcagcatcgcccaccagctggatgaggaggagaggatgaggatggccgagggcggcgtgaccagcgaggactaccgcaccttcctgcagcagcccagcggcaacatggatgattctggcttcttcagcatccaggtgatcagcaatgccctgaaggtgtggggcctggagctgatcctcttcaacagccctgagtaccagaggctgagaattgaccccatcaatgaaagaagcttcatctgcaactacaaggagcactggttcaccgtgaggaagctgggcaagcagtggttcaacctgaacagcctgctgactggacctgagctgatcagtgacacctacctggccctcttcctggcccagctgcagcaggagggctacagcatctttgtggtgaagggggacctgcctgactgtgaggccgaccagctgctgcagatgatccgggtgcagcagatgcaccggcccaagctgattggagaggagctggcccagctgaaggagcagagggtgcacaagacagacctggagcgggtgctggaggccaatgatggcagcggcatgctggatgaagatgaggaggacctgcagagggccctggccctgagccggcaggagattgacatggaggatgaggaggccgacctgcggcgggccatccagctgtccatgcagggcagcagcaggaacatcagccaggacatgacccagaccagcggcaccaacctgaccagcgaggagctgaggaagagaagagaggcctactttgagaagaagttcaccgccaacagaacagaccagcacttccacatcctgaagcagcagcagaagcagcagcagcagcagcagcagcagcagcagggcgacctgagcggccagagcagccacccctgtgagaggcctgccaccagcagcggggccctgggcagtgacctgggagatgccatgtctgaggaggacatgctgcaggccgctgtgaccatgagcctggagaccgtgagaaatgacctgaagacagagggcaagaagtag

SEQ ID NO: 151653 - DNA, 1125 bp, Artificial Sequence
  derived and/or modified sequence
atggagagcatcttccacgagaagcaggagggcagcctgtgtgcccagcactgcctgaacaacctgctgcagggcgagtacttcagccctgtggagctgagcagcatcgcccaccagctggatgaggaggagaggatgaggatggccgagggcggcgtgaccagcgaggactaccgcaccttcctgcagcagcccagcggcaacatggatgacagcggcttcttcagcatccaggtgatcagcaatgccctgaaggtgtggggcctggagctgatcctcttcaacagccctgagtaccagaggctgagaattgaccccatcaatgaaagaagcttcatctgcaactacaaggagcactggttcaccgtgaggaagctgggcaagcagtggttcaacctgaacagcctgctgaccggccctgagctgatcagtgacacctacctggccctcttcctggcccagctgcagcaggagggctacagcatctttgtggtgaagggggacctgcctgactgtgaggccgaccagctgctgcagatgatccgggtgcagcagatgcaccggcccaagctgattggagaggagctggcccagctgaaggagcagagggtgcacaagacagacctggagcgggtgctggaggccaatgatggcagcggcatgctggatgaagatgaggaggacctgcagagggccctggccctgagccggcaggagattgacatggaggatgaggaggccgacctgcggcgggccatccagctgtccatgcagggcagcagcaggaacatcagccaggacatgacccagaccagcggcaccaacctgaccagcgaggagctgaggaagaggcgggaggcctactttgagaaggtgttcttcaagaacctgcagcagatcggccgggcccggcagcagcagaagcagcagcagcagcagcagcagcagcagcagggcgacctgagcggccagagcagccacccctgtgagaggcctgccaccagcagcggggccctgggcagtgacctgggagatgccatgtctgaggaggacatgctgcaggccgctgtgaccatgagcctggagaccgtgagaaatgacctgaagacagagggcaagaagtag

SEQ ID NO: 151654 - DNA, 1113 bp, Artificial Sequence
  derived and/or modified sequence
atggagagcatcttccacgagaagcaggagggcagcctgtgtgcccagcactgcctgaacaacctgctgcagggcgagtacttcagccctgtggagctgagcagcatcgcccaccagctggatgaggaggagaggatgaggatggccgagggcggcgtgaccagcgaggactaccgcaccttcctgcagcagcccagcggcaacatggatgacagcggcttcttcagcatccaggtgatcagcaatgccctgaaggtgtggggcctggagctgatcctcttcaacagccctgagtaccagaggctgagaattgaccccatcaatgaaagaagcttcatctgcaactacaaggagcactggttcaccgtgaggaagctgggcaagcagtggttcaacctgaacagcctgctgaccggccctgagctgatcagtgacacctacctggccctcttcctggcccagctgcagcaggagggctacagcatctttgtggtgaagggggacctgcctgactgtgaggccgaccagctgctgcagatgatccgggtgcagcagatgcaccggcccaagctgattggagaggagctggcccagctgaaggagcagagggtgcacaagacagacctggagcgggtgctggaggccaatgatggcagcggcatgctggatgaagatgaggaggacctgcagagggccctggccctgagccggcaggagattgacatggaggatgaggaggccgacctgcggcgggccatccagctgtccatgcagggcagcagcaggaacatcagccaggacatgacccagaccagcggcaccaacctgaccagcgaggagctgaggaagaggcgggaggcctactttgagaagatctacttcacctttgagtgcttccggcagcagcagaagcagcagcagcagcagcagcagcagcagcagggcgacctgagcggccagagcagccacccctgtgagaggcctgccaccagcagcggggccctgggcagtgacctgggagatgccatgtctgaggaggacatgctgcaggccgctgtgaccatgagcctggagaccgtgagaaatgacctgaagacagagggcaagaagtag

SEQ ID NO: 151655 - DNA, 1134 bp, Artificial Sequence
  derived and/or modified sequence
atggagagcatcttccacgagaagcaggagggcagcctgtgtgcccagcactgcctgaacaacctgctgcagggcgagtacttcagccctgtggagctgagcagcatcgcccaccagctggatgaggaggagaggatgaggatggccgagggcggcgtgaccagcgaggactaccgcaccttcctgcagcagcccagcggcaacatggatgacagcggcttcttcagcatccaggtgatcagcaatgccctgaaggtgtggggcctggagctgatcctcttcaacagccctgagtaccagaggctgagaattgaccccatcaatgaaagaagcttcatctgcaactacaaggagcactggttcaccgtgaggaagctgggcaagcagtggttcaacctgaacagcctgctgaccggccctgagctgatcagtgacacctacctggccctcttcctggcccagctgcagcaggagggctacagcatctttgtggtgaagggggacctgcctgactgtgaggccgaccagctgctgcagatgatccgggtgcagcagatgcaccggcccaagctgattggagaggagctggcccagctgaaggagcagagggtgcacaagacagacctggagcgggtgctggaggccaatgatggcagcggcatgctggatgaagatgaggaggacctgcagagggccctggccctgagccggcaggagattgacatggaggatgaggaggccgacctgcggcgggccatccagctgtccatgcagggcagcagcaggaacatcagccaggacatgacccagaccagcggcaccaacctgaccagcgaggagctgaggaagaggcgggaggcctactttgagaaggtgttcttcaagaacctgcagcagaaccagcacttccacatcctgaagcagcagcagaagcagcagcagcagcagcagcagcagcagcagggcgacctgagcggccagagcagccacccctgtgagaggcctgccaccagcagcggggccctgggcagtgacctgggagatgccatgtctgaggaggacatgctgcaggccgctgtgaccatgagcctggagaccgtgagaaatgacctgaagacagagggcaagaagtag

SEQ ID NO: 151656 - DNA, 1110 bp, Artificial Sequence
  derived and/or modified sequence
atggagagcatcttccacgagaagcaggagggcagcctgtgcgcccaacactgtttgaataatttacttcagggtgaatacttcagccctgtcgagctctcttctatcgcccatcaactagacgaagaggagcgcatgaggatggctgaggggggagtcacatctgaggactataggacgtttctgcaacaaccctctggaaacatggacgacagtggcttcttttcgattcaggtgataagcaacgcacttaaggtctgggggttagagctgattctctttaacagtccagagtaccagaggctcagaatagatcccattaacgaaaggagtttcatttgcaattataaagagcactggttcaccgtccggaagctgggcaagcagtggttcaatttgaactcactcctgaccggacctgaattaatatccgacacctatctcgcactgttcctggcacaactacagcaggagggatacagcattttcgtggttaagggggatttaccagattgcgaggcagaccaactcttacagatgatcagggtgcaacagatgcaccggcctaagctgataggggaagaactggcacaactgaaagaacagagagtccataaaaccgatctggagcgcgttctcgaggcaaatgacggatctgggatgttggacgaggatgaagaggatttgcagagagctttagctcttagtcgccaggagattgacatggaagatgaggaggcggatcttcggagggcaatccagctctcaatgcagggctccagcaggaatatttctcaggacatgacccaaaccagtggaacgaacttaacctccgaggaactgaggaaacggagagaggcctacttcgagaaggatcaacactttcatattcttaagcagcaacagaagcagcagcagcagcagcagcagcagcagcagggagaccttagcggtcaaagcagccatccctgcgaacgccctgcaactagctctggcgctcttggcagtgatctgggcgatgctatgtcagaggaagacatgctccaggcagccgtcaccatgtctcttgaaactgtgcggaatgacttgaagactgaaggcaagaagtag

SEQ ID NO: 151657 - DNA, 1086 bp, Artificial Sequence
  derived and/or modified sequence
atggagagcatcttccacgagaagcaggagggcagcctgtgcgcccaacactgcctcaacaatctgttgcagggggaatatttttccccggtagagttgtcaagcattgcacatcagctggatgaggaggagcgcatgagaatggccgaaggaggtgtgacatctgaggattacaggacatttctccagcaacccagtggaaacatggacgattccgggtttttttcaatacaagtgataagcaatgccttaaaggtgtggggcttggaactgattcttttcaatagcccggaatatcagagactgcgcattgatccaatcaacgaacgctccttcatttgtaattataaggaacactggtttactgtcagaaaactgggcaaacagtggtttaacctgaatagcttgctgaccgggcctgaacttattagtgacacatatctggccctcttcctagcccaactccagcaggaggggtatagcatttttgtggttaagggcgatctccctgactgcgaggccgaccaattactccaaatgatccgtgttcaacagatgcaccgtcctaagttgatcggcgaggagctcgcacaactgaaggagcagagggttcacaagaccgatctggaacgcgttttggaagccaacgatggttccggtatgctcgatgaggatgaagaggatttgcagcgggcattagccttgtcccgacaggagattgatatggaagacgaggaagccgatctgcgcagggcaattcagttaagcatgcaaggaagctcaagaaacatctcacaggatatgactcagacgagcgggacaaatttaacttccgaagaactaagaaagcgtcgagaagcatattttgaaaagcagcaacagaagcagcaacaacagcagcaacagcaacaacaaggcgacctttcgggccaaagttcccacccctgcgagagacccgctacatcttcaggtgctttaggctcagacttgggagacgctatgagcgaagaagacatgttacaggccgctgtaactatgagtcttgagaccgtacgaaacgatttgaaaacagaaggcaaaaagtag

SEQ ID NO: 151658 - DNA, 1101 bp, Artificial Sequence
  derived and/or modified sequence
atggagagcatcttccacgagaagcaggagggcagcctgtgcgcccaacattgtttgaacaatttactgcaaggggagtactttagtccagttgagctcagcagtatagctcaccaactggatgaggaagagcgaatgagaatggcagagggcggcgtaacaagcgaagactaccggaccttcctgcagcaaccgtcaggcaacatggacgatagcggtttcttttcaatccaggtgatttcaaatgcactcaaggtgtggggcctggagctcattctgtttaactcacctgaataccagcggctaaggattgatccaataaacgaaagatccttcatatgcaattacaaagagcactggtttaccgtgcggaaacttggaaagcagtggttcaacttgaactcgctgctcactggacctgagcttatcagtgatacctatctcgccctgtttctggcacagctgcagcaagaaggctattctatattcgtagtcaagggagaccttccagattgtgaggctgaccaactcctgcagatgatcagggtgcaacaaatgcaccgtccaaaactgattggggaagaattggcacagttaaaagagcagcgagtgcacaaaactgacctggaacgcgtgctggaggccaacgatgggagtggtatgttggacgaggatgaggaggatctgcagagggctcttgcactgtccaggcaggagattgacatggaggacgaggaggctgacctaaggcgcgctattcagctatctatgcagggcagctcccggaatatttctcaggacatgactcagacatctgggacaaatttaacatccgaggagcttcgcaagagacgggaagcctactttgaaaatgattatttcgattcacagcagcagaaacagcagcaacagcaacaacagcagcagcagggagatctgagcggtcagtcatctcacccctgtgaaagaccagctacttccagcggcgctctagggagtgaccttggagacgctatgtccgaggaggacatgctacaggcagctgtgacaatgtcactggagaccgtacggaatgacctcaaaacagagggcaagaagtag

SEQ ID NO: 151659 - DNA, 1113 bp, Artificial Sequence
  derived and/or modified sequence
atggagagcatcttccacgagaagcaggagggcagcctgtgcgcccaacattgtctaaataacttgctacagggcgagtacttctcacccgtcgagctgagttctatcgcgcatcaactcgatgaggaagagcggatgcggatggctgaaggaggagtcacgagcgaggattatcgcacctttctccagcagccaagcgggaacatggacgactcgggtttcttcagcattcaggtaatttcaaatgcactgaaggtgtggggacttgaacttatccttttcaattcacccgagtaccaacgcctgaggatcgatcctatcaatgagcggtcctttatttgtaactacaaggaacactggtttacagtgcgcaaattaggtaagcagtggtttaaccttaattctctgctgacagggcccgaactgatttccgatacctacttggccctgtttctggctcaattgcaacaagaggggtattccattttcgtggtgaaaggagacctccccgactgtgaggcagaccagttactccagatgattcgggtccagcagatgcaccggccaaagctgatcggagaggaactagcgcagcttaaggaacaaagggttcacaagacagatctggaacgcgttcttgaggccaacgatggatcaggtatgctggatgaggacgaagaagatctgcaaagggcactggcactgtctcgacaagaaatcgacatggaagacgaggaagcagatctgaggcgtgcaatacagctctccatgcagggctcctcccggaacatcagccaggatatgacacagactagcgggactaatctaacctctgaggagttacgaaaaaggcgggaggcctatttcgaaaaaactgagagcaggtcagtcgcccaggcccaacaacagaagcagcaacagcagcagcagcagcagcagcaaggagatcttagcggccaatcctctcatccttgcgaacggcccgccacctccagtggagcactgggcagtgacctgggcgacgcaatgagtgaggaagatatgcttcaggcagctgttaccatgtcactcgaaactgtacgaaatgatctgaaaaccgaaggaaaaaagtag

SEQ ID NO: 151660 - DNA, 1095 bp, Artificial Sequence
  derived and/or modified sequence
atggagagcatcttccacgagaagcaggagggcagcctgtgcgcccagcattgcctgaacaatctgttacagggcgaatacttctctccagtcgagctgtcctccatcgctcaccagttggacgaggaggaacggatgcgcatggctgaaggtggagtgacaagtgaagattatcggacatttctccaacaacctagtggcaatatggacgacagcggatttttttcgatccaggtgattagtaacgccttgaaagtgtggggtttagagctgatattgtttaactctcctgagtaccagcgcctgagaattgacccaatcaatgaaagatcattcatttgcaactacaaagagcattggtttacagtcaggaagctcggaaagcagtggttcaatctgaacagtcttctcaccggaccagagctgatctcagatacatatctcgccctttttctggcacagctacagcaggagggatatagcatcttcgttgtcaagggggatctgcccgactgtgaagccgatcaactgttgcagatgatccgcgtccaacaaatgcatagaccgaagcttataggcgaggagctcgcacagctgaaagagcagcgggtacataaaactgacctggaacgggtgctggaggcaaacgatgggtccggaatgcttgatgaggatgaagaggatctgcagcgggccctcgccctatccagacaagaaattgacatggaagacgaggaggctgacttacggagagccatccagctgagtatgcagggttccagccgcaacataagccaggatatgacccagacatccggcaccaacctaacctccgaggaactgagaaaacgccgagaagcttattttgaaaaacagcagcaaaaacagcagcagcagcagcagcagcagcagcagggggatctgagcggacagagctcccatccctgcgagcggccagcaaccagcagtggcgccctgggtagcgatttaggtaaggcctgtagcccatttatcatgttcgctactttcactctctacctgacatatgaactccacgtgatctttgccttgcattactctagctttcctttgtag

SEQ ID NO: 151661 - DNA, 1119 bp, Artificial Sequence
  derived and/or modified sequence
atggagagcatcttccacgagaagcaggagggcagcctgtgcgcccagcactgtttaaacaaccttctacagggcgaatatttttctcctgtcgagctgagttctatcgcacatcagctggacgaagaggaaaggatgagaatggctgaaggaggagtaacatccgaagactacagaacatttctgcaacagccttcaggtaacatggacgactcgggctttttctcaattcaggtgatctccaatgctctcaaagtatggggcctcgaactcatactattcaactcacctgaataccagcgcctgcgcattgatcccattaatgagcggtcattcatttgtaactacaaggagcattggttcactgtgaggaagctggggaaacagtggtttaacctaaactccttactgacaggcccagagctaatctccgacacctatttagctttgtttcttgcccagttgcagcaagagggatattctatatttgtcgtcaaaggggatctgcccgactgtgaggctgatcaactgctccaaatgattcgtgtgcagcagatgcaccgacctaagctaatcggggaggagttagcgcagctcaaggaacaacgggtgcacaaaacagatctcgagagggtgctggaagcgaatgacggctctgggatgctggacgaagacgaagaagacctgcaacgcgcacttgccctgtctcggcaggagatcgacatggaagacgaagaggccgacctccggcgcgccatccagttgtctatgcaggggagctcacggaacatatcgcaggacatgacccagacctcggggaccaacctcacctcagaagaactgcgtaagcgacgcgaggcttacttcgagaagttcggtcgtcccagacgtgcagactgtctgaggcagcagcagaagcaacaacaacaacaacagcaacagcagcagggcgatctctcaggccaatcctcccacccgtgtgagcgccccgccacaagctcaggcgccttaggaagcgatctgggagacgctatgagtgaagaggatatgctgcaggccgcggtgaccatgtcccttgaaacagtgaggaatgatctgaaaacggaggggaagaagtag

SEQ ID NO: 151662 - DNA, 1128 bp, Artificial Sequence
  derived and/or modified sequence
gacagcgtgagcaagaagaagcaggagggcagcctgtgcgcccagcactgcctcaataacttgcttcaaggagagtattttagccccgtcgagctgtcttcaatcgcacaccagctcgacgaagaagaaaggatgcgaatggcagagggtggggtcacaagcgaagattacaggaccttcttgcagcagcccagcgggaatatggacgatagcggctttttcagcatccaggttatttccaacgcgcttaaggtgtggggactagagctaatcctgttcaactcacctgagtaccaaagactgaggattgaccctatcaacgagcgatcatttatatgcaattataaagagcattggtttacagtgcgaaaactgggtaaacagtggtttaatttaaacagccttctgaccggaccagagctgataagcgatacatacttagctctgttccttgcacagctgcagcaggagggatactctattttcgtggttaaaggcgatttacctgactgtgaggccgaccaattactccagatgattagagtgcaacagatgcatcgaccgaagctgatcggtgaagaacttgctcagctgaaggagcagcgcgtgcataagaccgatcttgaaagagtgctagaagctaatgatggatctggtatgctggacgaagacgaggaggatctgcagagagcccttgcactaagcaggcaggaaattgacatggaagatgaggaagctgatcttcggcgggcgattcaactaagcatgcaagggtccagccgtaacattagtcaggacatgacccagaccagcggtactaatctcacatcagaggaactgcgtaagagaagggaagcctacttcgagaaaaaattcaccgctaaccgaactgaccaacattttcacattcttaagcaacaacaaaagcagcagcagcaacagcagcagcagcagcagggggacctgtctggtcagtcaagccacccctgcgagcgacccgcaaccagtagcggggctttagggtccgatttaggagatgctatgagtgaagaggacatgctgcaggcagctgtgactatgtcacttgaaaccgttaggaatgacctcaaaaccgaaggcaagaagtag

SEQ ID NO: 151663 - DNA, 1125 bp, Artificial Sequence
  derived and/or modified sequence
atggagagcatcttccacgagaagcaggagggcagcctgtgcgcccagcactgtttgaacaacttactccagggggagtacttttcacccgtggagctttcaagcatagcgcatcagctcgatgaggaggagcgcatgcgcatggctgagggcggggttacctccgaagattacagaacctttctccagcaaccttctgggaacatggacgactcgggatttttttctattcaggtgatcagtaacgcactgaaagtgtggggcctcgagcttattctttttaattcaccagaatatcaaaggttaagaatcgatccaattaacgagcgctcatttatttgtaactacaaagaacactggttcacagtgcgcaaattgggaaagcaatggtttaacctcaatagtctccttaccggccccgagctgatctccgatacctacctcgctctttttctggcccagctgcaacaagagggctactccatatttgtggtgaagggggatctgccagattgtgaggctgaccagctgctgcagatgattcgggtacagcagatgcacagacccaagttgatcggcgaggagctggctcagctaaaggagcagcgtgtacacaaaactgacttggagagagttttggaagcgaacgatggctcaggaatgttggatgaggacgaagaggacttgcagcgggctctagccctgagccgtcaggagatcgacatggaggacgaggaggccgacctcaggagagcaatacaactgtccatgcagggctcgagccggaacatcagtcaggacatgacacagacgagtggtaccaatctgactagcgaggaattaagaaaacgacgggaggcttatttcgagaaagtgttcttcaagaacctgcaacaaatcgggagggcgcggcaacaacagaagcagcaacagcagcaacagcagcagcagcagggggatttgagcggacaatcaagccacccatgcgagaggcccgcaaccagctcaggcgccttggggagtgacttaggcgatgcgatgtccgaggaggacatgttgcaagcggctgtcacaatgagccttgagacggtcagaaatgacctcaagaccgagggcaagaaatag

SEQ ID NO: 151664 - DNA, 1113 bp, Artificial Sequence
  derived and/or modified sequence
atggagagcatcttccacgagaagcaggagggcagcctgtgcgcccagcattgcctgaacaatcttctgcagggcgaatatttttcacctgtggagctaagctctattgcccaccagctcgacgaggaggagaggatgcggatggcagaggggggcgtaacgtccgaagactacaggacctttttgcagcaacctagcggaaatatggacgactctggctttttttccatacaggtcatctctaacgcactgaaggtgtgggggctagagttaatcctgttcaactccccagaataccagcgactgcggatcgaccccattaacgaacgaagcttcatttgtaattacaaggaacactggttcacggttcggaagttgggcaagcagtggttcaacctcaattcactccttaccgggccagaactcatcagcgacacatatttggcactttttctcgctcaactccagcaggaaggctattccatattcgttgtcaagggagacctccctgactgcgaagccgaccagctgttgcagatgattagggtgcagcagatgcacagacccaaactgatcggcgaagagcttgcccagttaaaggaacagcgggtgcacaaaacggacctggagcgtgtacttgaagctaacgacggcagtgggatgctggacgaggacgaggaggacctgcagcgcgcgttggccctgtcccggcaggagattgacatggaggacgaggaggcagacctcagaagggctattcagctgtcaatgcaagggtcctctcggaatatcagccaggacatgacacagaccagcggaaccaatttgacctcggaggagctgcgcaaacgcagggaggcctactttgagaagatctactttacatttgagtgcttccggcagcagcagaagcaacagcagcaacagcaacagcagcagcaaggggacctgagtggtcagtcctcacacccgtgcgagcgccctgcaacatcttccggggcacttggttccgatctaggtgacgccatgagtgaagaagatatgctacaagctgccgtgacaatgtcgctggaaacagtgcggaatgacctgaaaaccgagggcaagaagtag

SEQ ID NO: 151665 - DNA, 1134 bp, Artificial Sequence
  derived and/or modified sequence
atggagagcatcttccacgagaagcaggagggcagcctgtgcgcccagcactgcttaaacaatctgctgcagggcgaatatttttccccagtggagctctccagcatcgctcaccaactcgacgaagaggagcgaatgcgtatggccgaaggcggggttacctctgaggattacagaacctttttgcagcagccatcaggcaatatggatgactcaggctttttcagcattcaggttatatccaatgcattaaaggtgtgggggttggaactgatcttatttaactcgcccgagtaccagcggttgagaatcgacccaatcaatgagcgctccttcatttgcaactataaagagcattggttcaccgtgaggaaactcggtaaacaatggttcaacctgaatagtttactgacagggccagaactgattagcgatacatacttggctcttttcctagcccaacttcagcaggaaggatacagcatttttgtggtaaagggggaccttcccgattgtgaggcagaccaattacttcagatgatacgggtgcaacagatgcataggcctaaacttatcggcgaggagctggcccaattaaaagagcagagagtgcataagaccgatctggagcgtgtgctcgaggccaacgatgggtctggtatgctggatgaggacgaggaagaccttcagcgcgcgctcgcgctctctaggcaggaaatagatatggaggatgaggaggccgatctgcgcagggccattcagctgagtatgcagggtagctcacgaaatatctctcaggacatgacccagacatctggaactaatctgactagcgaggagcttaggaaacggagagaggcatacttcgagaaagtcttctttaagaatcttcagcaaaaccagcacttccatattctgaaacagcagcagaagcagcagcagcagcaacagcagcagcagcagggcgacctgtctggccagagctctcatccttgcgaacgccctgcaacgagtagcggggctctgggatcagacctcggagatgccatgagtgaagaagacatgttgcaagctgcagtgactatgagtcttgaaacagtgcggaacgacctgaaaacagagggtaagaagtag

SEQ ID NO: 151666 - DNA, 1110 bp, Artificial Sequence
  derived and/or modified sequence
atggaaagtatcttccacgagaaacaggagggatcactctgcgcccagcactgcctgaacaatctgctccagggagagtatttcagccccgtggagttgtcctctatcgctcatcaactagacgaggaagaaaggatgcggatggcagaaggaggcgtcacaagcgaggattacaggactttcctccagcaaccctccggcaacatggacgacagtggattcttttcaatacaggtaatttctaacgcacttaaggtgtggggactcgagttgattctatttaatagcccggaataccagaggttaagaattgaccctatcaacgagcgatcattcatttgtaattataaggagcattggttcacagtgagaaagctcgggaagcagtggtttaacctgaactcactgctgactggccctgaattaatatctgatacatatctggccttgttccttgctcagctccagcaggaaggttattctattttcgttgttaagggcgacctaccagactgtgaggcagaccagttgcttcagatgattagagtccagcagatgcatcgccctaaacttattggcgaggagcttgcccagttgaaggaacagcgagttcacaaaaccgacttggaacgcgtattggaagccaacgacggctccggtatgctagatgaagatgaggaggacctccagcgtgccctcgccctgagccggcaggagatagatatggaggatgaggaggccgacctgcggcgtgccattcagttatccatgcaaggttcctctagaaacatatcccaggacatgactcagactagcggaaccaatctaacatccgaggagcttagaaagcgcagagaagcatacttcgagaaagaccagcattttcatatcttgaaacagcaacagaagcagcagcagcagcagcaacagcagcagcagggtgatttaagcggacagtcctctcatccttgtgagcgtccggcaaccagctctggagctctggggtccgatcttggtgacgccatgtccgaggaggatatgctgcaggccgcagtgactatgagtctggaaacagtgcgaaacgacctaaagaccgagggtaagaagtag

SEQ ID NO: 151667 - DNA, 1086 bp, Artificial Sequence
  derived and/or modified sequence
atggaaagcattttccatgagaagcaggagggcagtctttgtgctcagcactgtctgaacaacctcctgcagggcgagtatttttcaccggtggagctttccagcattgctcaccagctggatgaggaggaacggatgcgaatggcagagggtggagtgacatccgaggactatcggacctttctgcaacagccaagcgggaatatggatgattccggctttttcagtatacaggtgatctcaaatgccctgaaagtgtggggccttgagctcatcctgttcaattcacctgagtatcagcgactcaggattgaccctattaatgagagaagctttatttgtaactacaaagagcattggttcactgtccggaaattgggaaagcagtggtttaacctgaacagcctcctaactggcccagagctgatctccgacacgtaccttgccctgtttctcgctcagctccagcaagagggctatagtatctttgttgtgaagggcgacctgccagactgcgaggcagaccaactgctacagatgatcagagtacaacagatgcacagacctaaactgattggtgaagaactggcacagctcaaagaacagagggtgcataaaaccgaccttgaacgggtacttgaagccaacgatggatccggcatgttagatgaggacgaagaggatcttcaacgagcgttagcccttagccgacaggagatcgacatggaagacgaagaggcagatctccgcagggctatccagttgtctatgcaggggtcttctaggaacattagccaagacatgactcagacatccggtactaaccttacctccgaagaactgcggaaacgcagagaggcttactttgaaaaacaacagcagaaacaacagcagcagcagcagcagcaacagcagggcgacctatccgggcaaagcagtcacccctgcgagcgcccagctacatcttccggtgctctgggtagcgatctgggagatgcaatgagcgaagaggacatgttacaggctgcagtgactatgtcgttagagaccgtgcgcaatgacctgaagactgaaggcaagaaatag

SEQ ID NO: 151668 - DNA, 1101 bp, Artificial Sequence
  derived and/or modified sequence
atggagtctatctttcacgagaagcaggaagggtcgttgtgtgcacagcattgcctcaataacctgttacaaggcgaatacttttccccagtggaactctcttcaattgcccaccagctggatgaggaagagaggatgagaatggccgaaggaggcgtcacctcagaagactatcgtaccttcctgcagcaaccctccggtaacatggacgattccggcttcttttccatccaggtcattagcaacgctcttaaggtgtggggtctggaactgatcctgttcaactcgccagagtaccagcggctaagaatagatcccatcaacgagaggagcttcatttgcaactacaaagagcattggttcaccgtgaggaagctggggaagcagtggttcaacctgaacagccttttgactggcccagagctgatctctgacacataccttgccctattcttggcccagctccagcaggaaggttatagtattttcgtagtcaagggtgacctccccgactgcgaagccgatcagctactccagatgattcgggtgcagcagatgcaccgacccaagctgatcggagaggagcttgcacaactcaaggaacagcgagtgcataaaacagatctggagcgggtgttggaagccaatgacggctccggcatgttggacgaagatgaggaggacctgcagcgtgcccttgctctgagcaggcaggagatcgatatggaggatgaagaggcggacctgaggagggcaatccaactgagtatgcagggctcatcgcggaatatctctcaagatatgacacagacatccggcactaatctcacctccgaggaactgcggaagagaagagaagcgtactttgagaatgactacttcgacagtcagcagcagaagcagcagcagcaacagcagcagcaacagcagggagatctcagcggccagagcagccacccctgtgaacgcccagccaccagtagtggcgcactagggagcgatctcggcgacgccatgagcgaggaggatatgctccaagccgctgtgactatgtccctggagacagtaaggaacgatttgaagacagagggaaagaaatag

SEQ ID NO: 151669 - DNA, 1113 bp, Artificial Sequence
  derived and/or modified sequence
atggagtctatcttccacgaaaagcaagagggcagcctgtgcgcccagcattgcctcaacaatctgcttcagggagagtattttagtcctgtcgaactgtctagcatcgctcatcagttggatgaagaggagagaatgcggatggctgaaggcggtgtgacatctgaagattatcgaacctttctccagcagccttctgggaacatggacgactctggattcttctcgatccaggttattagtaatgcccttaaagtgtggggccttgagcttattttgtttaacagtccggagtatcagcgcctaaggattgatccaataaacgagcggtctttcatctgcaactacaaggaacactggttcacagtccggaagttaggcaagcagtggtttaatctgaatagccttcttacaggcccagaactgatctcagacacataccttgcactgtttcttgcccagctgcagcaggagggttacagcattttcgtggtcaaaggggacttgccagattgcgaggccgaccagctactgcagatgatacgcgtgcagcagatgcacaggcctaagctaatcggggaggaactggcccagctgaaggaacagcgagtccacaagacggacctggaaagggtgctcgaagctaacgacggttctggtatgttagatgaagatgaagaggatctgcagcgagccctcgcgctctcaaggcaggaaattgatatggaggacgaagaagctgatctgcgtcgtgctatccagctgtccatgcagggctcctcacgtaatatctctcaggacatgacccagacttcaggaacgaatttaacgtccgaggagcttcgtaaacgtcgcgaagcttacttcgagaaaaccgagtccagatcggtggctcaggcccagcaacagaagcagcagcaacagcagcagcaacagcagcagggcgatttgtcaggccaatcatcacacccgtgcgaacggccagcgactagctccggtgctctgggctcagacctaggggatgccatgtctgaagaagacatgctccaagccgctgtcactatgagtctggaaaccgtaaggaatgacctgaagactgaaggtaagaaatag

SEQ ID NO: 151670 - DNA, 1095 bp, Artificial Sequence
  derived and/or modified sequence
atggaaagtatctttcacgagaaacaagagggttccctctgtgcccaacattgtttgaacaatctattgcagggcgaatacttctcacctgtagagctgagttccatagcccaccaactggatgaagaggaacgcatgcgtatggctgaggggggagtgacgtccgaagattatcggacgtttctgcaacagcctagtgggaatatggacgacagcggattcttttccatccaagtgatttccaatgccctgaaagtgtggggccttgaactgattctgtttaactcccccgaataccagagactccgaattgaccccataaatgagcgctccttcatttgcaattataaggagcactggtttactgtgcgcaaactgggtaagcaatggtttaacctgaacagcctgcttacagggcctgagttaattagtgatacttacctcgcactgtttctggcccaattgcaacaggagggctacagcatttttgttgtgaagggtgacctgccagactgcgaggccgaccagctcctgcagatgattcgcgtccaacaaatgcaccgaccaaagctgatcggggaagagctcgcacagctgaaggaacagagggtgcacaagaccgacctggaacgggtgctcgaggctaatgatggctccggtatgcttgatgaagatgaggaggacttgcagcgggcactcgccctttcaagacaggagatcgacatggaggatgaggaggctgacctcagaagggccattcagctctcaatgcagggctcctcccgaaatatttcccaggacatgacacagacgagtgggaccaacctgacatccgaggaattaaggaaaagacgagaagcatatttcgaaaaacagcagcaaaagcagcagcagcaacagcaacagcagcagcagggcgacctgtctggacagtcaagccacccatgcgaaagaccagccacttcatctggcgctctaggctcggacctcggaaaggcctgctcaccctttatcatgtttgcaacctttaccctttacttgacctacgaactgcacgttatttttgccctacattattcctctttccctttgtag

SEQ ID NO: 151671 - DNA, 1119 bp, Artificial Sequence
  derived and/or modified sequence
atggaaagcatttttcatgagaaacaagagggatcgttatgtgctcagcactgtctgaataaccttctgcaaggggaatacttcagcccagtcgagctttcatctatcgcgcatcagcttgatgaggaggaaaggatgcgcatggcagaagggggagtgactagtgaagactacagaacttttttacaacagccatccggtaacatggatgacagtggtttcttctccatccaggttatcagcaatgccttaaaggtgtggggcctggaattgatcctgttcaatagccctgaatatcaaaggctgcgtatcgaccccattaatgaacgaagtttcatatgcaactacaaagagcattggttcacagtgcggaagcttggaaaacagtggttcaatctgaacagcctgttgacaggcccagaattgataagcgatacttacctggccctgttccttgctcagctgcagcaggagggctacagtatattcgtggttaagggggacctcccagactgcgaggccgaccagctgctgcaaatgattagggttcagcagatgcaccgtcctaaactgattggagaagagcttgcccaactgaaggagcagcgagtgcacaaaacggacttagagagggtgctggaggcaaatgacggatccggaatgctggatgaggacgaagaggacctgcagcgggctctagcactttcccggcaggagatcgatatggaagatgaagaagccgacctaaggcgagccatccagttgagcatgcaaggatcttcaagaaacatcagccaggacatgacccaaacttctggcactaatctcacctccgaagaactacggaagagacgagaggcctattttgagaaatttggcagaccgaggagagctgattgcttgaggcagcagcaaaagcagcagcaacaacagcagcagcagcagcagggcgacttgagcggccagtcctcccatccgtgtgaaagacctgccaccagctcgggggcattgggttccgacttgggtgatgccatgagtgaagaggacatgctgcaagcagctgtgaccatgagcctggaaaccgttaggaacgaccttaagaccgagggaaagaaatag

SEQ ID NO: 151672 - DNA, 1128 bp, Artificial Sequence
  derived and/or modified sequence
gacagtgtgagcaagaaaaaacaggagggcagcctgtgtgcccagcattgtttgaataatctgctgcagggtgaatacttctcgccagtagagctgtctagcatcgcccaccagctggacgaggaggagaggatgcgaatggccgagggcggtgtgacatccgaggattaccgaactttccttcagcagcctagtggaaacatggacgactcaggatttttcagtattcaggtcatatctaacgctctgaaagtctgggggctcgaactgattctatttaacagtcctgagtatcagaggctgcggattgatcccatcaatgagaggtccttcatttgcaattataaggagcactggtttacagtccggaaactcggaaaacagtggttcaatcttaatagtcttctgactggaccagaactgatctctgacacctaccttgccctgtttctcgcccagctgcagcaggagggctacagtatcttcgtagtgaagggcgacttgcccgactgcgaagctgaccagctgctacagatgatccgggtacaacagatgcatagacctaagctaattggggaagagcttgctcagctcaaggagcagagggtgcacaaaacagatttggagcgggtattggaggccaatgacggttcaggcatgctggatgaggatgaagaagatctgcaacgagcgctcgccctgtcccggcaagaaatagatatggaggacgaagaggccgatctgaggcgggctattcagctctcaatgcaaggctcatcacggaatatcagccaggacatgacacagacatcagggaccaatctgacatccgaggaactgcgcaaacgccgagaagcatactttgagaaaaaatttaccgcgaacagaacggaccagcattttcatattctgaagcagcagcagaaacagcagcagcagcaacagcaacaacagcagggcgacctgtcggggcagtcttcacatccttgtgaaagacccgcaacctcatcaggagcccttggttctgacctcggtgatgccatgtccgaagaggatatgctccaagccgctgtgacaatgtctttggagacagttcgcaacgatctcaaaacagaagggaagaagtag

SEQ ID NO: 151673 - DNA, 1125 bp, Artificial Sequence
  derived and/or modified sequence
atggagtctatctttcacgaaaaacaagagggttccctgtgcgcccagcactgcctgaataacctcttacagggcgagtatttttcaccagttgagcttagtagcattgcccaccagctggacgaggaagaacgcatgagaatggctgagggtggtgtcacttctgaggactatcgaacgtttctccagcagccatcaggcaacatggatgatagcggtttcttttccatccaggtgatttcgaatgcacttaaggtctggggcctcgagctgatcttatttaactcgccggagtatcagcgcctgcggattgatccaattaatgagcgttcatttatttgcaactacaaagagcactggtttacagtccgcaagttgggaaaacagtggtttaatcttaactcactgctcaccggacccgagcttatctcagacacttatctcgcgctatttctggcacagctgcagcaggaaggttacagcatattcgtcgtcaaaggcgatctccctgactgcgaggctgaccagttgttgcagatgatccgtgtgcagcagatgcaccgccctaagttaatcggcgaagagttagcgcagctgaaagagcagcgcgtccacaaaactgacctggagcgagtcttggaggccaacgacggcagcggaatgttagatgaggacgaggaggacctacaacgcgcattagccctcagccgtcaggagattgatatggaagatgaagaagcagatctccgacgtgctattcagttgtccatgcagggatcttcccggaatattagccaggatatgacccaaaccagcggcactaacctgacttcagaggaattgaggaaaagaagggaggcatattttgagaaggtcttcttcaaaaacctacaacagatcggcagagccaggcaacagcagaagcagcagcaacagcagcaacagcagcagcaaggggatctgtccggccagtctagccatccgtgcgaaaggcctgctaccagctcaggggctctgggctccgacctgggggatgccatgtcagaggaagatatgctccaagccgctgtgaccatgagtttggagaccgttagaaacgacctgaaaacagaagggaaaaaatag

SEQ ID NO: 151674 - DNA, 1113 bp, Artificial Sequence
  derived and/or modified sequence
atggagagcattttccacgaaaaacaggagggttctctctgtgcacaacattgcctcaacaatctgctgcaaggcgaatacttttcaccggtggagctgtcatctatagcccaccagctcgatgaagaggaacgcatgcggatggctgagggtggtgtgacaagcgaggactacagaaccttcctccagcagccgtctgggaatatggacgactctgggttctttagtatccaggttatctcgaacgccctgaaggtttggggactcgagctaattctatttaatagtcccgaatatcagcgcctgcgaatagatcctataaacgaaaggtctttcatttgcaactacaaagaacactggtttactgtccgtaagctgggcaagcaatggtttaacctcaatagcttactgaccggcccagagctgatatctgacacctacttagctctgttcctcgcccaattgcagcaggagggctacagtatttttgtcgtgaaaggagatcttcctgactgcgaagctgatcagctgctccagatgattagagtacagcaaatgcatagaccaaagctgattggagaggagctggcccaactgaaggagcagagggtgcacaagacggacctggagcgtgtgctggaggctaatgacgggagtgggatgctggatgaggacgaggaggacttgcagcgcgctttagcattgtcaaggcaggagatcgatatggaggacgaagaggcagatctaaggcgggctattcagctgtcgatgcagggcagctcgcgtaacataagccaggacatgacccaaaccagcggaaccaatctgactagcgaagaactacgaaaacggagggaggcttactttgagaagatctactttaccttcgagtgtttccgtcagcaacaaaaacaacagcagcagcagcagcagcagcaacagggcgatcttagcggccagagtagtcatccctgtgagcgccctgccacatcgtcaggagccttaggctccgacctgggcgacgcaatgagcgaggaagacatgctccaggccgctgtgacgatgtccctggaaaccgttagaaatgatttgaaaactgaaggtaagaagtag

SEQ ID NO: 151675 - DNA, 1134 bp, Artificial Sequence
  derived and/or modified sequence
atggagtccatattccatgaaaagcaggaaggttccctgtgcgcccagcattgcctgaataacttgctccagggagagtacttttcccccgtagaactctcatccatcgcccatcagctggatgaggaggagcggatgaggatggccgagggtggagtgacatctgaggattatagaaccttcctgcagcaacccagcgggaatatggacgacagcgggttttttagcattcaggttatatccaatgctctgaaggtttggggactggagttgattctttttaacagtccagagtaccagcggctaaggatcgaccccatcaatgaacggagtttcatctgtaactacaaggaacattggttcactgtccgaaaactcggcaagcagtggttcaacctgaatagcctgttgaccgggccagagcttataagcgacacttacctagccttattcctcgcgcagctgcaacaagaagggtacagtatcttcgtcgtcaaaggagacctgcctgactgcgaagcggatcagttactccagatgattcgcgtacagcagatgcaccgacccaaactcatcggagaggagctggcccagctaaaggagcaacgcgttcataaaacagatttggagagagtcctggaggctaacgatggcagtggaatgttggacgaggacgaggaggacttgcagcgggctctggccctgtctaggcaggagattgacatggaagatgaggaggccgatcttaggcgcgcaatacagctcagcatgcagggttctagccgcaacatcagccaggacatgacacaaacatctggtactaatctcactagcgaagagctgcgcaagcgcagggaggcctattttgagaaggtgttctttaaaaacctacagcagaatcagcactttcatatcctcaagcagcagcagaagcagcagcaacagcaacagcaacagcagcagggagacctgagcggccagtcctcccatccatgcgagaggcccgctacttcctccggggctctcggttcagacctaggagatgcgatgtcagaggaggatatgttgcaagcagccgtcacaatgtctctggagactgttagaaacgatctcaagacagaggggaaaaagtag

SEQ ID NO: 151676 - DNA, 6947 bp, Artificial Sequence
  derived and/or modified sequence
gagaggggcagggggcggagctggagggggtggttcggcgtgggggccgttggctccagacaaataaacatggagtccatcttccacgagaaacaagaaggctcactttgtgctcaacattgcctgaataacttattgcaaggagaatattttagccctgtggaattatcctcaattgcacatcagctggatgaggaggagaggatgagaatggcagaaggaggagttactagtgaagattatcgcacgtttttacagcagccttctggaaatatggatgacagtggttttttctctattcaggttataagcaatgccttgaaagtttggggtttagaactaatcctgttcaacagtccagagtatcagaggctcaggatcgatcctataaatgaaagatcatttatatgcaattataaggaacactggtttacagttagaaaattaggaaaacagtggtttaacttgaattctctcttgacgggtccagaattaatatcagatacatatcttgcacttttcttggctcaattacaacaggaaggttattctatatttgtcgttaagggtgatctgccagattgcgaagctgaccaactcctgcagatgattagggtccaacagatgcatcgaccaaaacttattggagaagaattagcacaactaaaagagcaaagagtccataaaacagacctggaacgagtgttagaagcaaatgatggctcaggaatgttagacgaagatgaggaggatttgcagagggctctggcactaagtcgccaagaaattgacatggaagatgaggaagcagatctccgcagggctattcagctaagtatgcaaggtagttccagaaacatatctcaagatatgacacagacatcaggtacaaatcttacttcagaagagcttcggaagagacgagaagcctactttgaaaaggatcagcacttccatattttaaaacagcagcaaaagcagcaacagcagcagcagcagcagcagcagggggacctatcaggacagagttcacatccatgtgaaaggccagccaccagttcaggagcacttgggagtgatctaggtgatgctatgagtgaagaagacatgcttcaggcagctgtgaccatgtctttagaaactgtcagaaatgatttgaaaacagaaggaaaaaaataatacctttaaaaaataatttagatattcatactttccaacattatcctgtgtgattacagcatagggtccactttggtaatgtgtcaaagagatgaggaaataagacttttagcggtttgcaaacaaaatgatgggaaagtggaacaatgcgtcggttgtaggactaaataatgatcttccaaatattagccaaagaggcattcagcaattaaagacatttaaaatagttttctaaatgtttctttttcttttttgagtgtgcaatatgtaacatgtctaaagttagggcatttttcttggatctttttgcagactagctaattagctctcgcctcaggctttttccatatagtttgttttctttttctgtcttgtaggtaagttggctcacatcatgtaatagtggctttcatttcttattaaccaaattaacctttcaggaaagtatctctactttcctgatgttgataatagtaatggttctagaaggatgaacagttctcccttcaactgtataccgtgtgctccagtgttttcttgtgttgttttctctgatcacaacttttctgctacctggttttcattattttcccacaattcttttgaaagatggtaatcttttctgaggtttagcgttttaagccctacgatgggatcattatttcatgactggtgcgttcctaaactctgaaatcagccttgcacaagtacttgagaataaatgagcattttttaaaatgtgtgagcatgtgctttcccagatgctttatgaatgtcttttcacttatatcaaaaccttacagctttgttgcaaccccttcttcctgcgccttattttttcctttcttctccaattgagaaaactaggagaagcatagtatgcaggcaagtctccttctgttagaagactaaacatacgtacccaccatgaatgtatgatacatgaaatttggccttcaattttaatagcagttttattttattttttctcctatgactggagctttgtgttctctttacagttgagtcatggaatgtaggtgtctgcttcacatcttttagtaggtatagcttgtcaaagatggtgatctggaacatgaaaataatttactaatgaaaatatgtttaaatttatactgtgatttgacacttgcatcatgtttagatagcttaagaacaatggaagtcacagtacttagtggatctataaataagaaagtccatagttttgataaatattctctttaattgagatgtacagagagtttcttgctgggtcaataggatagtatcattttggtgaaaaccatgtctctgaaattgatgttttagtttcagtgttccctatccctcattctccatctccttttgaagctcttttgaatgttgaattgttcataagctaaaatccaagaaatttcagctgacaacttcgaaaattataatatggtatattgccctcctggtgtgtggctgcacacattttatcagggaaagttttttgatctaggatttattgctaactaactgaaaagagaagaaaaaatatcttttatttatgattataaaatagctttttcttcgatataacagattttttaagtcattattttgtgccaatcagttttctgaagtttcccttacacaaaaggatagctttattttaaaatctaaagtttcttttaatagttaaaaatgtttcagaagaattataaaactttaaaactgcaagggatgttggagtttagtactactccctcaagatttaaaaagctaaatattttaagactgaacatttatgttaattattaccagtgtgtttgtcatattttccatggatatttgttcattacctttttccattgaaaagttacattaaacttttcatacacttgaattgatgagctacctaatataaaaatgagaaaaccaatatgcattttaaagttttaactttagagtttataaagttcatatataccctagttaaagcacttaagaaaatatggcatgtttgacttttagttcctagagagtttttgtttttgtttttgtttttttttgagacggagtcttgctatgtctcccaggctggagggcagtggcatgatctcggctcactacaacttccacctcccgggttcaagcaattctcctgcctcagcctccagagtagctgggattacaggcgcccaccaccacacccggcagatttttgtatttttggtagagacgcggtttcatcatgtttggccaggctggtctcgaactcctgacctcaggtgatccgcctgccttggcctcccaaagtgttgggattacaggcatgagccactgcgcctggccagctagagagtttttaaagcagagctgagcacacactggatgcgtttgaatgtgtttgtgtagtttgttgtgaaattgttacatttagcaggcagatccagaagcactagtgaactgtcatcttggtggggttggcttaaatttaattgactgtttagattccatttcttaattgattggccagtatgaaaagatgccagtgcaagtaaccatagtatcaaaaaagttaaaaattattcaaagctatagtttatacatcaggtactgccatttactgtaaaccacctgcaagaaagtcaggaacaactaaattcacaagaactgtcctgctaagaagtgtattaaagatttccattttgttttactaattgggaacatcttaatgtttaatatttaaactattggtatcatttttctaatgtataatttgtattactgggatcaagtatgtacagtggtgatgctagtagaagtttaagccttggaaataccactttcatattttcagatgtcatggatttaatgagtaatttatgtttttaaaattcagaatagttaatctctgatctaaaaccatcaatctatgttttttacggtaatcatgtaaatatttcagtaatataaactgtttgaaaaggctgctgcaggtaaactctatactaggatcttggccaaataatttacaattcacagaatattttatttaaggtggtgctttttttttttgtccttaaaacttgatttttcttaactttattcatgatgccaaagtaaatgaggaaaaaaactcaaaaccagttgagtatcattgcagacaaaactaccagtagtccatattgtttaatattaagttgaataaaataaattttatttcagtcagagcctaaatcacattttgattgtctgaatttttgatactatttttaaaatcatgctagtggcggctgggcgtggtagctcacgcctgtaatcccagcattttgggaggccgaagtgggtggatcacgaggtcgggagttcgagaccagcttggccaaaatggtgaaaccccatctgtactaaaaactacaaaaattagctgggcgcggtggcaggtgcctgtaatcccagctacctgggagtctgaggcaggagaattgcttgaaccctggcgacagaggatgcagtgagccaagatggtgccactgtactccagactgggcgacagagtgagactctgtctcaaaaaaaaaaaaaaaatcatgctagtgccaagagctactaaattcttaaaaccggcccattggacctgtacagataaaaaatagattcagtgcataatcaaaatatgataattttaaaatcttaagtagaaaaataaatcttgatgttttaaattcttacgaggattcaatagttaatattgatgatctcccggctgggtgcagtggctcacgcctgtaatcccagcagttctggaggctgaggtgggcgaatcacttcaggccaggagttcaagaccagtctgggcaacatggtgaaacctcgtttctactaaaaatacaaaaattagccgggcgtggttgcacacacttgtaatcccagctactcaggaggctaagaatcgcatgagcctaggaggcagaggttgcagagtgccaagggctcaccactgcattccagcctgcccaacagagtgagacactgtttctgaaaaaaaaaaatatatatatatatatatatatgtgtgtatatatatatgtatatatatatgacttcctattaaaaactttatcccagtcgggggcagtggctcacgcctgtaatcccaacactttgggaggctgaggcaggtggatcacctgaagtccggagtttgagaccagcctggccaacatggtgaaaccccatctctactaaaaatacaaaacttaagccaggtatggtggcgggcacctgtaatcccagttacttgggaggctgaggcaggagaatcgtttaaacccaggaggtggaggttgcagtgagctgagatcgtgccattgcactctagcctgggcaacaagagtaaaactccatcttaaaggtttgtttgtttttttttaatccggaaacgaagaggcgttgggccgctattttctttttctttctttctttctttctttttttttttttctgagacggagtctagctctgctgcccaggctggagtacaatgacacgatgttggctcactgcaacctccacctcctgggttcaagcgattctcctgcctcagcctcccaagtacctgggattacaggcacctgccactacacctggcgaatatttgttttttttagtagagacgggcttttaccatgttaggctggtctcaaactcctgacctcaggtgatctgcctgccttggcctcccaaagtgctgggattacaggtgcaggccaccacacccggccttgggccactgttttcaaagtgaattgtttgttgtatcgagtccttaagtatggatatatatgtgaccctaattaagaactaccagattggatcaactaatcatgtcagcaatgtaaataactttatttttcatattcaaaataaaaactttcttttatttctggcccctttataaccagcatctttttgctttaaaaaatgacctggctttgtatttttttagtcttaaacataataaaaatatttttgttctaatttgctttcatgagtgaagattattgacatcgttggtaaattctagaattttgattttgttttttaatttgaagaaaatctttgctattattattttttccaagtggtctggcattttaagaattagtgctaataacgtaacttctaaatttgtcgtaattggcatgtttaatagcatatcaaaaaacattttaagcctgtggattcatagacaaagcaatgagaaacattagtaaaatataaatggatattcctgatgcatttaggaagctctcaattgtctcttgcatagttcaaggaatgttttctgaatttttttaatgctttttttttttttgaaagaggaaaacatacatttttaaatgtgattatctaatttttacaacactgggctattaggaataactttttaaaaattactgttctgtataaatatttgaaattcaagtacagaaaatatctgaaacaaaaagcattgttgtttggccatgatacaagtgcactgtggcagtgccgcttgctcaggacccagccctgcagcccttctgtgtgtgctccctcgttaagttcatttgctgttattacacacacaggccttcctgtctggtcgttagaaaagccgggcttccaaagcactgttgaacacaggattctgttgttagtgtggatgttcaatgagttgtattttaaatatcaaagattattaaataaagataatgtttgcttttcta

SEQ ID NO: 151677 - DNA, 4713 bp, Artificial Sequence
  derived and/or modified sequence
ggggcggagctggagggggtggttcggcgtgggggccgttggctccagacaaataaacatggagtccatcttccacgagaaacaagaaggctcactttgtgctcaacattgcctgaataacttattgcaaggagaatattttagccctgtggaattatcctcaattgcacatcagctggatgaggaggagaggatgagaatggcagaaggaggagttactagtgaagattatcgcacgtttttacagcagccttctggaaatatggatgacagtggttttttctctattcaggttataagcaatgccttgaaagtttggggtttagaactaatcctgttcaacagtccagagtatcagaggctcaggatcgatcctataaatgaaagatcatttatatgcaattataaggaacactggtttacagttagaaaattaggaaaacagtggtttaacttgaattctctcttgacgggtccagaattaatatcagatacatatcttgcacttttcttggctcaattacaacaggaaggttattctatatttgtcgttaagggtgatctgccagattgcgaagctgaccaactcctgcagatgattagggtccaacagatgcatcgaccaaaacttattggagaagaattagcacaactaaaagagcaaagagtccataaaacagacctggaacgagtgttagaagcaaatgatggctcaggaatgttagacgaagatgaggaggatttgcagagggctctggcactaagtcgccaagaaattgacatggaagatgaggaagcagatctccgcagggctattcagctaagtatgcaaggtagttccagaaacatatctcaagatatgacacagacatcaggtacaaatcttacttcagaagagcttcggaagagacgagaagcctactttgaaaaacagcagcaaaagcagcaacagcagcagcagcagcagcagcagggggacctatcaggacagagttcacatccatgtgaaaggccagccaccagttcaggagcacttgggagtgatctaggtgatgctatgagtgaagaagacatgcttcaggcagctgtgaccatgtctttagaaactgtcagaaatgatttgaaaacagaaggaaaaaaataatacctttaaaaaataatttagatattcatactttccaacattatcctgtgtgattacagcatagggtccactttggtaatgtgtcaaagagatgaggaaataagacttttagcggtttgcaaacaaaatgatgggaaagtggaacaatgcgtcggttgtaggactaaataatgatcttccaaatattagccaaagaggcattcagcaattaaagacatttaaaatagttttctaaatgtttctttttcttttttgagtgtgcaatatgtaacatgtctaaagttagggcatttttcttggatctttttgcagactagctaattagctctcgcctcaggctttttccatatagtttgttttctttttctgtcttgtaggtaagttggctcacatcatgtaatagtggctttcatttcttattaaccaaattaacctttcaggaaagtatctctactttcctgatgttgataatagtaatggttctagaaggatgaacagttctcccttcaactgtataccgtgtgctccagtgttttcttgtgttgttttctctgatcacaacttttctgctacctggttttcattattttcccacaattcttttgaaagatggtaatcttttctgaggtttagcgttttaagccctacgatgggatcattatttcatgactggtgcgttcctaaactctgaaatcagccttgcacaagtacttgagaataaatgagcattttttaaaatgtgtgagcatgtgctttcccagatgctttatgaatgtcttttcacttatatcaaaaccttacagctttgttgcaaccccttcttcctgcgccttattttttcctttcttctccaattgagaaaactaggagaagcatagtatgcaggcaagtctccttctgttagaagactaaacatacgtacccaccatgaatgtatgatacatgaaatttggccttcaattttaatagcagttttattttattttttctcctatgactggagctttgtgttctctttacagttgagtcatggaatgtaggtgtctgcttcacatcttttagtaggtatagcttgtcaaagatggtgatctggaacatgaaaataatttactaatgaaaatatgtttaaatttatactgtgatttgacacttgcatcatgtttagatagcttaagaacaatggaagtcacagtacttagtggatctataaataagaaagtccatagttttgataaatattctctttaattgagatgtacagagagtttcttgctgggtcaataggatagtatcattttggtgaaaaccatgtctctgaaattgatgttttagtttcagtgttccctatccctcattctccatctccttttgaagctcttttgaatgttgaattgttcataagctaaaatccaagaaatttcagctgacaacttcgaaaattataatatggtatattgccctcctggtgtgtggctgcacacattttatcagggaaagttttttgatctaggatttattgctaactaactgaaaagagaagaaaaaatatcttttatttatgattataaaatagctttttcttcgatataacagattttttaagtcattattttgtgccaatcagttttctgaagtttcccttacacaaaaggatagctttattttaaaatctaaagtttcttttaatagttaaaaatgtttcagaagaattataaaactttaaaactgcaagggatgttggagtttagtactactccctcaagatttaaaaagctaaatattttaagactgaacatttatgttaattattaccagtgtgtttgtcatattttccatggatatttgttcattacctttttccattgaaaagttacattaaacttttcatacacttgaattgatgagctacctaatataaaaatgagaaaaccaatatgcattttaaagttttaactttagagtttataaagttcatatataccctagttaaagcacttaagaaaatatggcatgtttgacttttagttcctagagagtttttgtttttgtttttgtttttttttgagacggagtcttgctatgtctcccaggctggagggcagtggcatgatctcggctcactacaacttccacctcccgggttcaagcaattctcctgcctcagcctccagagtagctgggattacaggcgcccaccaccacacccggcagatttttgtatttttggtagagacgcggtttcatcatgtttggccaggctggtctcgaactcctgacctcaggtgatccgcctgccttggcctcccaaagtgttgggattacaggcatgagccactgcgcctggccagctagagagtttttaaagcagagctgagcacacactggatgcgtttgaatgtgtttgtgtagtttgttgtgaaattgttacatttagcaggcagatccagaagcactagtgaactgtcatcttggtggggttggcttaaatttaattgactgtttagattccatttcttaattgattggccagtatgaaaagatgccagtgcaagtaaccatagtatcaaaaaagttaaaaattattcaaagctatagtttatacatcaggtactgccatttactgtaaaccacctgcaagaaagtcaggaacaactaaattcacaagaactgtcctgctaagaagtgtattaaagatttccattttgttttactaattgggaacatcttaatgtttaatatttaaactattggtatcatttttctaatgtataatttgtattactgggatcaagtatgtacagtggtgatgctagtagaagtttaagccttggaaataccactttcatattttcagatgtcatggatttaatgagtaatttatgtttttaaaattcagaatagttaatctctgatctaaaaccatcaatctatgttttttacggtaatcatgtaaatatttcagtaatataaactgtttgaaaaggctgctgcaggtaaactctatactaggatcttggccaaataatttacaattcacagaatattttatttaaggtggtgctttttttttttgtccttaaaacttgatttttcttaactttattcatgatgccaaagtaaatgaggaaaaaaactcaaaaccagttgagtatcattgcagacaaaactaccagtagtccatattgtttaatattaagttgaataaaataaattttatttcagtcagagcctaaatcacattttgattgtctgaatttttgatactatttttaaaatcatgctagtggcggctgggcgtggtagctcacgcctgtaatcccagcattttgggaggccgaagtgggtggatcacgaggtcgggagttcgagaccagcttggccaaaatggtgaaaccccatctgtactaaaaactacaaaaattagctgggcgcggtggcaggtgcctgtaatcccagctacctgggagtctgaggcaggagaattgcttgaaccctggcgacagaggatgcagtgagccaagatggtgccactgtactccagactgggcgacagagtgagactctgtctc

SEQ ID NO: 151678 - DNA, 6938 bp, Artificial Sequence
  derived and/or modified sequence
gagaggggcagggggcggagctggagggggtggttcggcgtgggggccgttggctccagacaaataaacatggagtccatcttccacgagaaacaagaaggctcactttgtgctcaacattgcctgaataacttattgcaaggagaatattttagccctgtggaattatcctcaattgcacatcagctggatgaggaggagaggatgagaatggcagaaggaggagttactagtgaagattatcgcacgtttttacagcagccttctggaaatatggatgacagtggttttttctctattcaggttataagcaatgccttgaaagtttggggtttagaactaatcctgttcaacagtccagagtatcagaggctcaggatcgatcctataaatgaaagatcatttatatgcaattataaggaacactggtttacagttagaaaattaggaaaacagtggtttaacttgaattctctcttgacgggtccagaattaatatcagatacatatcttgcacttttcttggctcaattacaacaggaaggttattctatatttgtcgttaagggtgatctgccagattgcgaagctgaccaactcctgcagatgattagggtccaacagatgcatcgaccaaaacttattggagaagaattagcacaactaaaagagcaaagagtccataaaacagacctggaacgagtgttagaagcaaatgatggctcaggaatgttagacgaagatgaggaggatttgcagagggctctggcactaagtcgccaagaaattgacatggaagatgaggaagcagatctccgcagggctattcagctaagtatgcaaggtagttccagaaacatatctcaagatatgacacagacatcaggtacaaatcttacttcagaagagcttcggaagagacgagaagcctactttgaaaatgactactttgattcacagcagcaaaagcagcaacagcagcagcagcagcagcagcagggggacctatcaggacagagttcacatccatgtgaaaggccagccaccagttcaggagcacttgggagtgatctaggtgatgctatgagtgaagaagacatgcttcaggcagctgtgaccatgtctttagaaactgtcagaaatgatttgaaaacagaaggaaaaaaataatacctttaaaaaataatttagatattcatactttccaacattatcctgtgtgattacagcatagggtccactttggtaatgtgtcaaagagatgaggaaataagacttttagcggtttgcaaacaaaatgatgggaaagtggaacaatgcgtcggttgtaggactaaataatgatcttccaaatattagccaaagaggcattcagcaattaaagacatttaaaatagttttctaaatgtttctttttcttttttgagtgtgcaatatgtaacatgtctaaagttagggcatttttcttggatctttttgcagactagctaattagctctcgcctcaggctttttccatatagtttgttttctttttctgtcttgtaggtaagttggctcacatcatgtaatagtggctttcatttcttattaaccaaattaacctttcaggaaagtatctctactttcctgatgttgataatagtaatggttctagaaggatgaacagttctcccttcaactgtataccgtgtgctccagtgttttcttgtgttgttttctctgatcacaacttttctgctacctggttttcattattttcccacaattcttttgaaagatggtaatcttttctgaggtttagcgttttaagccctacgatgggatcattatttcatgactggtgcgttcctaaactctgaaatcagccttgcacaagtacttgagaataaatgagcattttttaaaatgtgtgagcatgtgctttcccagatgctttatgaatgtcttttcacttatatcaaaaccttacagctttgttgcaaccccttcttcctgcgccttattttttcctttcttctccaattgagaaaactaggagaagcatagtatgcaggcaagtctccttctgttagaagactaaacatacgtacccaccatgaatgtatgatacatgaaatttggccttcaattttaatagcagttttattttattttttctcctatgactggagctttgtgttctctttacagttgagtcatggaatgtaggtgtctgcttcacatcttttagtaggtatagcttgtcaaagatggtgatctggaacatgaaaataatttactaatgaaaatatgtttaaatttatactgtgatttgacacttgcatcatgtttagatagcttaagaacaatggaagtcacagtacttagtggatctataaataagaaagtccatagttttgataaatattctctttaattgagatgtacagagagtttcttgctgggtcaataggatagtatcattttggtgaaaaccatgtctctgaaattgatgttttagtttcagtgttccctatccctcattctccatctccttttgaagctcttttgaatgttgaattgttcataagctaaaatccaagaaatttcagctgacaacttcgaaaattataatatggtatattgccctcctggtgtgtggctgcacacattttatcagggaaagttttttgatctaggatttattgctaactaactgaaaagagaagaaaaaatatcttttatttatgattataaaatagctttttcttcgatataacagattttttaagtcattattttgtgccaatcagttttctgaagtttcccttacacaaaaggatagctttattttaaaatctaaagtttcttttaatagttaaaaatgtttcagaagaattataaaactttaaaactgcaagggatgttggagtttagtactactccctcaagatttaaaaagctaaatattttaagactgaacatttatgttaattattaccagtgtgtttgtcatattttccatggatatttgttcattacctttttccattgaaaagttacattaaacttttcatacacttgaattgatgagctacctaatataaaaatgagaaaaccaatatgcattttaaagttttaactttagagtttataaagttcatatataccctagttaaagcacttaagaaaatatggcatgtttgacttttagttcctagagagtttttgtttttgtttttgtttttttttgagacggagtcttgctatgtctcccaggctggagggcagtggcatgatctcggctcactacaacttccacctcccgggttcaagcaattctcctgcctcagcctccagagtagctgggattacaggcgcccaccaccacacccggcagatttttgtatttttggtagagacgcggtttcatcatgtttggccaggctggtctcgaactcctgacctcaggtgatccgcctgccttggcctcccaaagtgttgggattacaggcatgagccactgcgcctggccagctagagagtttttaaagcagagctgagcacacactggatgcgtttgaatgtgtttgtgtagtttgttgtgaaattgttacatttagcaggcagatccagaagcactagtgaactgtcatcttggtggggttggcttaaatttaattgactgtttagattccatttcttaattgattggccagtatgaaaagatgccagtgcaagtaaccatagtatcaaaaaagttaaaaattattcaaagctatagtttatacatcaggtactgccatttactgtaaaccacctgcaagaaagtcaggaacaactaaattcacaagaactgtcctgctaagaagtgtattaaagatttccattttgttttactaattgggaacatcttaatgtttaatatttaaactattggtatcatttttctaatgtataatttgtattactgggatcaagtatgtacagtggtgatgctagtagaagtttaagccttggaaataccactttcatattttcagatgtcatggatttaatgagtaatttatgtttttaaaattcagaatagttaatctctgatctaaaaccatcaatctatgttttttacggtaatcatgtaaatatttcagtaatataaactgtttgaaaaggctgctgcaggtaaactctatactaggatcttggccaaataatttacaattcacagaatattttatttaaggtggtgctttttttttttgtccttaaaacttgatttttcttaactttattcatgatgccaaagtaaatgaggaaaaaaactcaaaaccagttgagtatcattgcagacaaaactaccagtagtccatattgtttaatattaagttgaataaaataaattttatttcagtcagagcctaaatcacattttgattgtctgaatttttgatactatttttaaaatcatgctagtggcggctgggcgtggtagctcacgcctgtaatcccagcattttgggaggccgaagtgggtggatcacgaggtcgggagttcgagaccagcttggccaaaatggtgaaaccccatctgtactaaaaactacaaaaattagctgggcgcggtggcaggtgcctgtaatcccagctacctgggagtctgaggcaggagaattgcttgaaccctggcgacagaggatgcagtgagccaagatggtgccactgtactccagactgggcgacagagtgagactctgtctcaaaaaaaaaaaaaaaatcatgctagtgccaagagctactaaattcttaaaaccggcccattggacctgtacagataaaaaatagattcagtgcataatcaaaatatgataattttaaaatcttaagtagaaaaataaatcttgatgttttaaattcttacgaggattcaatagttaatattgatgatctcccggctgggtgcagtggctcacgcctgtaatcccagcagttctggaggctgaggtgggcgaatcacttcaggccaggagttcaagaccagtctgggcaacatggtgaaacctcgtttctactaaaaatacaaaaattagccgggcgtggttgcacacacttgtaatcccagctactcaggaggctaagaatcgcatgagcctaggaggcagaggttgcagagtgccaagggctcaccactgcattccagcctgcccaacagagtgagacactgtttctgaaaaaaaaaaatatatatatatatatatatatgtgtgtatatatatatgtatatatatatgacttcctattaaaaactttatcccagtcgggggcagtggctcacgcctgtaatcccaacactttgggaggctgaggcaggtggatcacctgaagtccggagtttgagaccagcctggccaacatggtgaaaccccatctctactaaaaatacaaaacttaagccaggtatggtggcgggcacctgtaatcccagttacttgggaggctgaggcaggagaatcgtttaaacccaggaggtggaggttgcagtgagctgagatcgtgccattgcactctagcctgggcaacaagagtaaaactccatcttaaaggtttgtttgtttttttttaatccggaaacgaagaggcgttgggccgctattttctttttctttctttctttctttctttttttttttttctgagacggagtctagctctgctgcccaggctggagtacaatgacacgatgttggctcactgcaacctccacctcctgggttcaagcgattctcctgcctcagcctcccaagtacctgggattacaggcacctgccactacacctggcgaatatttgttttttttagtagagacgggcttttaccatgttaggctggtctcaaactcctgacctcaggtgatctgcctgccttggcctcccaaagtgctgggattacaggtgcaggccaccacacccggccttgggccactgttttcaaagtgaattgtttgttgtatcgagtccttaagtatggatatatatgtgaccctaattaagaactaccagattggatcaactaatcatgtcagcaatgtaaataactttatttttcatattcaaaataaaaactttcttttatttctggcccctttataaccagcatctttttgctttaaaaaatgacctggctttgtatttttttagtcttaaacataataaaaatatttttgttctaatttgctttcatgagtgaagattattgacatcgttggtaaattctagaattttgattttgttttttaatttgaagaaaatctttgctattattattttttccaagtggtctggcattttaagaattagtgctaataacgtaacttctaaatttgtcgtaattggcatgtttaatagcatatcaaaaaacattttaagcctgtggattcatagacaaagcaatgagaaacattagtaaaatataaatggatattcctgatgcatttaggaagctctcaattgtctcttgcatagttcaaggaatgttttctgaatttttttaatgctttttttttttttgaaagaggaaaacatacatttttaaatgtgattatctaatttttacaacactgggctattaggaataactttttaaaaattactgttctgtataaatatttgaaattcaagtacagaaaatatctgaaacaaaaagcattgttgtttggccatgatacaagtgcactgtggcagtgccgcttgctcaggacccagccctgcagcccttctgtgtgtgctccctcgttaagttcatttgctgttattacacacacaggccttcctgtctggtcgttagaaaagccgggcttccaaagcactgttgaacacaggattctgttgttagtgtggatgttcaatgagttgtattttaaatatcaaagattattaaataaagataatgtttgcttttcta

SEQ ID NO: 151679 - DNA, 6950 bp, Artificial Sequence
  derived and/or modified sequence
gagaggggcagggggcggagctggagggggtggttcggcgtgggggccgttggctccagacaaataaacatggagtccatcttccacgagaaacaagaaggctcactttgtgctcaacattgcctgaataacttattgcaaggagaatattttagccctgtggaattatcctcaattgcacatcagctggatgaggaggagaggatgagaatggcagaaggaggagttactagtgaagattatcgcacgtttttacagcagccttctggaaatatggatgacagtggttttttctctattcaggttataagcaatgccttgaaagtttggggtttagaactaatcctgttcaacagtccagagtatcagaggctcaggatcgatcctataaatgaaagatcatttatatgcaattataaggaacactggtttacagttagaaaattaggaaaacagtggtttaacttgaattctctcttgacgggtccagaattaatatcagatacatatcttgcacttttcttggctcaattacaacaggaaggttattctatatttgtcgttaagggtgatctgccagattgcgaagctgaccaactcctgcagatgattagggtccaacagatgcatcgaccaaaacttattggagaagaattagcacaactaaaagagcaaagagtccataaaacagacctggaacgagtgttagaagcaaatgatggctcaggaatgttagacgaagatgaggaggatttgcagagggctctggcactaagtcgccaagaaattgacatggaagatgaggaagcagatctccgcagggctattcagctaagtatgcaaggtagttccagaaacatatctcaagatatgacacagacatcaggtacaaatcttacttcagaagagcttcggaagagacgagaagcctactttgaaaagacagagtctcgctctgtcgcccaggcacagcagcaaaagcagcaacagcagcagcagcagcagcagcagggggacctatcaggacagagttcacatccatgtgaaaggccagccaccagttcaggagcacttgggagtgatctaggtgatgctatgagtgaagaagacatgcttcaggcagctgtgaccatgtctttagaaactgtcagaaatgatttgaaaacagaaggaaaaaaataatacctttaaaaaataatttagatattcatactttccaacattatcctgtgtgattacagcatagggtccactttggtaatgtgtcaaagagatgaggaaataagacttttagcggtttgcaaacaaaatgatgggaaagtggaacaatgcgtcggttgtaggactaaataatgatcttccaaatattagccaaagaggcattcagcaattaaagacatttaaaatagttttctaaatgtttctttttcttttttgagtgtgcaatatgtaacatgtctaaagttagggcatttttcttggatctttttgcagactagctaattagctctcgcctcaggctttttccatatagtttgttttctttttctgtcttgtaggtaagttggctcacatcatgtaatagtggctttcatttcttattaaccaaattaacctttcaggaaagtatctctactttcctgatgttgataatagtaatggttctagaaggatgaacagttctcccttcaactgtataccgtgtgctccagtgttttcttgtgttgttttctctgatcacaacttttctgctacctggttttcattattttcccacaattcttttgaaagatggtaatcttttctgaggtttagcgttttaagccctacgatgggatcattatttcatgactggtgcgttcctaaactctgaaatcagccttgcacaagtacttgagaataaatgagcattttttaaaatgtgtgagcatgtgctttcccagatgctttatgaatgtcttttcacttatatcaaaaccttacagctttgttgcaaccccttcttcctgcgccttattttttcctttcttctccaattgagaaaactaggagaagcatagtatgcaggcaagtctccttctgttagaagactaaacatacgtacccaccatgaatgtatgatacatgaaatttggccttcaattttaatagcagttttattttattttttctcctatgactggagctttgtgttctctttacagttgagtcatggaatgtaggtgtctgcttcacatcttttagtaggtatagcttgtcaaagatggtgatctggaacatgaaaataatttactaatgaaaatatgtttaaatttatactgtgatttgacacttgcatcatgtttagatagcttaagaacaatggaagtcacagtacttagtggatctataaataagaaagtccatagttttgataaatattctctttaattgagatgtacagagagtttcttgctgggtcaataggatagtatcattttggtgaaaaccatgtctctgaaattgatgttttagtttcagtgttccctatccctcattctccatctccttttgaagctcttttgaatgttgaattgttcataagctaaaatccaagaaatttcagctgacaacttcgaaaattataatatggtatattgccctcctggtgtgtggctgcacacattttatcagggaaagttttttgatctaggatttattgctaactaactgaaaagagaagaaaaaatatcttttatttatgattataaaatagctttttcttcgatataacagattttttaagtcattattttgtgccaatcagttttctgaagtttcccttacacaaaaggatagctttattttaaaatctaaagtttcttttaatagttaaaaatgtttcagaagaattataaaactttaaaactgcaagggatgttggagtttagtactactccctcaagatttaaaaagctaaatattttaagactgaacatttatgttaattattaccagtgtgtttgtcatattttccatggatatttgttcattacctttttccattgaaaagttacattaaacttttcatacacttgaattgatgagctacctaatataaaaatgagaaaaccaatatgcattttaaagttttaactttagagtttataaagttcatatataccctagttaaagcacttaagaaaatatggcatgtttgacttttagttcctagagagtttttgtttttgtttttgtttttttttgagacggagtcttgctatgtctcccaggctggagggcagtggcatgatctcggctcactacaacttccacctcccgggttcaagcaattctcctgcctcagcctccagagtagctgggattacaggcgcccaccaccacacccggcagatttttgtatttttggtagagacgcggtttcatcatgtttggccaggctggtctcgaactcctgacctcaggtgatccgcctgccttggcctcccaaagtgttgggattacaggcatgagccactgcgcctggccagctagagagtttttaaagcagagctgagcacacactggatgcgtttgaatgtgtttgtgtagtttgttgtgaaattgttacatttagcaggcagatccagaagcactagtgaactgtcatcttggtggggttggcttaaatttaattgactgtttagattccatttcttaattgattggccagtatgaaaagatgccagtgcaagtaaccatagtatcaaaaaagttaaaaattattcaaagctatagtttatacatcaggtactgccatttactgtaaaccacctgcaagaaagtcaggaacaactaaattcacaagaactgtcctgctaagaagtgtattaaagatttccattttgttttactaattgggaacatcttaatgtttaatatttaaactattggtatcatttttctaatgtataatttgtattactgggatcaagtatgtacagtggtgatgctagtagaagtttaagccttggaaataccactttcatattttcagatgtcatggatttaatgagtaatttatgtttttaaaattcagaatagttaatctctgatctaaaaccatcaatctatgttttttacggtaatcatgtaaatatttcagtaatataaactgtttgaaaaggctgctgcaggtaaactctatactaggatcttggccaaataatttacaattcacagaatattttatttaaggtggtgctttttttttttgtccttaaaacttgatttttcttaactttattcatgatgccaaagtaaatgaggaaaaaaactcaaaaccagttgagtatcattgcagacaaaactaccagtagtccatattgtttaatattaagttgaataaaataaattttatttcagtcagagcctaaatcacattttgattgtctgaatttttgatactatttttaaaatcatgctagtggcggctgggcgtggtagctcacgcctgtaatcccagcattttgggaggccgaagtgggtggatcacgaggtcgggagttcgagaccagcttggccaaaatggtgaaaccccatctgtactaaaaactacaaaaattagctgggcgcggtggcaggtgcctgtaatcccagctacctgggagtctgaggcaggagaattgcttgaaccctggcgacagaggatgcagtgagccaagatggtgccactgtactccagactgggcgacagagtgagactctgtctcaaaaaaaaaaaaaaaatcatgctagtgccaagagctactaaattcttaaaaccggcccattggacctgtacagataaaaaatagattcagtgcataatcaaaatatgataattttaaaatcttaagtagaaaaataaatcttgatgttttaaattcttacgaggattcaatagttaatattgatgatctcccggctgggtgcagtggctcacgcctgtaatcccagcagttctggaggctgaggtgggcgaatcacttcaggccaggagttcaagaccagtctgggcaacatggtgaaacctcgtttctactaaaaatacaaaaattagccgggcgtggttgcacacacttgtaatcccagctactcaggaggctaagaatcgcatgagcctaggaggcagaggttgcagagtgccaagggctcaccactgcattccagcctgcccaacagagtgagacactgtttctgaaaaaaaaaaatatatatatatatatatatatgtgtgtatatatatatgtatatatatatgacttcctattaaaaactttatcccagtcgggggcagtggctcacgcctgtaatcccaacactttgggaggctgaggcaggtggatcacctgaagtccggagtttgagaccagcctggccaacatggtgaaaccccatctctactaaaaatacaaaacttaagccaggtatggtggcgggcacctgtaatcccagttacttgggaggctgaggcaggagaatcgtttaaacccaggaggtggaggttgcagtgagctgagatcgtgccattgcactctagcctgggcaacaagagtaaaactccatcttaaaggtttgtttgtttttttttaatccggaaacgaagaggcgttgggccgctattttctttttctttctttctttctttctttttttttttttctgagacggagtctagctctgctgcccaggctggagtacaatgacacgatgttggctcactgcaacctccacctcctgggttcaagcgattctcctgcctcagcctcccaagtacctgggattacaggcacctgccactacacctggcgaatatttgttttttttagtagagacgggcttttaccatgttaggctggtctcaaactcctgacctcaggtgatctgcctgccttggcctcccaaagtgctgggattacaggtgcaggccaccacacccggccttgggccactgttttcaaagtgaattgtttgttgtatcgagtccttaagtatggatatatatgtgaccctaattaagaactaccagattggatcaactaatcatgtcagcaatgtaaataactttatttttcatattcaaaataaaaactttcttttatttctggcccctttataaccagcatctttttgctttaaaaaatgacctggctttgtatttttttagtcttaaacataataaaaatatttttgttctaatttgctttcatgagtgaagattattgacatcgttggtaaattctagaattttgattttgttttttaatttgaagaaaatctttgctattattattttttccaagtggtctggcattttaagaattagtgctaataacgtaacttctaaatttgtcgtaattggcatgtttaatagcatatcaaaaaacattttaagcctgtggattcatagacaaagcaatgagaaacattagtaaaatataaatggatattcctgatgcatttaggaagctctcaattgtctcttgcatagttcaaggaatgttttctgaatttttttaatgctttttttttttttgaaagaggaaaacatacatttttaaatgtgattatctaatttttacaacactgggctattaggaataactttttaaaaattactgttctgtataaatatttgaaattcaagtacagaaaatatctgaaacaaaaagcattgttgtttggccatgatacaagtgcactgtggcagtgccgcttgctcaggacccagccctgcagcccttctgtgtgtgctccctcgttaagttcatttgctgttattacacacacaggccttcctgtctggtcgttagaaaagccgggcttccaaagcactgttgaacacaggattctgttgttagtgtggatgttcaatgagttgtattttaaatatcaaagattattaaataaagataatgtttgcttttcta

SEQ ID NO: 151680 - DNA, 1191 bp, Artificial Sequence
  derived and/or modified sequence
acaaataaacatggagtccatcttccacgagaaacaagaaggctcactttgtgctcaacattgcctgaataacttattgcaaggagaatattttagccctgtggaattatcctcaattgcacatcagctggatgaggaggagaggatgagaatggcagaaggaggagttactagtgaagattatcgcacgtttttacagcagccttctggaaatatggatgacagtggttttttctctattcaggttataagcaatgccttgaaagtttggggtttagaactaatcctgttcaacagtccagagtatcagaggctcaggatcgatcctataaatgaaagatcatttatatgcaattataaggaacactggtttacagttagaaaattaggaaaacagtggtttaacttgaattctctcttgacgggtccagaattaatatcagatacatatcttgcacttttcttggctcaattacaacaggaaggttattctatatttgtcgttaagggtgatctgccagattgcgaagctgaccaactcctgcagatgattagggtccaacagatgcatcgaccaaaacttattggagaagaattagcacaactaaaagagcaaagagtccataaaacagacctggaacgagtgttagaagcaaatgatggctcaggaatgttagacgaagatgaggaggatttgcagagggctctggcactaagtcgccaagaaattgacatggaagatgaggaagcagatctccgcagggctattcagctaagtatgcaaggtagttccagaaacatatctcaagatatgacacagacatcaggtacaaatcttacttcagaagagcttcggaagagacgagaagcctactttgaaaaacagcagcaaaagcagcaacagcagcagcagcagcagcagcagggggacctatcaggacagagttcacatccatgtgaaaggccagccaccagttcaggagcacttgggagtgatctaggtaaggcctgctcaccattcatcatgttcgctaccttcacactttatctgacatacgagctccatgtgatttttgctttacattattcttcattccctctttaatcatattaagaatcttaagtaaatttgtaatctactaaatttccctggattaaggagcagttaccaaaagaaaaaaaaaaaaaaaa

SEQ ID NO: 151681 - DNA, 6956 bp, Artificial Sequence
  derived and/or modified sequence
gagaggggcagggggcggagctggagggggtggttcggcgtgggggccgttggctccagacaaataaacatggagtccatcttccacgagaaacaagaaggctcactttgtgctcaacattgcctgaataacttattgcaaggagaatattttagccctgtggaattatcctcaattgcacatcagctggatgaggaggagaggatgagaatggcagaaggaggagttactagtgaagattatcgcacgtttttacagcagccttctggaaatatggatgacagtggttttttctctattcaggttataagcaatgccttgaaagtttggggtttagaactaatcctgttcaacagtccagagtatcagaggctcaggatcgatcctataaatgaaagatcatttatatgcaattataaggaacactggtttacagttagaaaattaggaaaacagtggtttaacttgaattctctcttgacgggtccagaattaatatcagatacatatcttgcacttttcttggctcaattacaacaggaaggttattctatatttgtcgttaagggtgatctgccagattgcgaagctgaccaactcctgcagatgattagggtccaacagatgcatcgaccaaaacttattggagaagaattagcacaactaaaagagcaaagagtccataaaacagacctggaacgagtgttagaagcaaatgatggctcaggaatgttagacgaagatgaggaggatttgcagagggctctggcactaagtcgccaagaaattgacatggaagatgaggaagcagatctccgcagggctattcagctaagtatgcaaggtagttccagaaacatatctcaagatatgacacagacatcaggtacaaatcttacttcagaagagcttcggaagagacgagaagcctactttgaaaagtttgggaggccaaggcgggcagattgcctgagacagcagcaaaagcagcaacagcagcagcagcagcagcagcagggggacctatcaggacagagttcacatccatgtgaaaggccagccaccagttcaggagcacttgggagtgatctaggtgatgctatgagtgaagaagacatgcttcaggcagctgtgaccatgtctttagaaactgtcagaaatgatttgaaaacagaaggaaaaaaataatacctttaaaaaataatttagatattcatactttccaacattatcctgtgtgattacagcatagggtccactttggtaatgtgtcaaagagatgaggaaataagacttttagcggtttgcaaacaaaatgatgggaaagtggaacaatgcgtcggttgtaggactaaataatgatcttccaaatattagccaaagaggcattcagcaattaaagacatttaaaatagttttctaaatgtttctttttcttttttgagtgtgcaatatgtaacatgtctaaagttagggcatttttcttggatctttttgcagactagctaattagctctcgcctcaggctttttccatatagtttgttttctttttctgtcttgtaggtaagttggctcacatcatgtaatagtggctttcatttcttattaaccaaattaacctttcaggaaagtatctctactttcctgatgttgataatagtaatggttctagaaggatgaacagttctcccttcaactgtataccgtgtgctccagtgttttcttgtgttgttttctctgatcacaacttttctgctacctggttttcattattttcccacaattcttttgaaagatggtaatcttttctgaggtttagcgttttaagccctacgatgggatcattatttcatgactggtgcgttcctaaactctgaaatcagccttgcacaagtacttgagaataaatgagcattttttaaaatgtgtgagcatgtgctttcccagatgctttatgaatgtcttttcacttatatcaaaaccttacagctttgttgcaaccccttcttcctgcgccttattttttcctttcttctccaattgagaaaactaggagaagcatagtatgcaggcaagtctccttctgttagaagactaaacatacgtacccaccatgaatgtatgatacatgaaatttggccttcaattttaatagcagttttattttattttttctcctatgactggagctttgtgttctctttacagttgagtcatggaatgtaggtgtctgcttcacatcttttagtaggtatagcttgtcaaagatggtgatctggaacatgaaaataatttactaatgaaaatatgtttaaatttatactgtgatttgacacttgcatcatgtttagatagcttaagaacaatggaagtcacagtacttagtggatctataaataagaaagtccatagttttgataaatattctctttaattgagatgtacagagagtttcttgctgggtcaataggatagtatcattttggtgaaaaccatgtctctgaaattgatgttttagtttcagtgttccctatccctcattctccatctccttttgaagctcttttgaatgttgaattgttcataagctaaaatccaagaaatttcagctgacaacttcgaaaattataatatggtatattgccctcctggtgtgtggctgcacacattttatcagggaaagttttttgatctaggatttattgctaactaactgaaaagagaagaaaaaatatcttttatttatgattataaaatagctttttcttcgatataacagattttttaagtcattattttgtgccaatcagttttctgaagtttcccttacacaaaaggatagctttattttaaaatctaaagtttcttttaatagttaaaaatgtttcagaagaattataaaactttaaaactgcaagggatgttggagtttagtactactccctcaagatttaaaaagctaaatattttaagactgaacatttatgttaattattaccagtgtgtttgtcatattttccatggatatttgttcattacctttttccattgaaaagttacattaaacttttcatacacttgaattgatgagctacctaatataaaaatgagaaaaccaatatgcattttaaagttttaactttagagtttataaagttcatatataccctagttaaagcacttaagaaaatatggcatgtttgacttttagttcctagagagtttttgtttttgtttttgtttttttttgagacggagtcttgctatgtctcccaggctggagggcagtggcatgatctcggctcactacaacttccacctcccgggttcaagcaattctcctgcctcagcctccagagtagctgggattacaggcgcccaccaccacacccggcagatttttgtatttttggtagagacgcggtttcatcatgtttggccaggctggtctcgaactcctgacctcaggtgatccgcctgccttggcctcccaaagtgttgggattacaggcatgagccactgcgcctggccagctagagagtttttaaagcagagctgagcacacactggatgcgtttgaatgtgtttgtgtagtttgttgtgaaattgttacatttagcaggcagatccagaagcactagtgaactgtcatcttggtggggttggcttaaatttaattgactgtttagattccatttcttaattgattggccagtatgaaaagatgccagtgcaagtaaccatagtatcaaaaaagttaaaaattattcaaagctatagtttatacatcaggtactgccatttactgtaaaccacctgcaagaaagtcaggaacaactaaattcacaagaactgtcctgctaagaagtgtattaaagatttccattttgttttactaattgggaacatcttaatgtttaatatttaaactattggtatcatttttctaatgtataatttgtattactgggatcaagtatgtacagtggtgatgctagtagaagtttaagccttggaaataccactttcatattttcagatgtcatggatttaatgagtaatttatgtttttaaaattcagaatagttaatctctgatctaaaaccatcaatctatgttttttacggtaatcatgtaaatatttcagtaatataaactgtttgaaaaggctgctgcaggtaaactctatactaggatcttggccaaataatttacaattcacagaatattttatttaaggtggtgctttttttttttgtccttaaaacttgatttttcttaactttattcatgatgccaaagtaaatgaggaaaaaaactcaaaaccagttgagtatcattgcagacaaaactaccagtagtccatattgtttaatattaagttgaataaaataaattttatttcagtcagagcctaaatcacattttgattgtctgaatttttgatactatttttaaaatcatgctagtggcggctgggcgtggtagctcacgcctgtaatcccagcattttgggaggccgaagtgggtggatcacgaggtcgggagttcgagaccagcttggccaaaatggtgaaaccccatctgtactaaaaactacaaaaattagctgggcgcggtggcaggtgcctgtaatcccagctacctgggagtctgaggcaggagaattgcttgaaccctggcgacagaggatgcagtgagccaagatggtgccactgtactccagactgggcgacagagtgagactctgtctcaaaaaaaaaaaaaaaatcatgctagtgccaagagctactaaattcttaaaaccggcccattggacctgtacagataaaaaatagattcagtgcataatcaaaatatgataattttaaaatcttaagtagaaaaataaatcttgatgttttaaattcttacgaggattcaatagttaatattgatgatctcccggctgggtgcagtggctcacgcctgtaatcccagcagttctggaggctgaggtgggcgaatcacttcaggccaggagttcaagaccagtctgggcaacatggtgaaacctcgtttctactaaaaatacaaaaattagccgggcgtggttgcacacacttgtaatcccagctactcaggaggctaagaatcgcatgagcctaggaggcagaggttgcagagtgccaagggctcaccactgcattccagcctgcccaacagagtgagacactgtttctgaaaaaaaaaaatatatatatatatatatatatgtgtgtatatatatatgtatatatatatgacttcctattaaaaactttatcccagtcgggggcagtggctcacgcctgtaatcccaacactttgggaggctgaggcaggtggatcacctgaagtccggagtttgagaccagcctggccaacatggtgaaaccccatctctactaaaaatacaaaacttaagccaggtatggtggcgggcacctgtaatcccagttacttgggaggctgaggcaggagaatcgtttaaacccaggaggtggaggttgcagtgagctgagatcgtgccattgcactctagcctgggcaacaagagtaaaactccatcttaaaggtttgtttgtttttttttaatccggaaacgaagaggcgttgggccgctattttctttttctttctttctttctttctttttttttttttctgagacggagtctagctctgctgcccaggctggagtacaatgacacgatgttggctcactgcaacctccacctcctgggttcaagcgattctcctgcctcagcctcccaagtacctgggattacaggcacctgccactacacctggcgaatatttgttttttttagtagagacgggcttttaccatgttaggctggtctcaaactcctgacctcaggtgatctgcctgccttggcctcccaaagtgctgggattacaggtgcaggccaccacacccggccttgggccactgttttcaaagtgaattgtttgttgtatcgagtccttaagtatggatatatatgtgaccctaattaagaactaccagattggatcaactaatcatgtcagcaatgtaaataactttatttttcatattcaaaataaaaactttcttttatttctggcccctttataaccagcatctttttgctttaaaaaatgacctggctttgtatttttttagtcttaaacataataaaaatatttttgttctaatttgctttcatgagtgaagattattgacatcgttggtaaattctagaattttgattttgttttttaatttgaagaaaatctttgctattattattttttccaagtggtctggcattttaagaattagtgctaataacgtaacttctaaatttgtcgtaattggcatgtttaatagcatatcaaaaaacattttaagcctgtggattcatagacaaagcaatgagaaacattagtaaaatataaatggatattcctgatgcatttaggaagctctcaattgtctcttgcatagttcaaggaatgttttctgaatttttttaatgctttttttttttttgaaagaggaaaacatacatttttaaatgtgattatctaatttttacaacactgggctattaggaataactttttaaaaattactgttctgtataaatatttgaaattcaagtacagaaaatatctgaaacaaaaagcattgttgtttggccatgatacaagtgcactgtggcagtgccgcttgctcaggacccagccctgcagcccttctgtgtgtgctccctcgttaagttcatttgctgttattacacacacaggccttcctgtctggtcgttagaaaagccgggcttccaaagcactgttgaacacaggattctgttgttagtgtggatgttcaatgagttgtattttaaatatcaaagattattaaataaagataatgtttgcttttcta

SEQ ID NO: 151682 - DNA, 6896 bp, Artificial Sequence
  derived and/or modified sequence
gactccgtctcaaaaaaaaaacaagaaggctcactttgtgctcaacattgcctgaataacttattgcaaggagaatattttagccctgtggaattatcctcaattgcacatcagctggatgaggaggagaggatgagaatggcagaaggaggagttactagtgaagattatcgcacgtttttacagcagccttctggaaatatggatgacagtggttttttctctattcaggttataagcaatgccttgaaagtttggggtttagaactaatcctgttcaacagtccagagtatcagaggctcaggatcgatcctataaatgaaagatcatttatatgcaattataaggaacactggtttacagttagaaaattaggaaaacagtggtttaacttgaattctctcttgacgggtccagaattaatatcagatacatatcttgcacttttcttggctcaattacaacaggaaggttattctatatttgtcgttaagggtgatctgccagattgcgaagctgaccaactcctgcagatgattagggtccaacagatgcatcgaccaaaacttattggagaagaattagcacaactaaaagagcaaagagtccataaaacagacctggaacgagtgttagaagcaaatgatggctcaggaatgttagacgaagatgaggaggatttgcagagggctctggcactaagtcgccaagaaattgacatggaagatgaggaagcagatctccgcagggctattcagctaagtatgcaaggtagttccagaaacatatctcaagatatgacacagacatcaggtacaaatcttacttcagaagagcttcggaagagacgagaagcctactttgaaaagaaatttacagcaaataggacggatcagcacttccatattttaaaacagcagcaaaagcagcaacagcagcagcagcagcagcagcagggggacctatcaggacagagttcacatccatgtgaaaggccagccaccagttcaggagcacttgggagtgatctaggtgatgctatgagtgaagaagacatgcttcaggcagctgtgaccatgtctttagaaactgtcagaaatgatttgaaaacagaaggaaaaaaataatacctttaaaaaataatttagatattcatactttccaacattatcctgtgtgattacagcatagggtccactttggtaatgtgtcaaagagatgaggaaataagacttttagcggtttgcaaacaaaatgatgggaaagtggaacaatgcgtcggttgtaggactaaataatgatcttccaaatattagccaaagaggcattcagcaattaaagacatttaaaatagttttctaaatgtttctttttcttttttgagtgtgcaatatgtaacatgtctaaagttagggcatttttcttggatctttttgcagactagctaattagctctcgcctcaggctttttccatatagtttgttttctttttctgtcttgtaggtaagttggctcacatcatgtaatagtggctttcatttcttattaaccaaattaacctttcaggaaagtatctctactttcctgatgttgataatagtaatggttctagaaggatgaacagttctcccttcaactgtataccgtgtgctccagtgttttcttgtgttgttttctctgatcacaacttttctgctacctggttttcattattttcccacaattcttttgaaagatggtaatcttttctgaggtttagcgttttaagccctacgatgggatcattatttcatgactggtgcgttcctaaactctgaaatcagccttgcacaagtacttgagaataaatgagcattttttaaaatgtgtgagcatgtgctttcccagatgctttatgaatgtcttttcacttatatcaaaaccttacagctttgttgcaaccccttcttcctgcgccttattttttcctttcttctccaattgagaaaactaggagaagcatagtatgcaggcaagtctccttctgttagaagactaaacatacgtacccaccatgaatgtatgatacatgaaatttggccttcaattttaatagcagttttattttattttttctcctatgactggagctttgtgttctctttacagttgagtcatggaatgtaggtgtctgcttcacatcttttagtaggtatagcttgtcaaagatggtgatctggaacatgaaaataatttactaatgaaaatatgtttaaatttatactgtgatttgacacttgcatcatgtttagatagcttaagaacaatggaagtcacagtacttagtggatctataaataagaaagtccatagttttgataaatattctctttaattgagatgtacagagagtttcttgctgggtcaataggatagtatcattttggtgaaaaccatgtctctgaaattgatgttttagtttcagtgttccctatccctcattctccatctccttttgaagctcttttgaatgttgaattgttcataagctaaaatccaagaaatttcagctgacaacttcgaaaattataatatggtatattgccctcctggtgtgtggctgcacacattttatcagggaaagttttttgatctaggatttattgctaactaactgaaaagagaagaaaaaatatcttttatttatgattataaaatagctttttcttcgatataacagattttttaagtcattattttgtgccaatcagttttctgaagtttcccttacacaaaaggatagctttattttaaaatctaaagtttcttttaatagttaaaaatgtttcagaagaattataaaactttaaaactgcaagggatgttggagtttagtactactccctcaagatttaaaaagctaaatattttaagactgaacatttatgttaattattaccagtgtgtttgtcatattttccatggatatttgttcattacctttttccattgaaaagttacattaaacttttcatacacttgaattgatgagctacctaatataaaaatgagaaaaccaatatgcattttaaagttttaactttagagtttataaagttcatatataccctagttaaagcacttaagaaaatatggcatgtttgacttttagttcctagagagtttttgtttttgtttttgtttttttttgagacggagtcttgctatgtctcccaggctggagggcagtggcatgatctcggctcactacaacttccacctcccgggttcaagcaattctcctgcctcagcctccagagtagctgggattacaggcgcccaccaccacacccggcagatttttgtatttttggtagagacgcggtttcatcatgtttggccaggctggtctcgaactcctgacctcaggtgatccgcctgccttggcctcccaaagtgttgggattacaggcatgagccactgcgcctggccagctagagagtttttaaagcagagctgagcacacactggatgcgtttgaatgtgtttgtgtagtttgttgtgaaattgttacatttagcaggcagatccagaagcactagtgaactgtcatcttggtggggttggcttaaatttaattgactgtttagattccatttcttaattgattggccagtatgaaaagatgccagtgcaagtaaccatagtatcaaaaaagttaaaaattattcaaagctatagtttatacatcaggtactgccatttactgtaaaccacctgcaagaaagtcaggaacaactaaattcacaagaactgtcctgctaagaagtgtattaaagatttccattttgttttactaattgggaacatcttaatgtttaatatttaaactattggtatcatttttctaatgtataatttgtattactgggatcaagtatgtacagtggtgatgctagtagaagtttaagccttggaaataccactttcatattttcagatgtcatggatttaatgagtaatttatgtttttaaaattcagaatagttaatctctgatctaaaaccatcaatctatgttttttacggtaatcatgtaaatatttcagtaatataaactgtttgaaaaggctgctgcaggtaaactctatactaggatcttggccaaataatttacaattcacagaatattttatttaaggtggtgctttttttttttgtccttaaaacttgatttttcttaactttattcatgatgccaaagtaaatgaggaaaaaaactcaaaaccagttgagtatcattgcagacaaaactaccagtagtccatattgtttaatattaagttgaataaaataaattttatttcagtcagagcctaaatcacattttgattgtctgaatttttgatactatttttaaaatcatgctagtggcggctgggcgtggtagctcacgcctgtaatcccagcattttgggaggccgaagtgggtggatcacgaggtcgggagttcgagaccagcttggccaaaatggtgaaaccccatctgtactaaaaactacaaaaattagctgggcgcggtggcaggtgcctgtaatcccagctacctgggagtctgaggcaggagaattgcttgaaccctggcgacagaggatgcagtgagccaagatggtgccactgtactccagactgggcgacagagtgagactctgtctcaaaaaaaaaaaaaaaatcatgctagtgccaagagctactaaattcttaaaaccggcccattggacctgtacagataaaaaatagattcagtgcataatcaaaatatgataattttaaaatcttaagtagaaaaataaatcttgatgttttaaattcttacgaggattcaatagttaatattgatgatctcccggctgggtgcagtggctcacgcctgtaatcccagcagttctggaggctgaggtgggcgaatcacttcaggccaggagttcaagaccagtctgggcaacatggtgaaacctcgtttctactaaaaatacaaaaattagccgggcgtggttgcacacacttgtaatcccagctactcaggaggctaagaatcgcatgagcctaggaggcagaggttgcagagtgccaagggctcaccactgcattccagcctgcccaacagagtgagacactgtttctgaaaaaaaaaaatatatatatatatatatatatgtgtgtatatatatatgtatatatatatgacttcctattaaaaactttatcccagtcgggggcagtggctcacgcctgtaatcccaacactttgggaggctgaggcaggtggatcacctgaagtccggagtttgagaccagcctggccaacatggtgaaaccccatctctactaaaaatacaaaacttaagccaggtatggtggcgggcacctgtaatcccagttacttgggaggctgaggcaggagaatcgtttaaacccaggaggtggaggttgcagtgagctgagatcgtgccattgcactctagcctgggcaacaagagtaaaactccatcttaaaggtttgtttgtttttttttaatccggaaacgaagaggcgttgggccgctattttctttttctttctttctttctttctttttttttttttctgagacggagtctagctctgctgcccaggctggagtacaatgacacgatgttggctcactgcaacctccacctcctgggttcaagcgattctcctgcctcagcctcccaagtacctgggattacaggcacctgccactacacctggcgaatatttgttttttttagtagagacgggcttttaccatgttaggctggtctcaaactcctgacctcaggtgatctgcctgccttggcctcccaaagtgctgggattacaggtgcaggccaccacacccggccttgggccactgttttcaaagtgaattgtttgttgtatcgagtccttaagtatggatatatatgtgaccctaattaagaactaccagattggatcaactaatcatgtcagcaatgtaaataactttatttttcatattcaaaataaaaactttcttttatttctggcccctttataaccagcatctttttgctttaaaaaatgacctggctttgtatttttttagtcttaaacataataaaaatatttttgttctaatttgctttcatgagtgaagattattgacatcgttggtaaattctagaattttgattttgttttttaatttgaagaaaatctttgctattattattttttccaagtggtctggcattttaagaattagtgctaataacgtaacttctaaatttgtcgtaattggcatgtttaatagcatatcaaaaaacattttaagcctgtggattcatagacaaagcaatgagaaacattagtaaaatataaatggatattcctgatgcatttaggaagctctcaattgtctcttgcatagttcaaggaatgttttctgaatttttttaatgctttttttttttttgaaagaggaaaacatacatttttaaatgtgattatctaatttttacaacactgggctattaggaataactttttaaaaattactgttctgtataaatatttgaaattcaagtacagaaaatatctgaaacaaaaagcattgttgtttggccatgatacaagtgcactgtggcagtgccgcttgctcaggacccagccctgcagcccttctgtgtgtgctccctcgttaagttcatttgctgttattacacacacaggccttcctgtctggtcgttagaaaagccgggcttccaaagcactgttgaacacaggattctgttgttagtgtggatgttcaatgagttgtattttaaatatcaaagattattaaataaagataatgtttgcttttcta

SEQ ID NO: 151683 - DNA, 6962 bp, Artificial Sequence
  derived and/or modified sequence
gagaggggcagggggcggagctggagggggtggttcggcgtgggggccgttggctccagacaaataaacatggagtccatcttccacgagaaacaagaaggctcactttgtgctcaacattgcctgaataacttattgcaaggagaatattttagccctgtggaattatcctcaattgcacatcagctggatgaggaggagaggatgagaatggcagaaggaggagttactagtgaagattatcgcacgtttttacagcagccttctggaaatatggatgacagtggttttttctctattcaggttataagcaatgccttgaaagtttggggtttagaactaatcctgttcaacagtccagagtatcagaggctcaggatcgatcctataaatgaaagatcatttatatgcaattataaggaacactggtttacagttagaaaattaggaaaacagtggtttaacttgaattctctcttgacgggtccagaattaatatcagatacatatcttgcacttttcttggctcaattacaacaggaaggttattctatatttgtcgttaagggtgatctgccagattgcgaagctgaccaactcctgcagatgattagggtccaacagatgcatcgaccaaaacttattggagaagaattagcacaactaaaagagcaaagagtccataaaacagacctggaacgagtgttagaagcaaatgatggctcaggaatgttagacgaagatgaggaggatttgcagagggctctggcactaagtcgccaagaaattgacatggaagatgaggaagcagatctccgcagggctattcagctaagtatgcaaggtagttccagaaacatatctcaagatatgacacagacatcaggtacaaatcttacttcagaagagcttcggaagagacgagaagcctactttgaaaaggtattttttaaaaatttacagcaaataggacgggcacgacagcagcaaaagcagcaacagcagcagcagcagcagcagcagggggacctatcaggacagagttcacatccatgtgaaaggccagccaccagttcaggagcacttgggagtgatctaggtgatgctatgagtgaagaagacatgcttcaggcagctgtgaccatgtctttagaaactgtcagaaatgatttgaaaacagaaggaaaaaaataatacctttaaaaaataatttagatattcatactttccaacattatcctgtgtgattacagcatagggtccactttggtaatgtgtcaaagagatgaggaaataagacttttagcggtttgcaaacaaaatgatgggaaagtggaacaatgcgtcggttgtaggactaaataatgatcttccaaatattagccaaagaggcattcagcaattaaagacatttaaaatagttttctaaatgtttctttttcttttttgagtgtgcaatatgtaacatgtctaaagttagggcatttttcttggatctttttgcagactagctaattagctctcgcctcaggctttttccatatagtttgttttctttttctgtcttgtaggtaagttggctcacatcatgtaatagtggctttcatttcttattaaccaaattaacctttcaggaaagtatctctactttcctgatgttgataatagtaatggttctagaaggatgaacagttctcccttcaactgtataccgtgtgctccagtgttttcttgtgttgttttctctgatcacaacttttctgctacctggttttcattattttcccacaattcttttgaaagatggtaatcttttctgaggtttagcgttttaagccctacgatgggatcattatttcatgactggtgcgttcctaaactctgaaatcagccttgcacaagtacttgagaataaatgagcattttttaaaatgtgtgagcatgtgctttcccagatgctttatgaatgtcttttcacttatatcaaaaccttacagctttgttgcaaccccttcttcctgcgccttattttttcctttcttctccaattgagaaaactaggagaagcatagtatgcaggcaagtctccttctgttagaagactaaacatacgtacccaccatgaatgtatgatacatgaaatttggccttcaattttaatagcagttttattttattttttctcctatgactggagctttgtgttctctttacagttgagtcatggaatgtaggtgtctgcttcacatcttttagtaggtatagcttgtcaaagatggtgatctggaacatgaaaataatttactaatgaaaatatgtttaaatttatactgtgatttgacacttgcatcatgtttagatagcttaagaacaatggaagtcacagtacttagtggatctataaataagaaagtccatagttttgataaatattctctttaattgagatgtacagagagtttcttgctgggtcaataggatagtatcattttggtgaaaaccatgtctctgaaattgatgttttagtttcagtgttccctatccctcattctccatctccttttgaagctcttttgaatgttgaattgttcataagctaaaatccaagaaatttcagctgacaacttcgaaaattataatatggtatattgccctcctggtgtgtggctgcacacattttatcagggaaagttttttgatctaggatttattgctaactaactgaaaagagaagaaaaaatatcttttatttatgattataaaatagctttttcttcgatataacagattttttaagtcattattttgtgccaatcagttttctgaagtttcccttacacaaaaggatagctttattttaaaatctaaagtttcttttaatagttaaaaatgtttcagaagaattataaaactttaaaactgcaagggatgttggagtttagtactactccctcaagatttaaaaagctaaatattttaagactgaacatttatgttaattattaccagtgtgtttgtcatattttccatggatatttgttcattacctttttccattgaaaagttacattaaacttttcatacacttgaattgatgagctacctaatataaaaatgagaaaaccaatatgcattttaaagttttaactttagagtttataaagttcatatataccctagttaaagcacttaagaaaatatggcatgtttgacttttagttcctagagagtttttgtttttgtttttgtttttttttgagacggagtcttgctatgtctcccaggctggagggcagtggcatgatctcggctcactacaacttccacctcccgggttcaagcaattctcctgcctcagcctccagagtagctgggattacaggcgcccaccaccacacccggcagatttttgtatttttggtagagacgcggtttcatcatgtttggccaggctggtctcgaactcctgacctcaggtgatccgcctgccttggcctcccaaagtgttgggattacaggcatgagccactgcgcctggccagctagagagtttttaaagcagagctgagcacacactggatgcgtttgaatgtgtttgtgtagtttgttgtgaaattgttacatttagcaggcagatccagaagcactagtgaactgtcatcttggtggggttggcttaaatttaattgactgtttagattccatttcttaattgattggccagtatgaaaagatgccagtgcaagtaaccatagtatcaaaaaagttaaaaattattcaaagctatagtttatacatcaggtactgccatttactgtaaaccacctgcaagaaagtcaggaacaactaaattcacaagaactgtcctgctaagaagtgtattaaagatttccattttgttttactaattgggaacatcttaatgtttaatatttaaactattggtatcatttttctaatgtataatttgtattactgggatcaagtatgtacagtggtgatgctagtagaagtttaagccttggaaataccactttcatattttcagatgtcatggatttaatgagtaatttatgtttttaaaattcagaatagttaatctctgatctaaaaccatcaatctatgttttttacggtaatcatgtaaatatttcagtaatataaactgtttgaaaaggctgctgcaggtaaactctatactaggatcttggccaaataatttacaattcacagaatattttatttaaggtggtgctttttttttttgtccttaaaacttgatttttcttaactttattcatgatgccaaagtaaatgaggaaaaaaactcaaaaccagttgagtatcattgcagacaaaactaccagtagtccatattgtttaatattaagttgaataaaataaattttatttcagtcagagcctaaatcacattttgattgtctgaatttttgatactatttttaaaatcatgctagtggcggctgggcgtggtagctcacgcctgtaatcccagcattttgggaggccgaagtgggtggatcacgaggtcgggagttcgagaccagcttggccaaaatggtgaaaccccatctgtactaaaaactacaaaaattagctgggcgcggtggcaggtgcctgtaatcccagctacctgggagtctgaggcaggagaattgcttgaaccctggcgacagaggatgcagtgagccaagatggtgccactgtactccagactgggcgacagagtgagactctgtctcaaaaaaaaaaaaaaaatcatgctagtgccaagagctactaaattcttaaaaccggcccattggacctgtacagataaaaaatagattcagtgcataatcaaaatatgataattttaaaatcttaagtagaaaaataaatcttgatgttttaaattcttacgaggattcaatagttaatattgatgatctcccggctgggtgcagtggctcacgcctgtaatcccagcagttctggaggctgaggtgggcgaatcacttcaggccaggagttcaagaccagtctgggcaacatggtgaaacctcgtttctactaaaaatacaaaaattagccgggcgtggttgcacacacttgtaatcccagctactcaggaggctaagaatcgcatgagcctaggaggcagaggttgcagagtgccaagggctcaccactgcattccagcctgcccaacagagtgagacactgtttctgaaaaaaaaaaatatatatatatatatatatatgtgtgtatatatatatgtatatatatatgacttcctattaaaaactttatcccagtcgggggcagtggctcacgcctgtaatcccaacactttgggaggctgaggcaggtggatcacctgaagtccggagtttgagaccagcctggccaacatggtgaaaccccatctctactaaaaatacaaaacttaagccaggtatggtggcgggcacctgtaatcccagttacttgggaggctgaggcaggagaatcgtttaaacccaggaggtggaggttgcagtgagctgagatcgtgccattgcactctagcctgggcaacaagagtaaaactccatcttaaaggtttgtttgtttttttttaatccggaaacgaagaggcgttgggccgctattttctttttctttctttctttctttctttttttttttttctgagacggagtctagctctgctgcccaggctggagtacaatgacacgatgttggctcactgcaacctccacctcctgggttcaagcgattctcctgcctcagcctcccaagtacctgggattacaggcacctgccactacacctggcgaatatttgttttttttagtagagacgggcttttaccatgttaggctggtctcaaactcctgacctcaggtgatctgcctgccttggcctcccaaagtgctgggattacaggtgcaggccaccacacccggccttgggccactgttttcaaagtgaattgtttgttgtatcgagtccttaagtatggatatatatgtgaccctaattaagaactaccagattggatcaactaatcatgtcagcaatgtaaataactttatttttcatattcaaaataaaaactttcttttatttctggcccctttataaccagcatctttttgctttaaaaaatgacctggctttgtatttttttagtcttaaacataataaaaatatttttgttctaatttgctttcatgagtgaagattattgacatcgttggtaaattctagaattttgattttgttttttaatttgaagaaaatctttgctattattattttttccaagtggtctggcattttaagaattagtgctaataacgtaacttctaaatttgtcgtaattggcatgtttaatagcatatcaaaaaacattttaagcctgtggattcatagacaaagcaatgagaaacattagtaaaatataaatggatattcctgatgcatttaggaagctctcaattgtctcttgcatagttcaaggaatgttttctgaatttttttaatgctttttttttttttgaaagaggaaaacatacatttttaaatgtgattatctaatttttacaacactgggctattaggaataactttttaaaaattactgttctgtataaatatttgaaattcaagtacagaaaatatctgaaacaaaaagcattgttgtttggccatgatacaagtgcactgtggcagtgccgcttgctcaggacccagccctgcagcccttctgtgtgtgctccctcgttaagttcatttgctgttattacacacacaggccttcctgtctggtcgttagaaaagccgggcttccaaagcactgttgaacacaggattctgttgttagtgtggatgttcaatgagttgtattttaaatatcaaagattattaaataaagataatgtttgcttttcta

SEQ ID NO: 151684 - DNA, 6950 bp, Artificial Sequence
  derived and/or modified sequence
gagaggggcagggggcggagctggagggggtggttcggcgtgggggccgttggctccagacaaataaacatggagtccatcttccacgagaaacaagaaggctcactttgtgctcaacattgcctgaataacttattgcaaggagaatattttagccctgtggaattatcctcaattgcacatcagctggatgaggaggagaggatgagaatggcagaaggaggagttactagtgaagattatcgcacgtttttacagcagccttctggaaatatggatgacagtggttttttctctattcaggttataagcaatgccttgaaagtttggggtttagaactaatcctgttcaacagtccagagtatcagaggctcaggatcgatcctataaatgaaagatcatttatatgcaattataaggaacactggtttacagttagaaaattaggaaaacagtggtttaacttgaattctctcttgacgggtccagaattaatatcagatacatatcttgcacttttcttggctcaattacaacaggaaggttattctatatttgtcgttaagggtgatctgccagattgcgaagctgaccaactcctgcagatgattagggtccaacagatgcatcgaccaaaacttattggagaagaattagcacaactaaaagagcaaagagtccataaaacagacctggaacgagtgttagaagcaaatgatggctcaggaatgttagacgaagatgaggaggatttgcagagggctctggcactaagtcgccaagaaattgacatggaagatgaggaagcagatctccgcagggctattcagctaagtatgcaaggtagttccagaaacatatctcaagatatgacacagacatcaggtacaaatcttacttcagaagagcttcggaagagacgagaagcctactttgaaaagatatacttcacttttgaatgtttcagacagcagcaaaagcagcaacagcagcagcagcagcagcagcagggggacctatcaggacagagttcacatccatgtgaaaggccagccaccagttcaggagcacttgggagtgatctaggtgatgctatgagtgaagaagacatgcttcaggcagctgtgaccatgtctttagaaactgtcagaaatgatttgaaaacagaaggaaaaaaataatacctttaaaaaataatttagatattcatactttccaacattatcctgtgtgattacagcatagggtccactttggtaatgtgtcaaagagatgaggaaataagacttttagcggtttgcaaacaaaatgatgggaaagtggaacaatgcgtcggttgtaggactaaataatgatcttccaaatattagccaaagaggcattcagcaattaaagacatttaaaatagttttctaaatgtttctttttcttttttgagtgtgcaatatgtaacatgtctaaagttagggcatttttcttggatctttttgcagactagctaattagctctcgcctcaggctttttccatatagtttgttttctttttctgtcttgtaggtaagttggctcacatcatgtaatagtggctttcatttcttattaaccaaattaacctttcaggaaagtatctctactttcctgatgttgataatagtaatggttctagaaggatgaacagttctcccttcaactgtataccgtgtgctccagtgttttcttgtgttgttttctctgatcacaacttttctgctacctggttttcattattttcccacaattcttttgaaagatggtaatcttttctgaggtttagcgttttaagccctacgatgggatcattatttcatgactggtgcgttcctaaactctgaaatcagccttgcacaagtacttgagaataaatgagcattttttaaaatgtgtgagcatgtgctttcccagatgctttatgaatgtcttttcacttatatcaaaaccttacagctttgttgcaaccccttcttcctgcgccttattttttcctttcttctccaattgagaaaactaggagaagcatagtatgcaggcaagtctccttctgttagaagactaaacatacgtacccaccatgaatgtatgatacatgaaatttggccttcaattttaatagcagttttattttattttttctcctatgactggagctttgtgttctctttacagttgagtcatggaatgtaggtgtctgcttcacatcttttagtaggtatagcttgtcaaagatggtgatctggaacatgaaaataatttactaatgaaaatatgtttaaatttatactgtgatttgacacttgcatcatgtttagatagcttaagaacaatggaagtcacagtacttagtggatctataaataagaaagtccatagttttgataaatattctctttaattgagatgtacagagagtttcttgctgggtcaataggatagtatcattttggtgaaaaccatgtctctgaaattgatgttttagtttcagtgttccctatccctcattctccatctccttttgaagctcttttgaatgttgaattgttcataagctaaaatccaagaaatttcagctgacaacttcgaaaattataatatggtatattgccctcctggtgtgtggctgcacacattttatcagggaaagttttttgatctaggatttattgctaactaactgaaaagagaagaaaaaatatcttttatttatgattataaaatagctttttcttcgatataacagattttttaagtcattattttgtgccaatcagttttctgaagtttcccttacacaaaaggatagctttattttaaaatctaaagtttcttttaatagttaaaaatgtttcagaagaattataaaactttaaaactgcaagggatgttggagtttagtactactccctcaagatttaaaaagctaaatattttaagactgaacatttatgttaattattaccagtgtgtttgtcatattttccatggatatttgttcattacctttttccattgaaaagttacattaaacttttcatacacttgaattgatgagctacctaatataaaaatgagaaaaccaatatgcattttaaagttttaactttagagtttataaagttcatatataccctagttaaagcacttaagaaaatatggcatgtttgacttttagttcctagagagtttttgtttttgtttttgtttttttttgagacggagtcttgctatgtctcccaggctggagggcagtggcatgatctcggctcactacaacttccacctcccgggttcaagcaattctcctgcctcagcctccagagtagctgggattacaggcgcccaccaccacacccggcagatttttgtatttttggtagagacgcggtttcatcatgtttggccaggctggtctcgaactcctgacctcaggtgatccgcctgccttggcctcccaaagtgttgggattacaggcatgagccactgcgcctggccagctagagagtttttaaagcagagctgagcacacactggatgcgtttgaatgtgtttgtgtagtttgttgtgaaattgttacatttagcaggcagatccagaagcactagtgaactgtcatcttggtggggttggcttaaatttaattgactgtttagattccatttcttaattgattggccagtatgaaaagatgccagtgcaagtaaccatagtatcaaaaaagttaaaaattattcaaagctatagtttatacatcaggtactgccatttactgtaaaccacctgcaagaaagtcaggaacaactaaattcacaagaactgtcctgctaagaagtgtattaaagatttccattttgttttactaattgggaacatcttaatgtttaatatttaaactattggtatcatttttctaatgtataatttgtattactgggatcaagtatgtacagtggtgatgctagtagaagtttaagccttggaaataccactttcatattttcagatgtcatggatttaatgagtaatttatgtttttaaaattcagaatagttaatctctgatctaaaaccatcaatctatgttttttacggtaatcatgtaaatatttcagtaatataaactgtttgaaaaggctgctgcaggtaaactctatactaggatcttggccaaataatttacaattcacagaatattttatttaaggtggtgctttttttttttgtccttaaaacttgatttttcttaactttattcatgatgccaaagtaaatgaggaaaaaaactcaaaaccagttgagtatcattgcagacaaaactaccagtagtccatattgtttaatattaagttgaataaaataaattttatttcagtcagagcctaaatcacattttgattgtctgaatttttgatactatttttaaaatcatgctagtggcggctgggcgtggtagctcacgcctgtaatcccagcattttgggaggccgaagtgggtggatcacgaggtcgggagttcgagaccagcttggccaaaatggtgaaaccccatctgtactaaaaactacaaaaattagctgggcgcggtggcaggtgcctgtaatcccagctacctgggagtctgaggcaggagaattgcttgaaccctggcgacagaggatgcagtgagccaagatggtgccactgtactccagactgggcgacagagtgagactctgtctcaaaaaaaaaaaaaaaatcatgctagtgccaagagctactaaattcttaaaaccggcccattggacctgtacagataaaaaatagattcagtgcataatcaaaatatgataattttaaaatcttaagtagaaaaataaatcttgatgttttaaattcttacgaggattcaatagttaatattgatgatctcccggctgggtgcagtggctcacgcctgtaatcccagcagttctggaggctgaggtgggcgaatcacttcaggccaggagttcaagaccagtctgggcaacatggtgaaacctcgtttctactaaaaatacaaaaattagccgggcgtggttgcacacacttgtaatcccagctactcaggaggctaagaatcgcatgagcctaggaggcagaggttgcagagtgccaagggctcaccactgcattccagcctgcccaacagagtgagacactgtttctgaaaaaaaaaaatatatatatatatatatatatgtgtgtatatatatatgtatatatatatgacttcctattaaaaactttatcccagtcgggggcagtggctcacgcctgtaatcccaacactttgggaggctgaggcaggtggatcacctgaagtccggagtttgagaccagcctggccaacatggtgaaaccccatctctactaaaaatacaaaacttaagccaggtatggtggcgggcacctgtaatcccagttacttgggaggctgaggcaggagaatcgtttaaacccaggaggtggaggttgcagtgagctgagatcgtgccattgcactctagcctgggcaacaagagtaaaactccatcttaaaggtttgtttgtttttttttaatccggaaacgaagaggcgttgggccgctattttctttttctttctttctttctttctttttttttttttctgagacggagtctagctctgctgcccaggctggagtacaatgacacgatgttggctcactgcaacctccacctcctgggttcaagcgattctcctgcctcagcctcccaagtacctgggattacaggcacctgccactacacctggcgaatatttgttttttttagtagagacgggcttttaccatgttaggctggtctcaaactcctgacctcaggtgatctgcctgccttggcctcccaaagtgctgggattacaggtgcaggccaccacacccggccttgggccactgttttcaaagtgaattgtttgttgtatcgagtccttaagtatggatatatatgtgaccctaattaagaactaccagattggatcaactaatcatgtcagcaatgtaaataactttatttttcatattcaaaataaaaactttcttttatttctggcccctttataaccagcatctttttgctttaaaaaatgacctggctttgtatttttttagtcttaaacataataaaaatatttttgttctaatttgctttcatgagtgaagattattgacatcgttggtaaattctagaattttgattttgttttttaatttgaagaaaatctttgctattattattttttccaagtggtctggcattttaagaattagtgctaataacgtaacttctaaatttgtcgtaattggcatgtttaatagcatatcaaaaaacattttaagcctgtggattcatagacaaagcaatgagaaacattagtaaaatataaatggatattcctgatgcatttaggaagctctcaattgtctcttgcatagttcaaggaatgttttctgaatttttttaatgctttttttttttttgaaagaggaaaacatacatttttaaatgtgattatctaatttttacaacactgggctattaggaataactttttaaaaattactgttctgtataaatatttgaaattcaagtacagaaaatatctgaaacaaaaagcattgttgtttggccatgatacaagtgcactgtggcagtgccgcttgctcaggacccagccctgcagcccttctgtgtgtgctccctcgttaagttcatttgctgttattacacacacaggccttcctgtctggtcgttagaaaagccgggcttccaaagcactgttgaacacaggattctgttgttagtgtggatgttcaatgagttgtattttaaatatcaaagattattaaataaagataatgtttgcttttcta

SEQ ID NO: 151685 - DNA, 6971 bp, Artificial Sequence
  derived and/or modified sequence
gagaggggcagggggcggagctggagggggtggttcggcgtgggggccgttggctccagacaaataaacatggagtccatcttccacgagaaacaagaaggctcactttgtgctcaacattgcctgaataacttattgcaaggagaatattttagccctgtggaattatcctcaattgcacatcagctggatgaggaggagaggatgagaatggcagaaggaggagttactagtgaagattatcgcacgtttttacagcagccttctggaaatatggatgacagtggttttttctctattcaggttataagcaatgccttgaaagtttggggtttagaactaatcctgttcaacagtccagagtatcagaggctcaggatcgatcctataaatgaaagatcatttatatgcaattataaggaacactggtttacagttagaaaattaggaaaacagtggtttaacttgaattctctcttgacgggtccagaattaatatcagatacatatcttgcacttttcttggctcaattacaacaggaaggttattctatatttgtcgttaagggtgatctgccagattgcgaagctgaccaactcctgcagatgattagggtccaacagatgcatcgaccaaaacttattggagaagaattagcacaactaaaagagcaaagagtccataaaacagacctggaacgagtgttagaagcaaatgatggctcaggaatgttagacgaagatgaggaggatttgcagagggctctggcactaagtcgccaagaaattgacatggaagatgaggaagcagatctccgcagggctattcagctaagtatgcaaggtagttccagaaacatatctcaagatatgacacagacatcaggtacaaatcttacttcagaagagcttcggaagagacgagaagcctactttgaaaaggtattttttaaaaatttacagcaaaatcagcacttccatattttaaaacagcagcaaaagcagcaacagcagcagcagcagcagcagcagggggacctatcaggacagagttcacatccatgtgaaaggccagccaccagttcaggagcacttgggagtgatctaggtgatgctatgagtgaagaagacatgcttcaggcagctgtgaccatgtctttagaaactgtcagaaatgatttgaaaacagaaggaaaaaaataatacctttaaaaaataatttagatattcatactttccaacattatcctgtgtgattacagcatagggtccactttggtaatgtgtcaaagagatgaggaaataagacttttagcggtttgcaaacaaaatgatgggaaagtggaacaatgcgtcggttgtaggactaaataatgatcttccaaatattagccaaagaggcattcagcaattaaagacatttaaaatagttttctaaatgtttctttttcttttttgagtgtgcaatatgtaacatgtctaaagttagggcatttttcttggatctttttgcagactagctaattagctctcgcctcaggctttttccatatagtttgttttctttttctgtcttgtaggtaagttggctcacatcatgtaatagtggctttcatttcttattaaccaaattaacctttcaggaaagtatctctactttcctgatgttgataatagtaatggttctagaaggatgaacagttctcccttcaactgtataccgtgtgctccagtgttttcttgtgttgttttctctgatcacaacttttctgctacctggttttcattattttcccacaattcttttgaaagatggtaatcttttctgaggtttagcgttttaagccctacgatgggatcattatttcatgactggtgcgttcctaaactctgaaatcagccttgcacaagtacttgagaataaatgagcattttttaaaatgtgtgagcatgtgctttcccagatgctttatgaatgtcttttcacttatatcaaaaccttacagctttgttgcaaccccttcttcctgcgccttattttttcctttcttctccaattgagaaaactaggagaagcatagtatgcaggcaagtctccttctgttagaagactaaacatacgtacccaccatgaatgtatgatacatgaaatttggccttcaattttaatagcagttttattttattttttctcctatgactggagctttgtgttctctttacagttgagtcatggaatgtaggtgtctgcttcacatcttttagtaggtatagcttgtcaaagatggtgatctggaacatgaaaataatttactaatgaaaatatgtttaaatttatactgtgatttgacacttgcatcatgtttagatagcttaagaacaatggaagtcacagtacttagtggatctataaataagaaagtccatagttttgataaatattctctttaattgagatgtacagagagtttcttgctgggtcaataggatagtatcattttggtgaaaaccatgtctctgaaattgatgttttagtttcagtgttccctatccctcattctccatctccttttgaagctcttttgaatgttgaattgttcataagctaaaatccaagaaatttcagctgacaacttcgaaaattataatatggtatattgccctcctggtgtgtggctgcacacattttatcagggaaagttttttgatctaggatttattgctaactaactgaaaagagaagaaaaaatatcttttatttatgattataaaatagctttttcttcgatataacagattttttaagtcattattttgtgccaatcagttttctgaagtttcccttacacaaaaggatagctttattttaaaatctaaagtttcttttaatagttaaaaatgtttcagaagaattataaaactttaaaactgcaagggatgttggagtttagtactactccctcaagatttaaaaagctaaatattttaagactgaacatttatgttaattattaccagtgtgtttgtcatattttccatggatatttgttcattacctttttccattgaaaagttacattaaacttttcatacacttgaattgatgagctacctaatataaaaatgagaaaaccaatatgcattttaaagttttaactttagagtttataaagttcatatataccctagttaaagcacttaagaaaatatggcatgtttgacttttagttcctagagagtttttgtttttgtttttgtttttttttgagacggagtcttgctatgtctcccaggctggagggcagtggcatgatctcggctcactacaacttccacctcccgggttcaagcaattctcctgcctcagcctccagagtagctgggattacaggcgcccaccaccacacccggcagatttttgtatttttggtagagacgcggtttcatcatgtttggccaggctggtctcgaactcctgacctcaggtgatccgcctgccttggcctcccaaagtgttgggattacaggcatgagccactgcgcctggccagctagagagtttttaaagcagagctgagcacacactggatgcgtttgaatgtgtttgtgtagtttgttgtgaaattgttacatttagcaggcagatccagaagcactagtgaactgtcatcttggtggggttggcttaaatttaattgactgtttagattccatttcttaattgattggccagtatgaaaagatgccagtgcaagtaaccatagtatcaaaaaagttaaaaattattcaaagctatagtttatacatcaggtactgccatttactgtaaaccacctgcaagaaagtcaggaacaactaaattcacaagaactgtcctgctaagaagtgtattaaagatttccattttgttttactaattgggaacatcttaatgtttaatatttaaactattggtatcatttttctaatgtataatttgtattactgggatcaagtatgtacagtggtgatgctagtagaagtttaagccttggaaataccactttcatattttcagatgtcatggatttaatgagtaatttatgtttttaaaattcagaatagttaatctctgatctaaaaccatcaatctatgttttttacggtaatcatgtaaatatttcagtaatataaactgtttgaaaaggctgctgcaggtaaactctatactaggatcttggccaaataatttacaattcacagaatattttatttaaggtggtgctttttttttttgtccttaaaacttgatttttcttaactttattcatgatgccaaagtaaatgaggaaaaaaactcaaaaccagttgagtatcattgcagacaaaactaccagtagtccatattgtttaatattaagttgaataaaataaattttatttcagtcagagcctaaatcacattttgattgtctgaatttttgatactatttttaaaatcatgctagtggcggctgggcgtggtagctcacgcctgtaatcccagcattttgggaggccgaagtgggtggatcacgaggtcgggagttcgagaccagcttggccaaaatggtgaaaccccatctgtactaaaaactacaaaaattagctgggcgcggtggcaggtgcctgtaatcccagctacctgggagtctgaggcaggagaattgcttgaaccctggcgacagaggatgcagtgagccaagatggtgccactgtactccagactgggcgacagagtgagactctgtctcaaaaaaaaaaaaaaaatcatgctagtgccaagagctactaaattcttaaaaccggcccattggacctgtacagataaaaaatagattcagtgcataatcaaaatatgataattttaaaatcttaagtagaaaaataaatcttgatgttttaaattcttacgaggattcaatagttaatattgatgatctcccggctgggtgcagtggctcacgcctgtaatcccagcagttctggaggctgaggtgggcgaatcacttcaggccaggagttcaagaccagtctgggcaacatggtgaaacctcgtttctactaaaaatacaaaaattagccgggcgtggttgcacacacttgtaatcccagctactcaggaggctaagaatcgcatgagcctaggaggcagaggttgcagagtgccaagggctcaccactgcattccagcctgcccaacagagtgagacactgtttctgaaaaaaaaaaatatatatatatatatatatatgtgtgtatatatatatgtatatatatatgacttcctattaaaaactttatcccagtcgggggcagtggctcacgcctgtaatcccaacactttgggaggctgaggcaggtggatcacctgaagtccggagtttgagaccagcctggccaacatggtgaaaccccatctctactaaaaatacaaaacttaagccaggtatggtggcgggcacctgtaatcccagttacttgggaggctgaggcaggagaatcgtttaaacccaggaggtggaggttgcagtgagctgagatcgtgccattgcactctagcctgggcaacaagagtaaaactccatcttaaaggtttgtttgtttttttttaatccggaaacgaagaggcgttgggccgctattttctttttctttctttctttctttctttttttttttttctgagacggagtctagctctgctgcccaggctggagtacaatgacacgatgttggctcactgcaacctccacctcctgggttcaagcgattctcctgcctcagcctcccaagtacctgggattacaggcacctgccactacacctggcgaatatttgttttttttagtagagacgggcttttaccatgttaggctggtctcaaactcctgacctcaggtgatctgcctgccttggcctcccaaagtgctgggattacaggtgcaggccaccacacccggccttgggccactgttttcaaagtgaattgtttgttgtatcgagtccttaagtatggatatatatgtgaccctaattaagaactaccagattggatcaactaatcatgtcagcaatgtaaataactttatttttcatattcaaaataaaaactttcttttatttctggcccctttataaccagcatctttttgctttaaaaaatgacctggctttgtatttttttagtcttaaacataataaaaatatttttgttctaatttgctttcatgagtgaagattattgacatcgttggtaaattctagaattttgattttgttttttaatttgaagaaaatctttgctattattattttttccaagtggtctggcattttaagaattagtgctaataacgtaacttctaaatttgtcgtaattggcatgtttaatagcatatcaaaaaacattttaagcctgtggattcatagacaaagcaatgagaaacattagtaaaatataaatggatattcctgatgcatttaggaagctctcaattgtctcttgcatagttcaaggaatgttttctgaatttttttaatgctttttttttttttgaaagaggaaaacatacatttttaaatgtgattatctaatttttacaacactgggctattaggaataactttttaaaaattactgttctgtataaatatttgaaattcaagtacagaaaatatctgaaacaaaaagcattgttgtttggccatgatacaagtgcactgtggcagtgccgcttgctcaggacccagccctgcagcccttctgtgtgtgctccctcgttaagttcatttgctgttattacacacacaggccttcctgtctggtcgttagaaaagccgggcttccaaagcactgttgaacacaggattctgttgttagtgtggatgttcaatgagttgtattttaaatatcaaagattattaaataaagataatgtttgcttttcta

SEQ ID NO: 151686 - DNA, 1110 bp, Artificial Sequence
  derived and/or modified sequence
atggagagcatcttccacgagaagcaggagggcagcctgtgcgcccagcactgcctgaacaacctgctgcagggcgagtacttcagccccgtggagctgagcagcatcgcccaccagctggacgaggaggagagaatgagaatggccgagggcggcgtgaccagcgaggactacagaaccttcctgcagcagcccagcggcaacatggacgacagcggcttcttcagcatccaggtgatcagcaacgccctgaaggtgtggggcctggagctgatcctgttcaacagccccgagtaccagagactgagaatcgaccccatcaacgagagaagcttcatctgcaactacaaggagcactggttcaccgtgagaaagctgggcaagcagtggttcaacctgaacagcctgctgaccggccccgagctgatcagcgacacctacctggccctgttcctggcccagctgcagcaggagggctacagcatcttcgtggtgaagggcgacctgcccgactgcgaggccgaccagctgctgcagatgatcagagtgcagcagatgcacagacccaagctgatcggcgaggagctggcccagctgaaggagcagagagtgcacaagaccgacctggagagagtgctggaggccaacgacggcagcggcatgctggacgaggacgaggaggacctgcagagagccctggccctgagcagacaggagatcgacatggaggacgaggaggccgacctgagaagagccatccagctgagcatgcagggcagcagcagaaacatcagccaggacatgacccagaccagcggcaccaacctgaccagcgaggagctgagaaagagaagagaggcctacttcgagaaggaccagcacttccacatcctgaagcagcagcagaagcagcagcagcagcagcagcagcagcagcagggcgacctgagcggccagagcagccacccctgcgagagacccgccaccagcagcggcgccctgggcagcgacctgggcgacgccatgagcgaggaggacatgctgcaggccgccgtgaccatgagcctggagaccgtgagaaacgacctgaagaccgagggcaagaagtag

SEQ ID NO: 151687 - DNA, 1086 bp, Artificial Sequence
  derived and/or modified sequence
atggagagcatcttccacgagaagcaggagggcagcctgtgcgcccagcactgcctgaacaacctgctgcagggcgagtacttcagccccgtggagctgagcagcatcgcccaccagctggacgaggaggagagaatgagaatggccgagggcggcgtgaccagcgaggactacagaaccttcctgcagcagcccagcggcaacatggacgacagcggcttcttcagcatccaggtgatcagcaacgccctgaaggtgtggggcctggagctgatcctgttcaacagccccgagtaccagagactgagaatcgaccccatcaacgagagaagcttcatctgcaactacaaggagcactggttcaccgtgagaaagctgggcaagcagtggttcaacctgaacagcctgctgaccggccccgagctgatcagcgacacctacctggccctgttcctggcccagctgcagcaggagggctacagcatcttcgtggtgaagggcgacctgcccgactgcgaggccgaccagctgctgcagatgatcagagtgcagcagatgcacagacccaagctgatcggcgaggagctggcccagctgaaggagcagagagtgcacaagaccgacctggagagagtgctggaggccaacgacggcagcggcatgctggacgaggacgaggaggacctgcagagagccctggccctgagcagacaggagatcgacatggaggacgaggaggccgacctgagaagagccatccagctgagcatgcagggcagcagcagaaacatcagccaggacatgacccagaccagcggcaccaacctgaccagcgaggagctgagaaagagaagagaggcctacttcgagaagcagcagcagaagcagcagcagcagcagcagcagcagcagcagggcgacctgagcggccagagcagccacccctgcgagagacccgccaccagcagcggcgccctgggcagcgacctgggcgacgccatgagcgaggaggacatgctgcaggccgccgtgaccatgagcctggagaccgtgagaaacgacctgaagaccgagggcaagaagtag

SEQ ID NO: 151688 - DNA, 1101 bp, Artificial Sequence
  derived and/or modified sequence
atggagagcatcttccacgagaagcaggagggcagcctgtgcgcccagcactgcctgaacaacctgctgcagggcgagtacttcagccccgtggagctgagcagcatcgcccaccagctggacgaggaggagagaatgagaatggccgagggcggcgtgaccagcgaggactacagaaccttcctgcagcagcccagcggcaacatggacgacagcggcttcttcagcatccaggtgatcagcaacgccctgaaggtgtggggcctggagctgatcctgttcaacagccccgagtaccagagactgagaatcgaccccatcaacgagagaagcttcatctgcaactacaaggagcactggttcaccgtgagaaagctgggcaagcagtggttcaacctgaacagcctgctgaccggccccgagctgatcagcgacacctacctggccctgttcctggcccagctgcagcaggagggctacagcatcttcgtggtgaagggcgacctgcccgactgcgaggccgaccagctgctgcagatgatcagagtgcagcagatgcacagacccaagctgatcggcgaggagctggcccagctgaaggagcagagagtgcacaagaccgacctggagagagtgctggaggccaacgacggcagcggcatgctggacgaggacgaggaggacctgcagagagccctggccctgagcagacaggagatcgacatggaggacgaggaggccgacctgagaagagccatccagctgagcatgcagggcagcagcagaaacatcagccaggacatgacccagaccagcggcaccaacctgaccagcgaggagctgagaaagagaagagaggcctacttcgagaacgactacttcgacagccagcagcagaagcagcagcagcagcagcagcagcagcagcagggcgacctgagcggccagagcagccacccctgcgagagacccgccaccagcagcggcgccctgggcagcgacctgggcgacgccatgagcgaggaggacatgctgcaggccgccgtgaccatgagcctggagaccgtgagaaacgacctgaagaccgagggcaagaagtag

SEQ ID NO: 151689 - DNA, 1113 bp, Artificial Sequence
  derived and/or modified sequence
atggagagcatcttccacgagaagcaggagggcagcctgtgcgcccagcactgcctgaacaacctgctgcagggcgagtacttcagccccgtggagctgagcagcatcgcccaccagctggacgaggaggagagaatgagaatggccgagggcggcgtgaccagcgaggactacagaaccttcctgcagcagcccagcggcaacatggacgacagcggcttcttcagcatccaggtgatcagcaacgccctgaaggtgtggggcctggagctgatcctgttcaacagccccgagtaccagagactgagaatcgaccccatcaacgagagaagcttcatctgcaactacaaggagcactggttcaccgtgagaaagctgggcaagcagtggttcaacctgaacagcctgctgaccggccccgagctgatcagcgacacctacctggccctgttcctggcccagctgcagcaggagggctacagcatcttcgtggtgaagggcgacctgcccgactgcgaggccgaccagctgctgcagatgatcagagtgcagcagatgcacagacccaagctgatcggcgaggagctggcccagctgaaggagcagagagtgcacaagaccgacctggagagagtgctggaggccaacgacggcagcggcatgctggacgaggacgaggaggacctgcagagagccctggccctgagcagacaggagatcgacatggaggacgaggaggccgacctgagaagagccatccagctgagcatgcagggcagcagcagaaacatcagccaggacatgacccagaccagcggcaccaacctgaccagcgaggagctgagaaagagaagagaggcctacttcgagaagaccgagagcagaagcgtggcccaggcccagcagcagaagcagcagcagcagcagcagcagcagcagcagggcgacctgagcggccagagcagccacccctgcgagagacccgccaccagcagcggcgccctgggcagcgacctgggcgacgccatgagcgaggaggacatgctgcaggccgccgtgaccatgagcctggagaccgtgagaaacgacctgaagaccgagggcaagaagtag

SEQ ID NO: 151690 - DNA, 1095 bp, Artificial Sequence
  derived and/or modified sequence
atggagagcatcttccacgagaagcaggagggcagcctgtgcgcccagcactgcctgaacaacctgctgcagggcgagtacttcagccccgtggagctgagcagcatcgcccaccagctggacgaggaggagagaatgagaatggccgagggcggcgtgaccagcgaggactacagaaccttcctgcagcagcccagcggcaacatggacgacagcggcttcttcagcatccaggtgatcagcaacgccctgaaggtgtggggcctggagctgatcctgttcaacagccccgagtaccagagactgagaatcgaccccatcaacgagagaagcttcatctgcaactacaaggagcactggttcaccgtgagaaagctgggcaagcagtggttcaacctgaacagcctgctgaccggccccgagctgatcagcgacacctacctggccctgttcctggcccagctgcagcaggagggctacagcatcttcgtggtgaagggcgacctgcccgactgcgaggccgaccagctgctgcagatgatcagagtgcagcagatgcacagacccaagctgatcggcgaggagctggcccagctgaaggagcagagagtgcacaagaccgacctggagagagtgctggaggccaacgacggcagcggcatgctggacgaggacgaggaggacctgcagagagccctggccctgagcagacaggagatcgacatggaggacgaggaggccgacctgagaagagccatccagctgagcatgcagggcagcagcagaaacatcagccaggacatgacccagaccagcggcaccaacctgaccagcgaggagctgagaaagagaagagaggcctacttcgagaagcagcagcagaagcagcagcagcagcagcagcagcagcagcagggcgacctgagcggccagagcagccacccctgcgagagacccgccaccagcagcggcgccctgggcagcgacctgggcaaggcctgcagccccttcatcatgttcgccaccttcaccctgtacctgacctacgagctgcacgtgatcttcgccctgcactacagcagcttccccctgtag

SEQ ID NO: 151691 - DNA, 1119 bp, Artificial Sequence
  derived and/or modified sequence
atggagagcatcttccacgagaagcaggagggcagcctgtgcgcccagcactgcctgaacaacctgctgcagggcgagtacttcagccccgtggagctgagcagcatcgcccaccagctggacgaggaggagagaatgagaatggccgagggcggcgtgaccagcgaggactacagaaccttcctgcagcagcccagcggcaacatggacgacagcggcttcttcagcatccaggtgatcagcaacgccctgaaggtgtggggcctggagctgatcctgttcaacagccccgagtaccagagactgagaatcgaccccatcaacgagagaagcttcatctgcaactacaaggagcactggttcaccgtgagaaagctgggcaagcagtggttcaacctgaacagcctgctgaccggccccgagctgatcagcgacacctacctggccctgttcctggcccagctgcagcaggagggctacagcatcttcgtggtgaagggcgacctgcccgactgcgaggccgaccagctgctgcagatgatcagagtgcagcagatgcacagacccaagctgatcggcgaggagctggcccagctgaaggagcagagagtgcacaagaccgacctggagagagtgctggaggccaacgacggcagcggcatgctggacgaggacgaggaggacctgcagagagccctggccctgagcagacaggagatcgacatggaggacgaggaggccgacctgagaagagccatccagctgagcatgcagggcagcagcagaaacatcagccaggacatgacccagaccagcggcaccaacctgaccagcgaggagctgagaaagagaagagaggcctacttcgagaagttcggcagacccagaagagccgactgcctgagacagcagcagaagcagcagcagcagcagcagcagcagcagcagggcgacctgagcggccagagcagccacccctgcgagagacccgccaccagcagcggcgccctgggcagcgacctgggcgacgccatgagcgaggaggacatgctgcaggccgccgtgaccatgagcctggagaccgtgagaaacgacctgaagaccgagggcaagaagtag

SEQ ID NO: 151692 - DNA, 1128 bp, Artificial Sequence
  derived and/or modified sequence
gacagcgtgagcaagaagaagcaggagggcagcctgtgcgcccagcactgcctgaacaacctgctgcagggcgagtacttcagccccgtggagctgagcagcatcgcccaccagctggacgaggaggagagaatgagaatggccgagggcggcgtgaccagcgaggactacagaaccttcctgcagcagcccagcggcaacatggacgacagcggcttcttcagcatccaggtgatcagcaacgccctgaaggtgtggggcctggagctgatcctgttcaacagccccgagtaccagagactgagaatcgaccccatcaacgagagaagcttcatctgcaactacaaggagcactggttcaccgtgagaaagctgggcaagcagtggttcaacctgaacagcctgctgaccggccccgagctgatcagcgacacctacctggccctgttcctggcccagctgcagcaggagggctacagcatcttcgtggtgaagggcgacctgcccgactgcgaggccgaccagctgctgcagatgatcagagtgcagcagatgcacagacccaagctgatcggcgaggagctggcccagctgaaggagcagagagtgcacaagaccgacctggagagagtgctggaggccaacgacggcagcggcatgctggacgaggacgaggaggacctgcagagagccctggccctgagcagacaggagatcgacatggaggacgaggaggccgacctgagaagagccatccagctgagcatgcagggcagcagcagaaacatcagccaggacatgacccagaccagcggcaccaacctgaccagcgaggagctgagaaagagaagagaggcctacttcgagaagaagttcaccgccaacagaaccgaccagcacttccacatcctgaagcagcagcagaagcagcagcagcagcagcagcagcagcagcagggcgacctgagcggccagagcagccacccctgcgagagacccgccaccagcagcggcgccctgggcagcgacctgggcgacgccatgagcgaggaggacatgctgcaggccgccgtgaccatgagcctggagaccgtgagaaacgacctgaagaccgagggcaagaagtag

SEQ ID NO: 151693 - DNA, 1125 bp, Artificial Sequence
  derived and/or modified sequence
atggagagcatcttccacgagaagcaggagggcagcctgtgcgcccagcactgcctgaacaacctgctgcagggcgagtacttcagccccgtggagctgagcagcatcgcccaccagctggacgaggaggagagaatgagaatggccgagggcggcgtgaccagcgaggactacagaaccttcctgcagcagcccagcggcaacatggacgacagcggcttcttcagcatccaggtgatcagcaacgccctgaaggtgtggggcctggagctgatcctgttcaacagccccgagtaccagagactgagaatcgaccccatcaacgagagaagcttcatctgcaactacaaggagcactggttcaccgtgagaaagctgggcaagcagtggttcaacctgaacagcctgctgaccggccccgagctgatcagcgacacctacctggccctgttcctggcccagctgcagcaggagggctacagcatcttcgtggtgaagggcgacctgcccgactgcgaggccgaccagctgctgcagatgatcagagtgcagcagatgcacagacccaagctgatcggcgaggagctggcccagctgaaggagcagagagtgcacaagaccgacctggagagagtgctggaggccaacgacggcagcggcatgctggacgaggacgaggaggacctgcagagagccctggccctgagcagacaggagatcgacatggaggacgaggaggccgacctgagaagagccatccagctgagcatgcagggcagcagcagaaacatcagccaggacatgacccagaccagcggcaccaacctgaccagcgaggagctgagaaagagaagagaggcctacttcgagaaggtgttcttcaagaacctgcagcagatcggcagagccagacagcagcagaagcagcagcagcagcagcagcagcagcagcagggcgacctgagcggccagagcagccacccctgcgagagacccgccaccagcagcggcgccctgggcagcgacctgggcgacgccatgagcgaggaggacatgctgcaggccgccgtgaccatgagcctggagaccgtgagaaacgacctgaagaccgagggcaagaagtag

SEQ ID NO: 151694 - DNA, 1113 bp, Artificial Sequence
  derived and/or modified sequence
atggagagcatcttccacgagaagcaggagggcagcctgtgcgcccagcactgcctgaacaacctgctgcagggcgagtacttcagccccgtggagctgagcagcatcgcccaccagctggacgaggaggagagaatgagaatggccgagggcggcgtgaccagcgaggactacagaaccttcctgcagcagcccagcggcaacatggacgacagcggcttcttcagcatccaggtgatcagcaacgccctgaaggtgtggggcctggagctgatcctgttcaacagccccgagtaccagagactgagaatcgaccccatcaacgagagaagcttcatctgcaactacaaggagcactggttcaccgtgagaaagctgggcaagcagtggttcaacctgaacagcctgctgaccggccccgagctgatcagcgacacctacctggccctgttcctggcccagctgcagcaggagggctacagcatcttcgtggtgaagggcgacctgcccgactgcgaggccgaccagctgctgcagatgatcagagtgcagcagatgcacagacccaagctgatcggcgaggagctggcccagctgaaggagcagagagtgcacaagaccgacctggagagagtgctggaggccaacgacggcagcggcatgctggacgaggacgaggaggacctgcagagagccctggccctgagcagacaggagatcgacatggaggacgaggaggccgacctgagaagagccatccagctgagcatgcagggcagcagcagaaacatcagccaggacatgacccagaccagcggcaccaacctgaccagcgaggagctgagaaagagaagagaggcctacttcgagaagatctacttcaccttcgagtgcttcagacagcagcagaagcagcagcagcagcagcagcagcagcagcagggcgacctgagcggccagagcagccacccctgcgagagacccgccaccagcagcggcgccctgggcagcgacctgggcgacgccatgagcgaggaggacatgctgcaggccgccgtgaccatgagcctggagaccgtgagaaacgacctgaagaccgagggcaagaagtag

SEQ ID NO: 151695 - DNA, 1134 bp, Artificial Sequence
  derived and/or modified sequence
atggagagcatcttccacgagaagcaggagggcagcctgtgcgcccagcactgcctgaacaacctgctgcagggcgagtacttcagccccgtggagctgagcagcatcgcccaccagctggacgaggaggagagaatgagaatggccgagggcggcgtgaccagcgaggactacagaaccttcctgcagcagcccagcggcaacatggacgacagcggcttcttcagcatccaggtgatcagcaacgccctgaaggtgtggggcctggagctgatcctgttcaacagccccgagtaccagagactgagaatcgaccccatcaacgagagaagcttcatctgcaactacaaggagcactggttcaccgtgagaaagctgggcaagcagtggttcaacctgaacagcctgctgaccggccccgagctgatcagcgacacctacctggccctgttcctggcccagctgcagcaggagggctacagcatcttcgtggtgaagggcgacctgcccgactgcgaggccgaccagctgctgcagatgatcagagtgcagcagatgcacagacccaagctgatcggcgaggagctggcccagctgaaggagcagagagtgcacaagaccgacctggagagagtgctggaggccaacgacggcagcggcatgctggacgaggacgaggaggacctgcagagagccctggccctgagcagacaggagatcgacatggaggacgaggaggccgacctgagaagagccatccagctgagcatgcagggcagcagcagaaacatcagccaggacatgacccagaccagcggcaccaacctgaccagcgaggagctgagaaagagaagagaggcctacttcgagaaggtgttcttcaagaacctgcagcagaaccagcacttccacatcctgaagcagcagcagaagcagcagcagcagcagcagcagcagcagcagggcgacctgagcggccagagcagccacccctgcgagagacccgccaccagcagcggcgccctgggcagcgacctgggcgacgccatgagcgaggaggacatgctgcaggccgccgtgaccatgagcctggagaccgtgagaaacgacctgaagaccgagggcaagaagtag

SEQ ID NO: 151696 - protein, 707 aa, Artificial Sequence
  derived and/or modified sequence
MSLWQPLVLVLLVLGCCFAAPRQRQSTLVLFPGDLRTNLTDRQLAEEYLYRYGYTRVAEMRGESKSLGPALLLLQKQLSLPETGELDSATLKAMRTPRCGVPDLGRFQTFEGDLKWHHHNITYWIQNYSEDLPRAVIDDAFARAFALWSAVTPLTFTRVYSRDADIVIQFGVAEHGDGYPFDGKDGLLAHAFPPGPGIQGDAHFDDDELWSLGKGVVVPTRFGNADGAACHFPFIFEGRSYSACTTDGRSDGLPWCSTTANYDTDDRFGFCPSERLYTQDGNADGKPCQFPFIFQGQSYSACTTDGRSDGYRWCATTANYDRDKLFGFCPTRADSTVMGGNSAGELCVFPFTFLGKEYSTCTSEGRGDGRLWCATTSNFDSDKKWGFCPDQGYSLFLVAAHEFGHALGLDHSSVPEALMYPMYRFTEGPPLHKDDVNGIRHLYGPRPEPEPRPPTTTTPQPTAPPTVCPTGPPTVHPSERPTAGPTGPPSAGPTGPPTAGPSTATTVPLSPVDDACNVNIFDAIAEIGNQLYLFKDGKYWRFSEGRGSRPQGPFLIADKWPALPRKLDSVFEERLSKKLFFFSGRQVWVYTGASVLGPRRLDKLGLGADVAQVTGALRSGRGKMLLFSGRRLWRFDVKAQMVDPRSASEVDRMFPGVPLDTHDVFQYREKAYFCQDRFYWRVSSRSELNQVDQVGYVTYDILQCPED

SEQ ID NO: 151697 - protein, 277 aa, Artificial Sequence
  derived and/or modified sequence
MGGNSAGELCVFPFTFLGKEYSNFDSDKKWGFCPDQGYSLFLVAAHEFGHALGLDHSSVPEALMYPMYRFTEGPPLHKDDVNGIRHLYGPRPEPEPRPPTTTTPQPTAPPTVCPTGPPTVHPPFLIADKWPALPRKLDSVFEERLSKKLFFFSGRQVWVYTGASVLGPRRLDKLGLGADVAQVTGALRSGRGKMLLFSGRRLWRFDVKAQMVDPRSASEVDRMFPGVPLDTHDVFQYREKAYFCQDRFYWRVSSRSELNQVDQVGYVTYDILQCPED

SEQ ID NO: 151698 - DNA, 2124 bp, Artificial Sequence
  derived and/or modified sequence
atgagcctgtggcagcccctggtgctggtgctgctggtgctgggctgctgcttcgccgcccccagacagagacagagcaccctggtgctgttccccggcgacctgagaaccaacctgaccgacagacagctggccgaggagtacctgtacagatacggctacaccagagtggccgagatgagaggcgagagcaagagcctgggccccgccctgctgctgctgcagaagcagctgagcctgcccgagaccggcgagctggacagcgccaccctgaaggccatgagaacccccagatgcggcgtgcccgacctgggcagattccagaccttcgagggcgacctgaagtggcaccaccacaacatcacctactggatccagaactacagcgaggacctgcccagagccgtgatcgacgacgccttcgccagagccttcgccctgtggagcgccgtgacccccctgaccttcaccagagtgtacagcagagacgccgacatcgtgatccagttcggcgtggccgagcacggcgacggctaccccttcgacggcaaggacggcctgctggcccacgccttcccccccggccccggcatccagggcgacgcccacttcgacgacgacgagctgtggagcctgggcaagggcgtggtggtgcccaccagattcggcaacgccgacggcgccgcctgccacttccccttcatcttcgagggcagaagctacagcgcctgcaccaccgacggcagaagcgacggcctgccctggtgcagcaccaccgccaactacgacaccgacgacagattcggcttctgccccagcgagagactgtacacccaggacggcaacgccgacggcaagccctgccagttccccttcatcttccagggccagagctacagcgcctgcaccaccgacggcagaagcgacggctacagatggtgcgccaccaccgccaactacgacagagacaagctgttcggcttctgccccaccagagccgacagcaccgtgatgggcggcaacagcgccggcgagctgtgcgtgttccccttcaccttcctgggcaaggagtacagcacctgcaccagcgagggcagaggcgacggcagactgtggtgcgccaccaccagcaacttcgacagcgacaagaagtggggcttctgccccgaccagggctacagcctgttcctggtggccgcccacgagttcggccacgccctgggcctggaccacagcagcgtgcccgaggccctgatgtaccccatgtacagattcaccgagggcccccccctgcacaaggacgacgtgaacggcatcagacacctgtacggccccagacccgagcccgagcccagaccccccaccaccaccaccccccagcccaccgccccccccaccgtgtgccccaccggcccccccaccgtgcaccccagcgagagacccaccgccggccccaccggcccccccagcgccggccccaccggcccccccaccgccggccccagcaccgccaccaccgtgcccctgagccccgtggacgacgcctgcaacgtgaacatcttcgacgccatcgccgagatcggcaaccagctgtacctgttcaaggacggcaagtactggagattcagcgagggcagaggcagcagaccccagggccccttcctgatcgccgacaagtggcccgccctgcccagaaagctggacagcgtgttcgaggagagactgagcaagaagctgttcttcttcagcggcagacaggtgtgggtgtacaccggcgccagcgtgctgggccccagaagactggacaagctgggcctgggcgccgacgtggcccaggtgaccggcgccctgagaagcggcagaggcaagatgctgctgttcagcggcagaagactgtggagattcgacgtgaaggcccagatggtggaccccagaagcgccagcgaggtggacagaatgttccccggcgtgcccctggacacccacgacgtgttccagtacagagagaaggcctacttctgccaggacagattctactggagagtgagcagcagaagcgagctgaaccaggtggaccaggtgggctacgtgacctacgacatcctgcagtgccccgaggactag

SEQ ID NO: 151699 - DNA, 834 bp, Artificial Sequence
  derived and/or modified sequence
atgggcggcaacagcgccggcgagctgtgcgtgttccccttcaccttcctgggcaaggagtacagcaacttcgacagcgacaagaagtggggcttctgccccgaccagggctacagcctgttcctggtggccgcccacgagttcggccacgccctgggcctggaccacagcagcgtgcccgaggccctgatgtaccccatgtacagattcaccgagggcccccccctgcacaaggacgacgtgaacggcatcagacacctgtacggccccagacccgagcccgagcccagaccccccaccaccaccaccccccagcccaccgccccccccaccgtgtgccccaccggcccccccaccgtgcacccccccttcctgatcgccgacaagtggcccgccctgcccagaaagctggacagcgtgttcgaggagagactgagcaagaagctgttcttcttcagcggcagacaggtgtgggtgtacaccggcgccagcgtgctgggccccagaagactggacaagctgggcctgggcgccgacgtggcccaggtgaccggcgccctgagaagcggcagaggcaagatgctgctgttcagcggcagaagactgtggagattcgacgtgaaggcccagatggtggaccccagaagcgccagcgaggtggacagaatgttccccggcgtgcccctggacacccacgacgtgttccagtacagagagaaggcctacttctgccaggacagattctactggagagtgagcagcagaagcgagctgaaccaggtggaccaggtgggctacgtgacctacgacatcctgcagtgccccgaggactag

SEQ ID NO: 151700 - DNA, 2124 bp, Artificial Sequence
  derived and/or modified sequence
atgagtctgtggcagccccttgtgttagtgctgctcgttctcggctgttgcttcgccgcccctaggcagcgccagtctaccctcgtgctgttcccaggggacctacggactaacctgaccgaccgacagctcgccgaggagtacctgtatcgctatgggtatacaagagtggcagaaatgagaggcgagagcaagagcctgggtccggccctgcttctcctccaaaagcagctgtccttgccggagaccggcgagttggactccgccacgttaaaagccatgaggacccccaggtgcggcgtgccggacctggggcggttccagaccttcgaaggagaccttaagtggcatcaccacaacattacttactggattcagaactatagtgaagaccttccacgagccgtgattgacgatgcgttcgctagagctttcgcactatggtccgccgtgactccactgacattcacacgcgtgtacagcagggatgcggacattgtgattcaattcggcgttgctgagcatggggacggctacccctttgacggcaaagacgggctcctcgcccacgcttttccaccaggaccaggcatccagggagatgcccattttgacgatgatgagctctggtcactgggaaagggcgtcgtcgtgccaacccgattcggcaacgccgatggcgcagcgtgtcactttccatttattttcgagggacggtcttactccgcatgtacgactgacgggaggagcgatggcctcccttggtgcagcacaacagccaattacgacactgacgacaggttcggcttttgcccctcagaacggctatatacacaggatgggaacgctgatggcaagccgtgtcagtttcccttcatctttcagggccagagttacagcgcctgtacgacagacggtaggagtgacggatataggtggtgcgctaccactgctaattatgacagggacaaactcttcggattttgtcctacgcgcgccgattcaactgtcatgggtggaaatagcgcgggggagctttgtgttttcccttttacatttctgggcaaggaatattctacctgcacaagcgagggtaggggggatggccgcttatggtgcgcgacaacttctaactttgacagcgacaagaagtggggattttgccccgatcaaggttactctctctttttggtcgcggctcatgagtttggccatgccctcgggctcgatcactcgtccgtccctgaggccctcatgtaccctatgtataggttcactgaggggccccctctgcacaaggatgacgttaatggcatcagacacctgtacggaccccgccctgagcccgagccgcggcctcctacaaccaccacacctcaacctacagcccctcctactgtctgcccgacagggcccccaaccgtgcacccatcagaaaggccaaccgctggaccaaccggccccccctccgccggacccacaggaccccccacagcgggacctagtaccgccactaccgttcctttgtcacccgttgacgacgcctgtaatgtaaacattttcgacgctatcgccgaaatcggcaatcagctgtatcttttcaaagatggtaagtactggcggttctctgaaggaagaggttcgaggccacaaggacccttcctgattgctgataaatggccagctttgccgcggaagttggacagtgtgtttgaagagcggctgagcaagaagttgttttttttcagcggccgccaggtctgggtttacactggcgccagtgtgctgggtccgcgccgtttagacaagctcggcctgggcgcggatgtggcccaggtcacaggagcgctccgatcaggcagaggcaagatgctcctcttttcagggaggagattgtggcgcttcgatgtgaaagcccagatggtggatccgagatccgcaagtgaggtggaccgaatgttccccggagttcccctcgacacccacgacgtgtttcaatatcgggagaaagcatacttttgtcaagaccggttctattggcgggtatcctcacgttcagagctgaaccaggttgatcaggttggttacgtaacatacgacatactgcaatgtcccgaggattag

SEQ ID NO: 151701 - DNA, 834 bp, Artificial Sequence
  derived and/or modified sequence
atgggaggcaattccgcaggggagctctgtgtcttccccttcacattcctcggtaaagagtactctaattttgactccgataaaaagtggggtttctgccccgatcagggctactccctgttcctggtggccgcacatgaattcggtcatgccctaggtcttgaccattcaagcgtgccagaggccctgatgtacccaatgtatcggtttactgagggtcctcctctgcacaaagacgacgttaatgggatccgtcatctttatggcccacgtcccgagcctgaaccccgcccacccacaacaactacaccccagcctacggcccccccaacggtttgcccaaccggcccgcccacagtacatccacccttcctcatagccgacaaatggcccgcactgccacgcaaattagactcagtgtttgaagagaggttatccaagaaactgtttttcttctctgggcgccaagtgtgggtctatacaggcgcttcagttctcggacccagaagactcgacaagctaggactgggtgctgacgtagcccaagtgacaggtgccctgcggtcagggaggggaaaaatgctgctcttttctggaagaagactttggcggttcgatgtgaaggcccagatggttgaccccaggtccgcatctgaagtggatcgcatgtttccgggtgtgcctttggacacacacgatgtctttcagtatcgagaaaaagcttacttttgtcaggatagattttattggcgcgtgagcagtcggagtgagttgaaccaagtggatcaggtgggctacgtcacttacgacatcctgcagtgtcccgaggattag

SEQ ID NO: 151702 - DNA, 2124 bp, Artificial Sequence
  derived and/or modified sequence
atgagcctgtggcagcccctggtgctggtgctgctggtgctgggctgctgctttgctgccccccggcagaggcagagcaccctggtgctcttccctggggacctgcggaccaacctgacagaccggcagctggccgaggagtacctgtaccgctatggctacaccagggtggccgagatgagaggagagagcaagagcctgggccctgccctgctgctgctgcagaagcagctgagcctgcctgagactggagagctggacagcgccaccctgaaggccatgaggaccccccgctgtggggtgcctgacctgggccgcttccagacctttgaaggagacctgaagtggcaccaccacaacatcacctactggatccagaactacagcgaggacctgcccagggctgtgattgatgatgcctttgcccgggcctttgccctgtggagcgctgtgacccccctgaccttcaccagggtgtacagcagagatgctgacatcgtcatccagtttggagtggccgagcacggagatggctacccctttgatggcaaggatggcctgctggcccacgccttccccccaggccctggcatccagggagatgcccactttgatgatgatgagctgtggagcctgggcaagggcgtggtggtgcccaccaggtttggaaatgctgatggagctgcctgccacttccccttcatctttgagggccgcagctacagcgcctgcaccacagatggccgcagtgatggcctgccctggtgcagcaccacagccaactatgacacagatgaccgcttcggcttctgccccagcgagcggctgtacacccaggatggaaatgctgatggcaagccctgccagttccccttcatcttccagggccagagctacagcgcctgcaccacagatggccgcagtgatggctaccgctggtgtgccaccacagccaactatgaccgggacaagctgtttggcttctgccccaccagggctgacagcacagtgatgggcggcaacagcgctggggagctgtgtgtgttccccttcaccttcctgggcaaggagtacagcacctgcaccagcgagggcagaggagatggccgcctgtggtgtgccaccaccagcaactttgacagcgacaagaagtggggcttctgcccagaccagggctacagcctcttcctggtggccgcccatgaatttggacatgccctgggcctggaccacagctctgtgcctgaggccctgatgtaccccatgtaccgcttcacagagggcccccccctgcacaaggatgatgtgaatggcatccgccacctgtatggccccaggcctgagcctgagcccaggcctcccaccaccaccaccccccagcccacagccccacccaccgtgtgccccaccggcccccccaccgtgcaccccagcgagcggcccacagctggccccaccggcccccccagcgctggccccaccggccccccaacagctggccccagcacagccaccaccgtgcccctgagccctgtggatgatgcctgcaatgtgaacatctttgatgccatcgccgagatcggcaaccagctgtacctgttcaaggatggcaagtactggaggttcagcgagggccggggcagccggccccagggccccttcctgattgctgacaagtggccagccctgcccaggaagctggacagcgtgtttgaggagcggctgagcaagaagctgttcttcttcagcggccggcaggtgtgggtgtacacaggagcctctgtgctgggcccccggcggctggacaagctgggcctgggcgcagatgtggcccaggtgactggagccctgcggagcggccggggcaagatgctgctcttcagcggccggcggctgtggaggtttgatgtgaaggcccagatggtggaccccaggtctgccagcgaggtggacaggatgtttcctggggtgcccctggacacccatgatgtgttccagtaccgggagaaggcctacttctgccaggaccgcttctactggagggtgagcagccgctctgagctgaaccaggtggaccaggtgggctacgtgacctatgacatcctgcagtgcccagaggactag

SEQ ID NO: 151703 - DNA, 834 bp, Artificial Sequence
  derived and/or modified sequence
atgggcggcaacagcgctggggagctgtgtgtgttccccttcaccttcctgggcaaggagtacagcaactttgacagcgacaagaagtggggcttctgcccagaccagggctacagcctcttcctggtggccgcccacgagtttggccacgccctgggcctggaccacagctctgtgcctgaggccctgatgtaccccatgtaccgcttcacagagggcccccccctgcacaaggatgatgtgaatggcatccgccacctgtatggccccaggcctgagcctgagccccggccccccaccaccaccaccccccagcccacagcccccccaacagtgtgccccactggaccacccaccgtgcacccccccttcctgattgctgacaagtggccagccctgcccaggaagctggacagcgtgtttgaggagcggctgagcaagaagctgttcttcttcagcggccggcaggtgtgggtgtacacaggagcctctgtgctgggcccccggcggctggacaagctgggcctgggcgcagatgtggcccaggtgactggagccctgcggagcggccggggcaagatgctgctcttcagcggccggcggctgtggaggtttgatgtgaaggcccagatggtggaccccaggtctgccagcgaggtggacaggatgtttcctggggtgcccctggacacccatgatgtgttccagtaccgggagaaggcctacttctgccaggaccgcttctactggagggtgagcagccgctctgagctgaaccaggtggaccaggtgggctacgtgacctatgacatcctgcagtgcccagaggactag

SEQ ID NO: 151704 - DNA, 2336 bp, Artificial Sequence
  derived and/or modified sequence
agacacctctgccctcaccatgagcctctggcagcccctggtcctggtgctcctggtgctgggctgctgctttgctgcccccagacagcgccagtccacccttgtgctcttccctggagacctgagaaccaatctcaccgacaggcagctggcagaggaatacctgtaccgctatggttacactcgggtggcagagatgcgtggagagtcgaaatctctggggcctgcgctgctgcttctccagaagcaactgtccctgcccgagaccggtgagctggatagcgccacgctgaaggccatgcgaaccccacggtgcggggtcccagacctgggcagattccaaacctttgagggcgacctcaagtggcaccaccacaacatcacctattggatccaaaactactcggaagacttgccgcgggcggtgattgacgacgcctttgcccgcgccttcgcactgtggagcgcggtgacgccgctcaccttcactcgcgtgtacagccgggacgcagacatcgtcatccagtttggtgtcgcggagcacggagacgggtatcccttcgacgggaaggacgggctcctggcacacgcctttcctcctggccccggcattcagggagacgcccatttcgacgatgacgagttgtggtccctgggcaagggcgtcgtggttccaactcggtttggaaacgcagatggcgcggcctgccacttccccttcatcttcgagggccgctcctactctgcctgcaccaccgacggtcgctccgacggcttgccctggtgcagtaccacggccaactacgacaccgacgaccggtttggcttctgccccagcgagagactctacacccaggacggcaatgctgatgggaaaccctgccagtttccattcatcttccaaggccaatcctactccgcctgcaccacggacggtcgctccgacggctaccgctggtgcgccaccaccgccaactacgaccgggacaagctcttcggcttctgcccgacccgagctgactcgacggtgatggggggcaactcggcgggggagctgtgcgtcttccccttcactttcctgggtaaggagtactcgacctgtaccagcgagggccgcggagatgggcgcctctggtgcgctaccacctcgaactttgacagcgacaagaagtggggcttctgcccggaccaaggatacagtttgttcctcgtggcggcgcatgagttcggccacgcgctgggcttagatcattcctcagtgccggaggcgctcatgtaccctatgtaccgcttcactgaggggccccccttgcataaggacgacgtgaatggcatccggcacctctatggtcctcgccctgaacctgagccacggcctccaaccaccaccacaccgcagcccacggctcccccgacggtctgccccaccggaccccccactgtccacccctcagagcgccccacagctggccccacaggtcccccctcagctggccccacaggtccccccactgctggcccttctacggccactactgtgcctttgagtccggtggacgatgcctgcaacgtgaacatcttcgacgccatcgcggagattgggaaccagctgtatttgttcaaggatgggaagtactggcgattctctgagggcagggggagccggccgcagggccccttccttatcgccgacaagtggcccgcgctgccccgcaagctggactcggtctttgaggagcggctctccaagaagcttttcttcttctctgggcgccaggtgtgggtgtacacaggcgcgtcggtgctgggcccgaggcgtctggacaagctgggcctgggagccgacgtggcccaggtgaccggggccctccggagtggcagggggaagatgctgctgttcagcgggcggcgcctctggaggttcgacgtgaaggcgcagatggtggatccccggagcgccagcgaggtggaccggatgttccccggggtgcctttggacacgcacgacgtcttccagtaccgagagaaagcctatttctgccaggaccgcttctactggcgcgtgagttcccggagtgagttgaaccaggtggaccaagtgggctacgtgacctatgacatcctgcagtgccctgaggactagggctcccgtcctgctttggcagtgccatgtaaatccccactgggaccaaccctggggaaggagccagtttgccggatacaaactggtattctgttctggaggaaagggaggagtggaggtgggctgggccctctcttctcacctttgttttttgttggagtgtttctaataaacttggattctctaaccttta

SEQ ID NO: 151705 - DNA, 1262 bp, Artificial Sequence
  derived and/or modified sequence
aatggccccgccccagccactaaggttcggccttttctgcccagctggccgcctcttccttggtctggtgtcccaggcaccgcccacgggtctagcctcttctcaggagtgctctacagcgccccctaggccaccaagattgtttagctccctgtcgggtcggcccctgactccttattggactcatccatctggctcatccaaggccttgggtctctccagctgactcgacggtgatggggggcaactcggcgggggagctgtgcgtcttccccttcactttcctgggtaaggagtactcgaactttgacagcgacaagaagtggggcttctgcccggaccaaggatacagtttgttcctcgtggcggcgcatgagttcggccacgcgctgggcttagatcattcctcagtgccggaggcgctcatgtaccctatgtaccgcttcactgaggggccccccttgcataaggacgacgtgaatggcatccggcacctctatggtcctcgccctgaacctgagccacggcctccaaccaccaccacaccgcagcccacggctcccccgacggtctgccccaccggaccccccactgtccacccccccttccttatcgccgacaagtggcccgcgctgccccgcaagctggactcggtctttgaggagcggctctccaagaagcttttcttcttctctgggcgccaggtgtgggtgtacacaggcgcgtcggtgctgggcccgaggcgtctggacaagctgggcctgggagccgacgtggcccaggtgaccggggccctccggagtggcagggggaagatgctgctgttcagcgggcggcgcctctggaggttcgacgtgaaggcgcagatggtggatccccggagcgccagcgaggtggaccggatgttccccggggtgcctttggacacgcacgacgtcttccagtaccgagagaaagcctatttctgccaggaccgcttctactggcgcgtgagttcccggagtgagttgaaccaggtggaccaagtgggctacgtgacctatgacatcctgcagtgccctgaggactagggctcccgtcctgctttggcagtgccatgtaaatccccactgggaccaaccctggggaaggagccagtttgccggatacaaactggtattctgttctggaggaaagggaggagtggaggtgggctgggccctctcttctcacctttgttttttgttggagtgtttctaataaacttggattctctaaccttt

SEQ ID NO: 151706 - DNA, 2124 bp, Artificial Sequence
  derived and/or modified sequence
atgagcctgtggcagcccctggtgctggtgctgctggtgctgggctgttgcttcgccgcaccaagacagaggcagtctactttggttctgttcccaggcgatctgaggacaaatctgaccgaccgccagcttgccgaggagtacctgtaccggtacggatacaccagggtggctgaaatgcgcggggaaagcaagtcgctagggcctgccttgttactcctgcagaagcaattgtccctgccagagaccggtgagctggactccgccactttaaaggctatgaggaccccacgatgcggtgtgcctgacttaggtcggttccagacgttcgagggcgacctgaaatggcaccatcataacatcacatactggattcagaattacagcgaggatttgcccagagcggtcattgatgacgccttcgccagagccttcgccctgtggagcgccgtaactcccctgaccttcacaagagtgtactcacgagacgcggacatcgtgattcaattcggagtggcagaacacggagatggataccctttcgacggaaaagatgggctccttgcacatgcattccctccaggtccaggcattcaaggggacgcacacttcgacgacgatgagctgtggtcgctaggtaagggcgttgtggttccaaccaggtttgggaacgccgatggggccgcttgtcacttcccctttattttcgagggcaggagttactccgcttgcacaactgacgggaggtctgacggtctgccgtggtgctccaccaccgccaactatgacacagatgacaggttcggcttctgccccagcgagaggctctacacacaggacggcaatgcagacggtaagccctgtcagttcccattcatttttcagggccagtcttacagcgcgtgcactactgatggacgtagcgacggttatagatggtgtgctacgacagcaaactatgacagagataagctgtttggcttttgccccaccagagccgacagcactgttatggggggcaatagcgcaggggagctctgtgtgttcccatttacattcctgggcaaggagtacagcacctgtacgtccgagggaagaggcgacgggaggctctggtgtgctaccacatctaactttgacagcgacaagaaatggggcttttgcccagatcaaggatactccctgtttctcgtggccgcccacgaattcggccatgctctgggtctggatcactctagcgtgcccgaggctctcatgtaccctatgtatagattcaccgagggccccccactccataaggacgacgttaacgggattcggcacctgtatggaccgagacctgagccagagccacggcccccaacgactacaacaccccagccgaccgcgcctcccaccgtttgcccgaccgggcccccaactgttcatcctagtgagagacctactgccgggccgacaggtcctccctcagcgggtcctacaggcccaccaacggccggccctagtactgctacgactgtgcccctgtcccccgtggacgatgcttgcaacgtgaacatttttgacgccatcgctgagattgggaatcaactttacctgtttaaggacggcaagtattggcggttcagtgagggccgggggagccggcctcagggtccctttttgattgccgacaagtggccggccctgccaaggaagctcgactctgtctttgaagaacgcctttcaaaaaagctcttttttttttccgggagacaggtgtgggtgtacaccggagcaagtgtgctcggccctcgaagattagataagctcggcctgggagccgacgtggcccaggtcaccggggcactgcggagcggccggggtaaaatgttgctattctctggccggcggctttggcgctttgacgtgaaagcgcaaatggtagacccccggtctgccagtgaggtggatcgcatgttcccaggagtgcctctggatacccacgacgtcttccagtatagggagaaagcatatttctgccaggaccgcttttactggcgggttagctctcggtcagagctgaaccaggttgaccaagtgggatacgttacatacgatatcctgcagtgtcctgaagattag

SEQ ID NO: 151707 - DNA, 834 bp, Artificial Sequence
  derived and/or modified sequence
atgggcggcaacagcgccggcgagctgtgcgtgttccccttcacctttctcggtaaggagtactccaacttcgattcggataagaaatggggcttttgtccggatcagggctattctttatttttggttgcagctcacgagtttggacatgccttaggtctggaccactcaagcgttcctgaggctctcatgtaccctatgtacagatttactgaaggccctccactccataaagacgatgtcaatggaattcgccacctttacgggccacgtcccgagccggagccacgccccccgaccacaactacaccccaacctacagcaccccccactgtatgccccacaggcccccccaccgtgcacccaccgttcctcattgcggataagtggcctgcacttcctcgcaaactcgatagtgtatttgaagagcgtcttagcaagaagcttttctttttctccggccgacaggtctgggtttataccggggccagcgtcctgggaccacgccgactcgataaactgggccttggagcagacgtggcacaggtcacgggagccctccgcagcgggaggggtaagatgcttctcttcagcgggcgtcggctgtggcgttttgacgtcaaagcacaaatggtcgaccctaggagcgccagtgaggtggacagaatgttccctggtgttcccttagatactcatgacgtgttccagtatcgagaaaaggcttatttctgccaggaccgattctactggcgagtgtcctcacgaagtgaacttaaccaggtggaccaggtggggtacgtgacgtatgatattctgcagtgcccagaggattag

SEQ ID NO: 151708 - DNA, 2124 bp, Artificial Sequence
  derived and/or modified sequence
atgtctctttggcagccgctagtcctcgttctactggtgctgggttgctgttttgcggcaccccgacaaagacaaagtacgctcgtactttttcctggggacctacgtacgaacctcaccgaccgtcagttggccgaggagtacctgtacagatacggctatactagagtcgctgagatgcggggtgagagtaaaagcctgggacccgctctcctattactccagaagcagctgtcactgccagagaccggggagctggacagtgccaccctgaaagctatgcgtacaccgagatgtggggttccagatctcggtagattccagacctttgagggagacctgaagtggcatcaccacaatattacttattggatacagaactacagcgaagacctgcccagggccgtgattgacgatgcattcgcgagggccttcgccctgtggagtgcagtgactcctctcactttcacccgggtgtactccagagacgcggatattgtgatccaatttggagtggccgaacatggggatggttatccctttgacggcaaggatggcctgttggcacacgctttcccgcctggccctggcatacagggtgatgctcactttgatgatgatgagctgtggagtctgggcaagggcgtggtagtgccgactcggtttggcaacgctgatggcgcagcttgtcacttccccttcatcttcgaaggccgttcgtacagcgcctgcaccactgatgggaggagtgacggtttgccatggtgcagcacgacagccaactacgataccgacgatagattcgggttttgtcccagcgaacgattgtacactcaggacgggaacgccgatggaaagccatgtcaatttccgtttattttccagggtcagagctattcagcttgcactacagatggccgaagcgacggctatcgctggtgcgccacaaccgctaactacgaccgagataagctttttggcttctgccctaccagggcggacagtactgtgatggggggaaattccgccggtgaattatgcgtgtttccgttcaccttccttggtaaggaatacagcacttgtacgtccgaggggagaggagacgggagattatggtgcgcaacgacctcaaatttcgattcagataagaagtggggcttctgccccgatcaggggtacagccttttcctggttgctgcgcacgagttcggacacgccctgggtctggaccattcatccgttccagaggcccttatgtacccaatgtatcggttcacggaggggcctccattgcacaaagatgacgtcaacggcatacggcatctctacgggcctaggcctgaaccagagcctcggcctcccactacgaccacaccccagccaaccgctccgccaactgtttgcccaaccgggccaccaactgttcatccctctgaaagacctaccgctgggcctacggggccaccatctgccggaccaaccggccctcccacagccggacccagcaccgcaaccacagtgcccttgtcaccagtcgacgacgcctgcaacgtcaatatttttgatgccattgctgaaattggaaatcagctttacctctttaaggatggaaaatattggcggttctccgagggtagggggagccgccctcagggaccattcttgatagccgataagtggcctgccctcccgaggaaacttgactctgtgttcgaagagaggttgagcaagaagctgttctttttttccggccgtcaggtttgggtctacaccggcgcttcagtcctgggcccacgtcggcttgacaaactgggattaggggcagacgtggcccaagtcaccggagcgttgcgatcaggcagaggcaaaatgctgctgttctctggcagaaggttgtggcgattcgatgtgaaagcccaaatggtggacccgaggagcgctagcgaagtagacagaatgttccctggagtgcccctggatactcacgatgtgttccagtacagagagaaggcatacttttgccaagaccggttttactggagggtaagttctcgatccgagctgaaccaggtcgatcaagtcggctacgtgacatacgacattctccaatgtcccgaggactag

SEQ ID NO: 151709 - DNA, 834 bp, Artificial Sequence
  derived and/or modified sequence
atgggaggtaactccgccggagagctatgtgtctttccttttaccttcctcggtaaagagtactctaacttcgatagtgataagaagtgggggttctgcccggaccaaggttattcgctttttctcgtggccgctcacgaattcgggcacgccctgggactggaccacagtagcgttcccgaggcacttatgtaccccatgtaccgatttaccgagggcccaccactgcacaaagacgatgttaacgggatcagacatttgtatggccctcggcctgagcccgaaccaaggcccccaacaaccacaaccccgcagcctactgcgccacccactgtgtgcccaacaggcccaccaaccgttcatccccctttcctgatcgcagacaagtggcctgctcttccccgtaagctggattccgtgttcgaggaaagactgagcaagaagcttttctttttttctggtcggcaggtttgggtttacacaggtgccagcgtgttaggtccgaggagattggataagctgggactgggcgctgacgtcgcccaggtgacaggggctctcagaagcggacgcggaaagatgctgctctttagtggcagacggctgtggcgatttgatgtgaaagcccagatggtggacccgaggtctgcttctgaggtggacaggatgttccccggagtcccactggatacacacgacgtgtttcagtatcgtgaaaaggcctatttctgccaagaccgattctattggagagtaagtagcagatccgaactgaaccaggtcgaccaggtggggtacgtgacctacgatatcctacagtgcccagaggattag

SEQ ID NO: 151710 - protein, 582 aa, Artificial Sequence
  derived and/or modified sequence
MSPAPRPPRCLLLPLLTLGTALASLGSAQSSSFSPEAWLQQYGYLPPGDLRTHTQRSPQSLSAAIAAMQKFYGLQVTGKADADTMKAMRRPRCGVPDKFGAEIKANVRRKRYAIQGLKWQHNEITFCIQNYTPKVGEYATYEAIRKAFRVWESATPLRFREVPYAYIREGHEKQADIMIFFAEGFHGDSTPFDGEGGFLAHAYFPGPNIGGDTHFDSAEPWTVRNEDLNGNDIFLVAVHELGHALGLEHSSDPSAIMAPFYQWMDTENFVLPDDDRRGIQQLYGGESGFPTKMPPQPRTTSRPSVPDKPKNPTYGPNICDGNFDTVAMLRGEMFVFKERWFWRVRNNQVMDGYPMPIGQFWRGLPASINTAYERKDGKFVFFKGDKHWVFDEASLEPGYPKHIKELGRGLPTDKIDAALFWMPNGKTYFFRGNKYYRFNEELRAVDSEYPKNIKVWEGIPESPRGSFMGSDEVFTYFYKGNKYWKFNNQKLKVEPGYPKSALRDWMGCPSGGRPDEGTEEETEVIIIEVDEEGGGAVSAAAVVLPVLLLLLVLAVGLAVFFFRRHGTPRRLLYCQRSLLDKV

SEQ ID NO: 151711 - DNA, 1749 bp, Artificial Sequence
  derived and/or modified sequence
atgagccccgcccccagaccccccagatgcctgctgctgcccctgctgaccctgggcaccgccctggccagcctgggcagcgcccagagcagcagcttcagccccgaggcctggctgcagcagtacggctacctgccccccggcgacctgagaacccacacccagagaagcccccagagcctgagcgccgccatcgccgccatgcagaagttctacggcctgcaggtgaccggcaaggccgacgccgacaccatgaaggccatgagaagacccagatgcggcgtgcccgacaagttcggcgccgagatcaaggccaacgtgagaagaaagagatacgccatccagggcctgaagtggcagcacaacgagatcaccttctgcatccagaactacacccccaaggtgggcgagtacgccacctacgaggccatcagaaaggccttcagagtgtgggagagcgccacccccctgagattcagagaggtgccctacgcctacatcagagagggccacgagaagcaggccgacatcatgatcttcttcgccgagggcttccacggcgacagcacccccttcgacggcgagggcggcttcctggcccacgcctacttccccggccccaacatcggcggcgacacccacttcgacagcgccgagccctggaccgtgagaaacgaggacctgaacggcaacgacatcttcctggtggccgtgcacgagctgggccacgccctgggcctggagcacagcagcgaccccagcgccatcatggcccccttctaccagtggatggacaccgagaacttcgtgctgcccgacgacgacagaagaggcatccagcagctgtacggcggcgagagcggcttccccaccaagatgcccccccagcccagaaccaccagcagacccagcgtgcccgacaagcccaagaaccccacctacggccccaacatctgcgacggcaacttcgacaccgtggccatgctgagaggcgagatgttcgtgttcaaggagagatggttctggagagtgagaaacaaccaggtgatggacggctaccccatgcccatcggccagttctggagaggcctgcccgccagcatcaacaccgcctacgagagaaaggacggcaagttcgtgttcttcaagggcgacaagcactgggtgttcgacgaggccagcctggagcccggctaccccaagcacatcaaggagctgggcagaggcctgcccaccgacaagatcgacgccgccctgttctggatgcccaacggcaagacctacttcttcagaggcaacaagtactacagattcaacgaggagctgagagccgtggacagcgagtaccccaagaacatcaaggtgtgggagggcatccccgagagccccagaggcagcttcatgggcagcgacgaggtgttcacctacttctacaagggcaacaagtactggaagttcaacaaccagaagctgaaggtggagcccggctaccccaagagcgccctgagagactggatgggctgccccagcggcggcagacccgacgagggcaccgaggaggagaccgaggtgatcatcatcgaggtggacgaggagggcggcggcgccgtgagcgccgccgccgtggtgctgcccgtgctgctgctgctgctggtgctggccgtgggcctggccgtgttcttcttcagaagacacggcacccccagaagactgctgtactgccagagaagcctgctggacaaggtgtag

SEQ ID NO: 151712 - DNA, 1749 bp, Artificial Sequence
  derived and/or modified sequence
atgtcgcccgccccaagaccaccccgctgtttacttctgcctctgcttactttgggaaccgccctggcctctcttggatcggcgcagtcaagttccttctctcccgaagcttggctgcaacagtatggatacttaccacccggagaccttagaacacacactcaacggagtccacaaagcctgagcgcagccattgccgcaatgcagaagttctatggcctgcaggtgacgggcaaggctgatgctgataccatgaaagctatgaggcgccctaggtgtggcgttcccgataagtttggagcagagattaaggcgaatgtgcgccggaagcgatatgcgatccaaggcttaaagtggcagcacaatgaaattacgttctgtattcagaattatactcctaaggttggggagtatgccacttatgaggccatccgtaaagcctttcgggtctgggagtcggccacccccctgaggttccgagaggtcccgtacgcctacatcagggaaggtcacgagaaacaagccgatattatgatattctttgctgagggcttccacggagattcgacaccctttgacggggagggagggttcttagcgcatgcttactttcccggccccaacatcggcggggatacccacttcgattctgccgaaccttggaccgtgagaaacgaggatctcaatgggaacgacatctttcttgtggcggttcatgagttggggcacgctctgggactggagcactcctctgatccgagcgccatcatggcaccgttttaccaatggatggatactgaaaattttgtgttgcctgatgatgacagacggggtattcagcagttgtacggtggagaatctggttttcccaccaagatgcccccccaaccccgtactacctcgcgccccagcgtccctgacaaaccaaaaaatccgacctacggaccaaacatttgcgatggcaattttgataccgtagctatgttgcggggcgagatgttcgtcttcaaagagagatggttctggagagtcagaaacaaccaagtgatggatggctacccgatgcccatcggccagttctggcgggggctcccggcgtccattaacacagcgtatgagaggaaagatggtaaattcgtgttttttaaaggcgacaaacattgggtgttcgacgaagcaagtctggagcccggctaccctaagcacatcaaggaactggggcgaggcctcccgacagataagatagatgccgccctgttttggatgcctaatgggaagacgtacttcttccgcggcaataaatactacaggtttaatgaggaactgcgggcagtggattcagagtatcccaaaaatatcaaggtctgggaaggcatccccgaatctccacgcggctcattcatgggctcagacgaggtcttcacttatttttacaaggggaacaagtactggaagttcaacaaccaaaagttgaaggtcgagccgggatatcctaaatctgccctccgggattggatggggtgccccagcggtggccggccagatgaggggaccgaggaggaaaccgaggttataattatagaggtggacgaagaaggaggtggggctgtgtcagcagccgccgtggtgcttcccgttctccttctgctgctggtgctcgccgttggacttgctgtgtttttcttccgcaggcacggaacgcctagacgcctcttgtactgccagcgaagtctgctcgataaagtgtag

SEQ ID NO: 151713 - DNA, 1749 bp, Artificial Sequence
  derived and/or modified sequence
atgagccctgcccccaggcctccccgctgcctgctgctgcccctgctgaccctgggcacagccctggccagcctgggcagcgcccagagcagcagcttcagccctgaggcctggctgcagcagtatggctacctgcccccaggggacctgcggacccacacccagaggagcccccagagcctgtctgctgccatcgccgccatgcagaagttctacggcctgcaggtgacaggcaaggcagatgctgacaccatgaaggccatgagaagaccccgctgtggggtgcctgacaagtttggagctgagatcaaggccaacgtgcggaggaagagatatgccatccagggcctgaagtggcagcacaatgagatcaccttctgcatccagaactacacccccaaggtgggggagtatgccacctatgaggccatcaggaaggccttccgggtgtgggagagcgccacccccctgcgcttccgggaggtgccctatgcctacatccgggagggccacgagaagcaggccgacatcatgatcttctttgctgagggcttccacggggacagcaccccatttgatggagagggcggcttcctggcccacgcctacttccctggccccaacattggaggagacacccactttgattctgctgagccctggacagtgagaaatgaagacctgaatggaaatgacatcttcctggtggccgtgcatgagctgggccacgccctgggcctggagcacagcagtgaccccagcgccatcatggcccccttctaccagtggatggacacagaaaattttgtgctgcctgatgatgaccggcggggcatccagcagctgtatggaggagagagcggcttccccaccaagatgccaccccagcccaggaccaccagccggcccagcgtgcctgacaagcccaagaaccccacctacggccccaacatctgtgatggcaactttgacacagtggccatgctgcggggggagatgtttgtgttcaaggagcgctggttctggagggtgaggaacaaccaggtgatggatggctaccccatgcccatcggccagttctggaggggcctgcctgccagcatcaacacagcctatgaaaggaaggatggcaagtttgtgttcttcaagggggacaagcactgggtgtttgatgaggccagcctggagcccggctaccccaagcacatcaaggagctgggccggggcctgcccacagacaagattgatgctgccctcttctggatgcccaacgggaagacctacttcttccggggcaacaagtactaccgcttcaatgaggagctgcgggctgtggacagcgagtaccccaagaacatcaaggtgtgggagggcatccctgagagcccccggggcagcttcatgggcagtgatgaggtgttcacctacttctacaagggcaacaagtactggaagttcaacaaccagaagctgaaggtggagcccggctaccccaagagcgccctgcgggactggatgggctgccccagcggcggccgcccagatgagggcacagaggaggagacagaggtgatcatcatcgaggtggatgaggagggcggcggcgctgtgtctgctgctgctgtggtgctgcctgtgctgctgctgctgctggtgctggccgtgggcctggccgtgttcttcttcagaagacatggcaccccccggcggctgctgtactgccagaggagcctgctggacaaggtgtag

SEQ ID NO: 151714 - DNA, 3732 bp, Artificial Sequence
  derived and/or modified sequence
accagaggagagagcgagagagggaaccagaccccagttcgccgactaagcagaagaaagatcaaaaaccggaaaagaggagaagagcaaacaggcactttgaggaacaatcccctttaactccaagccgacagcggtctaggaattcaagttcagtgcctaccgaagacaaaggcgccccgagggagtggcggtgcgaccccagggcgtgggcccggccgcggagcccacactgcccggctgacccggtggtctcggaccatgtctcccgccccaagacccccccgttgtctcctgctccccctgctcacgctcggcaccgcgctcgcctccctcggctcggcccaaagcagcagcttcagccccgaagcctggctacagcaatatggctacctgcctcccggggacctacgtacccacacacagcgctcaccccagtcactctcagcggccatcgctgccatgcagaagttttacggcttgcaagtaacaggcaaagctgatgcagacaccatgaaggccatgaggcgcccccgatgtggtgttccagacaagtttggggctgagatcaaggccaatgttcgaaggaagcgctacgccatccagggtctcaaatggcaacataatgaaatcactttctgcatccagaattacacccccaaggtgggcgagtatgccacatacgaggccattcgcaaggcgttccgcgtgtgggagagtgccacaccactgcgcttccgcgaggtgccctatgcctacatccgtgagggccatgagaagcaggccgacatcatgatcttctttgccgagggcttccatggcgacagcacgcccttcgatggtgagggcggcttcctggcccatgcctacttcccaggccccaacattggaggagacacccactttgactctgccgagccttggactgtcaggaatgaggatctgaatggaaatgacatcttcctggtggctgtgcacgagctgggccatgccctggggctcgagcattccagtgacccctcggccatcatggcacccttttaccagtggatggacacggagaattttgtgctgcccgatgatgaccgccggggcatccagcaactttatgggggtgagtcagggttccccaccaagatgccccctcaacccaggactacctcccggccttctgttcctgataaacccaaaaaccccacctatgggcccaacatctgtgacgggaactttgacaccgtggccatgctccgaggggagatgtttgtcttcaaggagcgctggttctggcgggtgaggaataaccaagtgatggatggatacccaatgcccattggccagttctggcggggcctgcctgcgtccatcaacactgcctacgagaggaaggatggcaaattcgtcttcttcaaaggagacaagcattgggtgtttgatgaggcgtccctggaacctggctaccccaagcacattaaggagctgggccgagggctgcctaccgacaagattgatgctgctctcttctggatgcccaatggaaagacctacttcttccgtggaaacaagtactaccgtttcaacgaagagctcagggcagtggatagcgagtaccccaagaacatcaaagtctgggaagggatccctgagtctcccagagggtcattcatgggcagcgatgaagtcttcacttacttctacaaggggaacaaatactggaaattcaacaaccagaagctgaaggtagaaccgggctaccccaagtcagccctgagggactggatgggctgcccatcgggaggccggccggatgaggggactgaggaggagacggaggtgatcatcattgaggtggacgaggagggcggcggggcggtgagcgcggctgccgtggtgctgcccgtgctgctgctgctcctggtgctggcggtgggccttgcagtcttcttcttcagacgccatgggacccccaggcgactgctctactgccagcgttccctgctggacaaggtctgacgcccaccgccggcccgcccactcctaccacaaggactttgcctctgaaggccagtggcagcaggtggtggtgggtgggctgttcccatcgtcccgagccccctccccgcagcctccttgcttctctctgtcccctggctggcctccttcaccctgaccgcctccctccctcctgccccggcattgcatcttccctagataggtcccctgagggctgagtgggagggcggccctttccagcctctgcccctcaggggaaccctgtagctttgtgtctgtccagccccatctgaatgtgttgggggctctgcacttgaaggcaggaccctcagacctcgctggtaaaggtcaaatggggtcatctgctccttttccatcccctgacataccttaacctctgaactctgacctcaggaggctctgggcactccagccctgaaagccccaggtgtacccaattggcagcctctcactactctttctggctaaaaggaatctaatcttgttgagggtagagaccctgagacagtgtgagggggtggggactgccaagccaccctaagaccttgggaggaaaactcagagagggtcttcgttgctcagtcagtcaagttcctcggagatctgcctctgcctcacctaccccagggaacttccaaggaaggagcctgagccactggggactaagtgggcagaagaaacccttggcagccctgtgcctctcgaatgttagccttggatggggctttcacagttagaagagctgaaaccaggggtgcagctgtcaggtagggtggggccggtgggagaggcccgggtcagagccctgggggtgagcctgaaggccacagagaaagaaccttgcccaaactcaggcagctggggctgaggcccaaaggcagaacagccagagggggcaggaggggaccaaaaaggaaaatgaggacgtgcagcagcattggaaggctggggccgggcaggccaggccaagccaagcagggggccacagggtgggctgtggagctctcaggaagggccctgaggaaggcacacttgctcctgttggtccctgtccttgctgcccaggcagcgtggaggggaagggtagggcagccagagaaaggagcagagaaggcacacaaacgaggaatgaggggcttcacgagaggccacagggcctggctggccacgctgtcccggcctgctcaccatctcagtgaggggcaggagctggggctcgcttaggctgggtccacgcttccctggtgccagcacccctcaagcctgtctcaccagtggcctgccctctcgctcccccacccagcccacccattgaagtctccttgggccaccaaaggtggtggccatggtaccggggacttgggagagtgagacccagtggagggagcaagaggagagggatgtcgggggggtggggcacggggtaggggaaatggggtgaacggtgctggcagttcggctagatttctgtcttgtttgtttttttgttttgtttaatgtatatttttattataattattatatatgaattccattcaaatcgttcctttttgttaacaaggggcatggggaggggtgggggtgggggggcagaggcgtctgaccccaggaacctgcagggcggggctgggtcggtgccctctaaggacaattttgaccttgttcaacctttccacaaagaataaattgtgtttcacattc

SEQ ID NO: 151715 - DNA, 1749 bp, Artificial Sequence
  derived and/or modified sequence
atgagccccgccccccggcccccccggtgcctgctgctgcccctgctcacccttgggaccgccttagccagccttggcagcgctcagtcatcgtccttttcccctgaggcatggctacagcagtatggctacctcccgcccggcgatttacggacacatacccagcgtagtccccaaagcttgtcagcagcaatcgccgcaatgcagaaattctatggattacaggtcaccggaaaagcggatgcggatacaatgaaggcaatgcgtcggccccgctgtggggtcccagataaatttggggctgagatcaaagcaaatgtccggagaaaacgttatgctattcagggcttaaaatggcagcataacgaaataacattctgtatccaaaactacaccccaaaggtgggagagtacgcaacttacgaagctattaggaaggcattccgcgtttgggaatccgccacaccattgagatttagggaagtgccatacgcctatattagggagggacatgaaaagcaagccgatattatgatattttttgctgaagggttccacggcgatagtacacctttcgatggggagggcggtttcctggcccatgcctacttccctggtccaaatattgggggagatacacatttcgacagcgcggagccctggactgtacggaacgaagacctgaacggaaacgatattttccttgtggccgtccatgagcttgggcatgccctggggctcgaacattccagcgatcctagtgcaattatggcccccttctatcagtggatggatacagaaaactttgtgctgcctgacgacgatcggagggggattcaacagttgtatgggggggagtctgggttccccaccaaaatgcctccacagcctcggaccacctccaggcccagtgttcctgacaagcccaagaatcctacttacgggccgaatatttgcgacggcaatttcgataccgtcgctatgctgaggggtgagatgtttgtattcaaggagcgctggttttggagggttcgcaacaaccaagtcatggatgggtatcccatgccgattgggcagttctggagggggctaccggcatccattaacacagcgtatgaaaggaaagatgggaagttcgtttttttcaaaggagacaaacactgggtctttgatgaggcctccctggaacccggataccctaagcacattaaggagctcggacgcggcttgcctacagacaaaatcgacgccgccctattctggatgccaaacggaaagacctacttttttaggggcaataaatactaccggttcaatgaggagttgagagctgtggacagcgagtacccaaaaaacataaaggtctgggaagggatccccgaaagccctcgcgggagcttcatgggcagcgatgaagtcttcacatatttctacaagggcaacaagtattggaagtttaataatcagaagctgaaggtcgagcccgggtatcccaaatctgccctaagagactggatgggctgcccctctggcgggcggccagacgaaggcactgaggaagaaactgaagtcatcattattgaagtggacgaggagggcggcggcgccgtctccgcagctgcagtcgtcctccctgtgcttctgcttctgctcgttctggccgtgggcctggctgtcttcttctttagaaggcacggcacccctcggaggctgctgtattgtcagcgctctctactggataaggtgtag

SEQ ID NO: 151716 - DNA, 1749 bp, Artificial Sequence
  derived and/or modified sequence
atgagtccggctccgaggccaccaaggtgcctcttgctgccactcttgaccctggggactgcgctcgcttccctaggatccgcccagtcatcttcattctcccccgaggcatggcttcagcagtatggataccttccacctggagacctccggacgcatacacagaggtcgccccaaagtctttccgctgcaatcgctgccatgcagaaattctacggcctccaggtgaccggtaaggctgacgctgacactatgaaagccatgaggcggcctaggtgtggtgtgcccgataagttcggcgcagagataaaagcaaatgttaggagaaaaagatacgccattcaaggcttaaagtggcaacataatgagatcactttctgtatccagaactatacacctaaggttggcgaatatgccacttatgaggcgatccggaaagctttccgcgtatgggagagtgccactcctctcaggtttcgagaggtgccctatgcttacattagagaagggcatgaaaagcaagctgacatcatgatttttttcgctgaaggcttccatggcgactccactcccttcgacggcgagggtgggtttctggctcatgcatatttccctggtccgaatattggcggagacactcatttcgactccgcagaaccctggaccgtgaggaacgaagatcttaatggcaacgacatcttcctggtagccgtgcatgagcttggccacgccctgggcctcgagcattcgtccgatccttctgctattatggccccattctatcagtggatggacacggagaatttcgtgctgccggacgacgaccggaggggaatccagcagttgtatggcggagagagtggttttcccaccaagatgcctccccagcctagaaccactagcagaccaagcgtgcccgacaagccaaagaatcccacatatggccctaatatttgcgacggcaacttcgacactgtggcaatgctccggggagaaatgtttgtgtttaaggagcggtggttctggcgcgtcaggaataaccaggtcatggacggctaccctatgccaatcggacagttctggcggggactgcccgcttccattaatacagcctacgagagaaaggatggcaaatttgtgtttttcaaaggagataaacattgggtcttcgacgaggcttccttggaacctgggtatccaaaacacatcaaagaactgggcagaggtctccccactgataaaatcgacgctgccctgttttggatgccaaatggaaagacttatttcttcagggggaataaatactacaggttcaatgaggagctgcgtgccgtcgatagcgaatacccgaagaatatcaaggtgtgggaaggaattccagaatccccacgaggaagctttatgggctctgacgaggtgtttacctacttttacaagggaaataagtattggaagtttaataatcagaaactaaaagttgaaccgggttatccgaagtcagctctacgggactggatggggtgcccatctggcggaaggcctgatgagggcacagaagaagagacggaggtcataatcattgaagtggatgaagagggtggcggtgcggtgagcgccgctgcagtggtgcttcctgtgctcctcctgttattagtgcttgctgtcggcctcgccgtctttttcttcaggcgccacgggactcctagaagactactctattgccaaaggtccctgctagataaggtgtag

SEQ ID NO: 151717 - protein, 1466 aa, Artificial Sequence
  derived and/or modified sequence
MALRGFCSADGSDPLWDWNVTWNTSNPDFTKCFQNTVLVWVPCFYLWACFPFYFLYLSRHDRGYIQMTPLNKTKTALGFLLWIVCWADLFYSFWERSRGIFLAPVFLVSPTLLGITMLLATFLIQLERRKGVQSSGIMLTFWLVALVCALAILRSKIMTALKEDAQVDLFRDITFYVYFSLLLIQLVLSCFSDRSPLFSETIHDPNPCPESSASFLSRITFWWITGLIVRGYRQPLEGSDLWSLNKEDTSEQVVPVLVKNWKKECAKTRKQPVKVVYSSKDPAQPKESSKVDANEEVEALIVKSPQKEWNPSLFKVLYKTFGPYFLMSFFFKAIHDLMMFSGPQILKLLIKFVNDTKAPDWQGYFYTVLLFVTACLQTLVLHQYFHICFVSGMRIKTAVIGAVYRKALVITNSARKSSTVGEIVNLMSVDAQRFMDLATYINMIWSAPLQVILALYLLWLNLGPSVLAGVAVMVLMVPVNAVMAMKTKTYQVAHMKSKDNRIKLMNEILNGIKVLKLYAWELAFKDKVLAIRQEELKVLKKSAYLSAVGTFTWVCTPFLVALCTFAVYVTIDENNILDAQTAFVSLALFNILRFPLNILPMVISSIVQASVSLKRLRIFLSHEELEPDSIERRPVKDGGGTNSITVRNATFTWARSDPPTLNGITFSIPEGALVAVVGQVGCGKSSLLSALLAEMDKVEGHVAIKGSVAYVPQQAWIQNDSLRENILFGCQLEEPYYRSVIQACALLPDLEILPSGDRTEIGEKGVNLSGGQKQRVSLARAVYSNADIYLFDDPLSAVDAHVGKHIFENVIGPKGMLKNKTRILVTHSMSYLPQVDVIIVMSGGKISEMGSYQELLARDGAFAEFLRTYASTEQEQDAEENGVTGVSGPGKEAKQMENGMLVTDSAGKQLQRQLSSSSSYSGDISRHHNSTAELQKAEAKKEETWKLMEADKAQTGQVKLSVYWDYMKAIGLFISFLSIFLFMCNHVSALASNYWLSLWTDDPIVNGTQEHTKVRLSVYGALGISQGIAVFGYSMAVSIGGILASRCLHVDLLHSILRSPMSFFERTPSGNLVNRFSKELDTVDSMIPEVIKMFMGSLFNVIGACIVILLATPIAAIIIPPLGLIYFFVQRFYVASSRQLKRLESVSRSPVYSHFNETLLGVSVIRAFEEQERFIHQSDLKVDENQKAYYPSIVANRWLAVRLECVGNCIVLFAALFAVISRHSLSAGLVGLSVSYSLQVTTYLNWLVRMSSEMETNIVAVERLKEYSETEKEAPWQIQETAPPSSWPQVGRVEFRNYCLRYREDLDFVLRHINVTINGGEKVGIVGRTGAGKSSLTLGLFRINESAEGEIIIDGINIAKIGLHDLRFKITIIPQDPVLFSGSLRMNLDPFSQYSDEEVWTSLELAHLKDFVSALPDKLDHECAEGGENLRVIVLDKGEIQEYGAPSDLLQQRGLFYSMAKDAGLV

SEQ ID NO: 151718 - protein, 1475 aa, Artificial Sequence
  derived and/or modified sequence
MALRGFCSADGSDPLWDWNVTWNTSNPDFTKCFQNTVLVWVPCFYLWACFPFYFLYLSRHDRGYIQMTPLNKTKTALGFLLWIVCWADLFYSFWERSRGIFLAPVFLVSPTLLGITMLLATFLIQLERRKGVQSSGIMLTFWLVALVCALAILRSKIMTALKEDAQVDLFRDITFYVYFSLLLIQLVLSCFSDRSPLFSETIHDPNPCPESSASFLSRITFWWITGLIVRGYRQPLEGSDLWSLNKEDTSEQVVPVLVKNWKKECAKTRKQPVKVVYSSKDPAQPKESSKVDANEEVEALIVKSPQKEWNPSLFKVLYKTFGPYFLMSFFFKAIHDLMMFSGPQILKLLIKFVNDTKAPDWQGYFYTVLLFVTACLQTLVLHQYFHICFVSGMRIKTAVIGAVYRKALVITNSARKSSTVGEIVNLMSVDAQRFMDLATYINMIWSAPLQVILALYLLWLNLGPSVLAGVAVMVLMVPVNAVMAMKTKTYQVAHMKSKDNRIKLMNEILNGIKVLKLYAWELAFKDKVLAIRQEELKVLKKSAYLSAVGTFTWVCTPFLVALCTFAVYVTIDENNILDAQTAFVSLALFNILRFPLNILPMVISSIVQASVSLKRLRIFLSHEELEPDSIERRPVKDGGGTNSITVRNATFTWARSDPPTLNGITFSIPEGALVAVVGQVGCGKSSLLSALLAEMDKVEGHVAIKGSVAYVPQQAWIQNDSLRENILFGCQLEEPYYRSVIQACALLPDLEILPSGDRTEIGEKTRILVTHSMSYLPQVDVIIVMSGGKISEMGSYQELLARDGAFAEFLRTYASTEQEQDAEENGVTGVSGPGKEAKQMENGMLVTDSAGKQLQRQLSSSSSYSGDISRHHNSTAELQKAEAKKEETWKLMEADKAQTGQVKLSVYWDYMKAIGLFISFLSIFLFMCNHVSALASNYWLSLWTDDPIVNGTQEHTKVRLSVYGALGISQGIAVFGYSMAVSIGGILASRCLHVDLLHSILRSPMSFFERTPSGNLVNRFSKELDTVDSMIPEVIKMFMGSLFNVIGACIVILLATPIAAIIIPPLGLIYFFVQRFYVASSRQLKRLESVSRSPVYSHFNETLLGVSVIRAFEEQERFIHQSDLKVDENQKAYYPSIVANRWLAVRLECVGNCIVLFAALFAVISRHSLSAGLVGLSVSYSLQVTTYLNWLVRMSSEMETNIVAVERLKEYSETEKEAPWQIQETAPPSSWPQVGRVEFRNYCLRYREDLDFVLRHINVTINGGEKVGIVGRTGAGKSSLTLGLFRINESAEGEIIIDGINIAKIGLHDLRFKITIIPQDPVLFSGSLRMNLDPFSQYSDEEVWTSLELAHLKDFVSALPDKLDHECAEGGENLSVGQRQLVCLARALLRKTKILVLDEATAAVDLETDDLIQSTIRTQFEDCTVLTIAHRLNTIMDYTRVIVLDKGEIQEYGAPSDLLQQRGLFYSMAKDAGLV

SEQ ID NO: 151719 - protein, 1472 aa, Artificial Sequence
  derived and/or modified sequence
MALRGFCSADGSDPLWDWNVTWNTSNPDFTKCFQNTVLVWVPCFYLWACFPFYFLYLSRHDRGYIQMTPLNKTKTALGFLLWIVCWADLFYSFWERSRGIFLAPVFLVSPTLLGITMLLATFLIQLERRKGVQSSGIMLTFWLVALVCALAILRSKIMTALKEDAQVDLFRDITFYVYFSLLLIQLVLSCFSDRSPLFSETIHDPNPCPESSASFLSRITFWWITGLIVRGYRQPLEGSDLWSLNKEDTSEQVVPVLVKNWKKECAKTRKQPVKVVYSSKDPAQPKESSKVDANEEVEALIVKSPQKEWNPSLFKVLYKTFGPYFLMSFFFKAIHDLMMFSGPQILKLLIKFVNDTKAPDWQGYFYTVLLFVTACLQTLVLHQYFHICFVSGMRIKTAVIGAVYRKALVITNSARKSSTVGEIVNLMSVDAQRFMDLATYINMIWSAPLQVILALYLLWLNLGPSVLAGVAVMVLMVPVNAVMAMKTKTYQVAHMKSKDNRIKLMNEILNGIKVLKLYAWELAFKDKVLAIRQEELKVLKKSAYLSAVGTFTWVCTPFLVALCTFAVYVTIDENNILDAQTAFVSLALFNILRFPLNILPMVISSIVQASVSLKRLRIFLSHEELEPDSIERRPVKDGGGTNSITVRNATFTWARSDPPTLNGITFSIPEGALVAVVGQVGCGKSSLLSALLAEMDKVEGHVAIKGVNLSGGQKQRVSLARAVYSNADIYLFDDPLSAVDAHVGKHIFENVIGPKGMLKNKTRILVTHSMSYLPQVDVIIVMSGGKISEMGSYQELLARDGAFAEFLRTYASTEQEQDAEENGVTGVSGPGKEAKQMENGMLVTDSAGKQLQRQLSSSSSYSGDISRHHNSTAELQKAEAKKEETWKLMEADKAQTGQVKLSVYWDYMKAIGLFISFLSIFLFMCNHVSALASNYWLSLWTDDPIVNGTQEHTKVRLSVYGALGISQGIAVFGYSMAVSIGGILASRCLHVDLLHSILRSPMSFFERTPSGNLVNRFSKELDTVDSMIPEVIKMFMGSLFNVIGACIVILLATPIAAIIIPPLGLIYFFVQRFYVASSRQLKRLESVSRSPVYSHFNETLLGVSVIRAFEEQERFIHQSDLKVDENQKAYYPSIVANRWLAVRLECVGNCIVLFAALFAVISRHSLSAGLVGLSVSYSLQVTTYLNWLVRMSSEMETNIVAVERLKEYSETEKEAPWQIQETAPPSSWPQVGRVEFRNYCLRYREDLDFVLRHINVTINGGEKVGIVGRTGAGKSSLTLGLFRINESAEGEIIIDGINIAKIGLHDLRFKITIIPQDPVLFSGSLRMNLDPFSQYSDEEVWTSLELAHLKDFVSALPDKLDHECAEGGENLSVGQRQLVCLARALLRKTKILVLDEATAAVDLETDDLIQSTIRTQFEDCTVLTIAHRLNTIMDYTRVIVLDKGEIQEYGAPSDLLQQRGLFYSMAKDAGLV

SEQ ID NO: 151720 - protein, 1541 aa, Artificial Sequence
  derived and/or modified sequence
MALRGFCSADGSDPLWDWNVTWNTSNPDFTKCFQNTVLVWVPCFYLWACFPFYFLYLSRHDRGYIQMTPLNKTKTALGFLLWIVCWADLFYSFWERSRGIFLAPVFLVSPTLLGITMLLATFLIQLERRKGVQSSGIMLTFWLVALVCALAILRSKIMTALKEDAQVDLFRDITFYVYFSLLLIQLVLSCFSDRSPLFSETIHDPNPCPESSASFLSRITFWWITGLIVRGYRQPLEGSDLWSLNKEDTSEQVVPVLVKNWKKECAKTRKQPVKVVYSSKDPAQPKESSKVDANEEVEALIVKSPQKEWNPSLFKVLYKTFGPYFLMSFFFKAIHDLMMFSGPQILKLLIKFVNDTKAPDWQGYFYTVLLFVTACLQTLVLHQYFHICFVSGMRIKTAVIGAVYRKALVITNSARKSSTVGEIVNLMSVDAQRFMDLATYINMIWSAPLQVILALYLLWLNLGPSVLAGVAVMVLMVPVNAVMAMKTKTYQVAHMKSKDNRIKLMNEILNGIKVLKLYAWELAFKDKVLAIRQEELKVLKKSAYLSAVGTFTWVCTPFLVALCTFAVYVTIDENNILDAQTAFVSLALFNILRFPLNILPMVISSIVQASVSLKRLRIFLSHEELEPDSIERRPVKDGGGTNSITVRNATFTWARSDPPTLNGITFSIPEGALVAVVGQVGCGKSSLLSALLAEMDKVEGHVAIKGSVAYVPQQAWIQNDSLRENILFGCQLEEPYYRSVIQACALLPDLEILPSGDRTEIGEKGVNLSGGQKQRVSLARAVYSNADIYLFDDPLSAVDAHVGKHIFENVIGPKGMLKNKTRILVTHSMSYLPQVDVIIVMSGGKISEMGSYQELLARDGAFAEFLRTYASTEQEQDAEENGSTVMDEEEAGVTGVSGPGKEAKQMENGMLVTDSAGKQLQRQLSSSSSYSGDISRHHNSTAELQKAEAKKEETWKLMEADKAQTGQVKLSVYWDYMKAIGLFISFLSIFLFMCNHVSALASNYWLSLWTDDPIVNGTQEHTKVRLSVYGALGISQGIAVFGYSMAVSIGGILASRCLHVDLLHSILRSPMSFFERTPSGNLVNRFSKELDTVDSMIPEVIKMFMGSLFNVIGACIVILLATPIAAIIIPPLGLIYFFVQRFYVASSRQLKRLESVSRSPVYSHFNETLLGVSVIRAFEEQERFIHQSDLKVDENQKAYYPSIVANRWLAVRLECVGNCIVLFAALFAVISRHSLSAGLVGLSVSYSLQVTTYLNWLVRMSSEMETNIVAVERLKEYSETEKEAPWQIQETAPPSSWPQVGRVEFRNYCLRYREDLDFVLRHINVTINGGEKVGIVGRTGAGKSSLTLGLFRINESAEGEIIIDGINIAKIGLHDLRFKITIIPQDPVLFSGSLRMNLDPFSQYSDEEVWTSLELAHLKDFVSALPDKLDHECAEGGENLSVGQRQLVCLARALLRKTKILVLDEATAAVDLETDDLIQSTIRTQFEDCTVLTIAHRLNTIMDYTRVIVLDKGEIQEYGAPSDLLQQRGLFYSMAKDAGLV

SEQ ID NO: 151721 - protein, 1531 aa, Artificial Sequence
  derived and/or modified sequence
MALRGFCSADGSDPLWDWNVTWNTSNPDFTKCFQNTVLVWVPCFYLWACFPFYFLYLSRHDRGYIQMTPLNKTKTALGFLLWIVCWADLFYSFWERSRGIFLAPVFLVSPTLLGITMLLATFLIQLERRKGVQSSGIMLTFWLVALVCALAILRSKIMTALKEDAQVDLFRDITFYVYFSLLLIQLVLSCFSDRSPLFSETIHDPNPCPESSASFLSRITFWWITGLIVRGYRQPLEGSDLWSLNKEDTSEQVVPVLVKNWKKECAKTRKQPVKVVYSSKDPAQPKESSKVDANEEVEALIVKSPQKEWNPSLFKVLYKTFGPYFLMSFFFKAIHDLMMFSGPQILKLLIKFVNDTKAPDWQGYFYTVLLFVTACLQTLVLHQYFHICFVSGMRIKTAVIGAVYRKALVITNSARKSSTVGEIVNLMSVDAQRFMDLATYINMIWSAPLQVILALYLLWLNLGPSVLAGVAVMVLMVPVNAVMAMKTKTYQVAHMKSKDNRIKLMNEILNGIKVLKLYAWELAFKDKVLAIRQEELKVLKKSAYLSAVGTFTWVCTPFLVALCTFAVYVTIDENNILDAQTAFVSLALFNILRFPLNILPMVISSIVQASVSLKRLRIFLSHEELEPDSIERRPVKDGGGTNSITVRNATFTWARSDPPTLNGITFSIPEGALVAVVGQVGCGKSSLLSALLAEMDKVEGHVAIKGSVAYVPQQAWIQNDSLRENILFGCQLEEPYYRSVIQACALLPDLEILPSGDRTEIGEKGVNLSGGQKQRVSLARAVYSNADIYLFDDPLSAVDAHVGKHIFENVIGPKGMLKNKTRILVTHSMSYLPQVDVIIVMSGGKISEMGSYQELLARDGAFAEFLRTYASTEQEQDAEENGVTGVSGPGKEAKQMENGMLVTDSAGKQLQRQLSSSSSYSGDISRHHNSTAELQKAEAKKEETWKLMEADKAQTGQVKLSVYWDYMKAIGLFISFLSIFLFMCNHVSALASNYWLSLWTDDPIVNGTQEHTKVRLSVYGALGISQGIAVFGYSMAVSIGGILASRCLHVDLLHSILRSPMSFFERTPSGNLVNRFSKELDTVDSMIPEVIKMFMGSLFNVIGACIVILLATPIAAIIIPPLGLIYFFVQRFYVASSRQLKRLESVSRSPVYSHFNETLLGVSVIRAFEEQERFIHQSDLKVDENQKAYYPSIVANRWLAVRLECVGNCIVLFAALFAVISRHSLSAGLVGLSVSYSLQVTTYLNWLVRMSSEMETNIVAVERLKEYSETEKEAPWQIQETAPPSSWPQVGRVEFRNYCLRYREDLDFVLRHINVTINGGEKVGIVGRTGAGKSSLTLGLFRINESAEGEIIIDGINIAKIGLHDLRFKITIIPQDPVLFSGSLRMNLDPFSQYSDEEVWTSLELAHLKDFVSALPDKLDHECAEGGENLSVGQRQLVCLARALLRKTKILVLDEATAAVDLETDDLIQSTIRTQFEDCTVLTIAHRLNTIMDYTRVIVLDKGEIQEYGAPSDLLQQRGLFYSMAKDAGLV

SEQ ID NO: 151722 - DNA, 4401 bp, Artificial Sequence
  derived and/or modified sequence
atggccctgagggggttctgcagcgccgacggatcagatcccctgtgggactggaacgtcacatggaatacatccaaccctgacttcacgaaatgttttcagaatactgttctagtgtgggtgccgtgcttctacctgtgggcctgttttccattttactttttgtacctgtctcgtcacgacagggggtatattcagatgacacccttgaacaaaactaagacagccttgggcttcctcctctggattgtctgttgggctgacctgttttactccttttgggagcgttcacgtggtatttttctggcaccggtgtttctcgtttctccaaccctgttagggatcaccatgcttttggcgaccttcctgatacagctcgagcggcggaagggcgtacagtctagcggtatcatgttgactttctggctggtagcacttgtgtgcgccctggcaattctacggtcaaagatcatgactgcacttaaggaggatgcccaggtagacctgtttagagatataacgttctatgtttatttttctctcctgctgatccagttggttctcagctgtttctcagatagatcccctctcttttcagagaccatccatgatcctaacccctgccctgaaagctctgcgtcttttctgtccaggattaccttttggtggataactggcctgatcgtgaggggttatcgccagcccctggaaggatccgatttgtggtcattgaacaaggaggacacttccgagcaggtcgtgcctgtcctggtcaagaactggaaaaaggagtgtgcaaagactcgcaagcagccagttaaggtcgtgtacagtagcaaggacccagcccagccaaaagaaagttcaaaggtggacgccaacgaggaggtggaggctcttatcgttaaatctcctcagaaagaatggaacccgagtctgtttaaggtcctgtataaaacttttggaccctatttcttaatgtcttttttttttaaggcaatccacgatctgatgatgttttccgggccccaaatcctgaagctgctcataaagtttgtcaatgacacgaaggcccctgattggcagggctatttctataccgtgctcttgttcgtcacggcatgcctccagaccctcgtgctccaccagtactttcatatctgctttgtatctggcatgcgtatcaagaccgctgtgatcggcgcagtctatagaaaggcccttgtgatcaccaatagcgcccggaagtcctcaaccgtgggggaaatagtgaaccttatgagtgtagatgcgcagagattcatggacctggccacatacattaatatgatctggtccgctcctctccaggtgattctagccctctacttgctgtggcttaatctgggacccagcgtgctggctggcgttgccgtcatggtattgatggtccctgtaaatgccgtgatggcaatgaaaactaaaacatatcaagtggcgcacatgaaatccaaagacaatcggatcaaacttatgaatgagatccttaatgggattaaagtactgaagctttatgcatgggagttggcctttaaggataaagttctcgcaatcagacaagaggaactgaaggtgctgaaaaaaagcgcttacctatccgctgttggaacctttacttgggtctgcactccttttctagtggctctttgtacttttgccgtgtatgtaactatcgacgaaaacaacatcctggacgcccagaccgcgttcgtgtctctcgctctattcaacatattaaggtttccactcaacattcttcccatggtgatatccagcattgtgcaagcaagcgtttccttaaagcgcttgcgtatatttttgtcacacgaggagcttgaaccagactcgatagagagacgcccagtcaaagatggcggtggaaccaatagcattacagtgcgcaatgcgacctttacctgggctagatccgacccaccaactttgaacggaatcacattttccatccccgagggagcgttagttgctgtggtcggccaggtgggatgcgggaagagtagcctgctgtccgctctcctcgcagaaatggataaagtggaagggcacgtcgctattaagggttcagtcgcatacgtgcctcagcaggcgtggatccagaacgattctctgcgagagaatattctcttcggatgtcagctggaagagccctactaccgctcagtcattcaggcgtgcgcattgcttccggatctggagattttaccgtctggggataggacggagatcggcgaaaagggtgtcaatctgtccggaggacaaaaacagcgagtttccctggcccgagccgtgtacagtaacgcagacatttatctgttcgatgacccactgagtgccgtagacgcacatgtgggcaagcatatcttcgagaatgtaattggaccaaagggcatgctgaagaacaaaactagaattttagtgactcactctatgagttacctaccccaagtggacgtcattattgtcatgtccggtggaaagatatccgagatgggatcgtatcaggaactgctggctcgggacggggccttcgctgagttcctcaggacctacgcttcaaccgaacaggaacaggatgcagaggaaaatggcgtcactggtgtcagtgggccagggaaggaggcgaagcagatggaaaacggtatgctggtgactgacagcgcaggaaaacaactccagcgtcaactctcctccagcagctcatatagtggagatatcagcagacaccataacagtacagccgagttgcagaaagccgaggccaagaaagaagaaacctggaagctaatggaagctgacaaggctcagacgggacaggtgaagctgtctgtctactgggactacatgaaagccataggactgttcatctcttttttatccatcttcctcttcatgtgtaaccacgtgtcagccctcgcttctaactattggctaagcttatggacggacgacccgatagtgaacggaacacaggagcacaccaaagtaagactttctgtgtacggagccttggggattagccaggggatagcagtgttcggctactccatggccgtgagtatcgggggaatcctggcgagccggtgccttcatgtcgacttgctgcactcaatattacgctcgcctatgtcttttttcgagaggacaccaagcggaaacttggtgaatcgcttttccaaagagctcgatacagtggactccatgatacctgaggtcataaaaatgtttatgggaagcttattcaatgtaattggagcctgtatcgtgatcttgcttgccacacccattgccgccatcataatcccaccactgggtctaatttatttctttgtccagagattttacgtggccagtagcaggcagcttaaacggctggaatctgtgtctcgatcgcctgtgtactctcatttcaatgaaactctcttaggagtgagcgtgattcgggcctttgaagagcaggagcggtttatccatcagagtgatctcaaagtggacgagaaccagaaagcatattacccctcgatcgtcgcaaatcgctggctggcggtgcgcttggaatgcgttggcaactgcattgtgcttttcgctgctctgttcgccgttatcagccgccacagtctaagcgccggcctggtggggctgagtgtgtcttactctttgcaagtgaccacctacttaaattggttagtgaggatgtccagtgagatggaaaccaacattgtcgcagtcgagcgtctgaaggagtacagcgagacagaaaaagaagcaccatggcaaattcaagaaacggctccaccgagctcttggccgcaggtgggtcgggtggagttccggaactattgccttcgataccgcgaagaccttgactttgttttgaggcacataaacgtgactattaatggcggagagaaagtgggcatcgttgggagaaccggggccggcaagtcatcgctgacactcggcctattcagaatcaacgagagcgccgaaggcgaaataattatcgatggcatcaacatagctaagattggattgcacgatctgaggtttaaaattacgatcattccccaggatcccgttttattctccggcagcctgaggatgaacctggaccctttcagtcagtacagtgacgaagaggtgtggacaagtctcgagctcgcccacctgaaggactttgtgagcgccctgcctgacaagttggaccacgaatgcgcggaaggcggtgaaaatttgagagtgattgtcctcgataaaggtgagatccaggagtacggggctccttctgacctactgcaacaaaggggcttattttattcaatggcaaaagatgccgggctggtgtag

SEQ ID NO: 151723 - DNA, 4428 bp, Artificial Sequence
  derived and/or modified sequence
atggccttgcgcggattttgtagtgcagatggctcggatcccctgtgggattggaacgttacctggaacacctcgaatcctgactttacaaaatgtttccaaaatactgtcttggtttgggtcccctgtttttacctctgggcatgttttcctttttacttcttatatctgtccagacacgataggggatacatccagatgactccattaaacaaaacaaaaacggccctggggttcctgctctggatcgtgtgctgggctgacctgttctacagcttttgggaaaggagtaggggcattttcctggcccccgtgttcttggtgtctcccactttgttgggaattactatgctgctggctacgtttctcattcaactggaacgtaggaagggggtccagtcatcgggcataatgctgactttctggcttgtggccctcgtgtgtgccctcgcaatcctccgaagcaagataatgactgcactgaaagaggatgctcaagtggacttgtttcgcgacattaccttttatgtctatttcagcctgctgttgattcaactggtcctgagctgtttttctgatagatctcctcttttctctgaaaccatccacgaccctaatccctgtcctgagtcatccgcctccttcctgtctaggattactttctggtggatcaccggactgatcgtgcgtggctatcggcagcccctagaagggtcggacctctggtctctgaacaaggaggataccagcgagcaggtcgtgcccgtccttgtcaaaaattggaagaaagagtgtgctaaaacccggaaacaacctgtgaaggtggtctactcctccaaggatcctgcccaaccgaaagagagcagtaaggtagatgcgaacgaggaagtggaggcgctaattgtgaaaagcccccagaaggagtggaaccctagcctgttcaaagtactctacaagacctttggcccatactttctaatgagttttttctttaaagccattcacgacttaatgatgtttagcggcccccagatcttaaagcttctcattaagtttgtgaacgacaccaaggcccccgactggcagggttatttttatacagtcttgctgtttgtgacagcctgcctgcagaccctggtgctgcaccagtatttccacatctgtttcgtgagtggcatgcgaatcaagacagcagtcatcggagcagtctatcgaaaagcacttgtaattacaaattctgccaggaaaagctccacggttggcgagattgtgaatctgatgtccgtggacgctcagcgttttatggatctcgccacctatattaatatgatctggagcgcgccacttcaagtcatccttgccctctacctgctttggttgaatctaggaccttctgttcttgcgggagtggctgttatggtattgatggtcccagttaatgcagtgatggctatgaagaccaagacctaccaggttgcccatatgaagagcaaagacaaccgtatcaagctaatgaacgaaattcttaatgggatcaaggtgttgaagctgtacgcctgggagctcgccttcaaggacaaggtgctggccattcggcaggaggagctcaaggtgctaaaaaagtcagcatacctgagcgccgtgggcacattcacctgggtgtgtacgccattcctcgtggccctctgtacatttgccgtatatgtaacaatcgacgaaaacaacattcttgacgcacagacggcctttgtgagtctagccctgttcaatatattaaggtttcccctgaatattctgcctatggtgatctcatccattgtgcaggcgtcagtaagcctcaaacggttgaggatatttctgtctcacgaggagctcgagccagacagtatcgaaagaaggccagtcaaggatggtggtggaacaaactctatcacggtgagaaacgctacatttacatgggccaggagcgatccgcccacactgaacggcatcacgtttagtattcccgagggagcattggtcgctgtcgtgggccaagtcgggtgcggtaagagctctctgctttctgccctactcgcagagatggataaggttgaagggcacgtggcaataaaaggatcagtggcctacgtgccacaacaggcttggatccagaacgactcccttagggaaaacattctgtttgggtgtcagcttgaggagccttattaccgttctgtgattcaggcctgtgctctgcttcctgatcttgagattttgccttcaggggacaggacggaaatcggtgagaaaacgcgcatacttgtgacacacagtatgtcttacttgcctcaggtggacgtgatcattgtcatgagtgggggcaagatctcagagatgggctcttaccaggagttgctggctagagacggcgcgttcgccgaattcttgcgtacctacgcttctactgagcaagagcaggatgccgaggaaaatggagttactggcgtgtcagggcccggcaaggaggccaaacagatggaaaatggaatgctcgtcaccgactccgccgggaagcagctgcagcgacagttgtcctcctcctcatcgtacagcggcgacattagtcgccaccacaacagtaccgccgagctgcagaaggctgaggcaaaaaaggaggagacctggaaattgatggaagcagacaaagcccagaccggccaagtaaaactgtcagtgtactgggactacatgaaggcaataggcctctttatcagctttctgtcaatctttctgtttatgtgtaatcacgttagtgcgctggctagcaattactggcttagcttgtggaccgatgaccctatagtcaatgggacacaagagcatactaaggtgcgtctgtctgtttacggcgctctgggcatctcccaaggtatcgccgtctttggatacagtatggccgtttcaattgggggcatcctggccagccgctgcttgcatgtagatttgctccattctatcctcaggagcccaatgtctttctttgagaggactccctccggcaaccttgtgaatcggtttagcaaagagctggacactgtggactccatgatacccgaggtgattaagatgttcatgggatccttgttcaacgtgattggtgcctgtattgtgatcctactggccactcccattgctgctattataatccccccgctgggactcatctattttttcgtgcagcggttttatgtggctagcagcagacagttaaagcggctggagtcggtcagtcggtctccggtgtatagtcattttaacgagacgctgctgggagtctccgtgatcagagctttcgaagagcaggagcgattcatccaccagtctgacctcaaggtcgatgaaaatcagaaggcttactacccgagtattgtagcgaatcggtggttggctgtgaggctagagtgcgtcggcaactgcattgtcctgttcgccgccttattcgccgtgattagcagacactcactgagtgcaggtctggttgggttgagcgtaagctatagcctccaagtcaccacctacctgaattggctagtgcgcatgtcaagcgaaatggaaactaacattgtcgcagttgagcgtttgaaggagtatagcgaaacagagaaggaagccccatggcagatccaggagacggctccgcctagtagctggccgcaggtaggtcgagtggagtttaggaactattgtctgcgctacagagaggatctggattttgtgctccggcacatcaacgtcactatcaacgggggggagaaagttggcatagttggacgcacaggcgctggcaagtcctcacttaccctcggtcttttccggataaatgaatctgccgaaggggaaattattatagacggtataaatattgcaaaaatcggtctccacgacttacgattcaaaataaccataatcccgcaggacccggtcttgttttctggatctctgcgcatgaatttggacccattttctcagtactccgatgaggaggtatggacgtcccttgagctggcccatctgaaggattttgtgtctgcactccctgataaattggaccatgagtgcgctgaaggtggcgagaacctgtctgttggtcagaggcagctggtatgtttggctcgggcccttctccgcaaaacgaagatcctcgtactcgacgaggccactgctgccgtcgatctcgagaccgatgaccttatccagagtaccatccgcacccagtttgaggactgtacagtgttaaccatcgcccatcgcctcaacaccattatggactacactcgtgtgatcgtactagacaaaggagaaatacaggaatatggcgccccgagcgacctgttgcagcaacgcggtcttttctatagtatggccaaggacgcgggccttgtctag

SEQ ID NO: 151724 - DNA, 4251 bp, Artificial Sequence
  derived and/or modified sequence
atggccctgcgcggcttttgttcagccgacggtagcgaccctttgtgggattggaatgtgacttggaacacaagcaacccggactttaccaaatgcttccagaatacagtcttagtctgggttccatgcttctatctatgggcttgtttccccttctatttcctctacctgtccaggcatgatcgcggatatatccagatgacaccgctcaataaaaccaaaaccgcccttggcttcttgctgtggatagtctgttgggcggacttgttctactccttttgggagaggtccagagggattttcctggctccagtgtttctggtttccccaacgctgcttggcattacgatgctcctggctacctttttaatccaactggagcgccgaaaaggcgttcagagctcaggtatcatgctgactttctggctggtggcgcttgtttgtgccttagccatactccgaagcaaaatcatgaccgccctcaaagaggacgcgcaagtggacctgtttcgcgacataaccttctacgtatatttttccctcttattgatccaattggtcttgtcatgtttctcagatcgaagcccactgttttccgagacaatccacgatcccaatccgtgtcctgagagctctgctagcttcctgagtagaataacattttggtggatcaccggccttattgtacgaggatacagacagcctctcgaaggtagcgatctctggtccctgaataaggaagatacaagcgagcaagtggtgcctgtgctcgtgaagaattggaagaaggagtgtgcaaagaccaggaaacagccagttaaggtggtgtacagcagtaaggatccagcccagcccaaagaaagctcaaaggttgacgcaaacgaggaggtcgaagcgctgattgtgaaatcgccccagaaggaatggaacccctccttgtttaaagttttatacaaaacctttggcccatacttccttatgtcgtttttttttaaggcgattcacgatttgatgatgttttctggacctcagattctgaagctcctgatcaaattcgtcaatgatacaaaggcccccgactggcaggggtatttttacacagtgctgttgttcgttactgcttgtctgcagaccctcgtgctgcaccagtatttccatatctgtttcgtgtctgggatgaggattaaaaccgccgtcatcggagccgtgtaccggaaggcgctagtgattacaaattcagcccgaaagtcatctactgtgggcgaaatcgttaacctcatgtcggtggacgcccagcggttcatggacttggcgacatatataaatatgatttggtcagccccactgcaagtaatactagcgctgtacctcctttggctgaatctcgggccaagcgtcctcgctggagtggcggtcatggtcctaatggtccctgtcaatgcggtcatggctatgaaaacaaaaacgtatcaggtagcacacatgaagtctaaggacaaccgcatcaagcttatgaatgaaatcctcaacggcatcaaagtcttaaagctctatgcttgggaactggcctttaaggataaggtgttggcaatcagacaagaagagctcaaagttcttaaaaaatctgcgtacctgagtgcggtaggcacttttacctgggtctgcacgcccttccttgtggccttatgcacattcgcagtctacgtgaccatcgacgagaacaacatcctggacgcccagaccgccttcgtgagcttggccctgtttaacatcttgagatttcctctcaacatcctgccaatggtcatatcctcaatcgtacaagcctccgtcagcctgaagaggctaaggatctttctcagccatgaagaactcgaaccggattcaatagaaaggcgccccgtaaaagatggaggcggaacaaattctattacagtaaggaacgccactttcacctgggcccgaagcgatccacctacattaaacggaataacttttagcataccggagggagccctggttgctgttgtgggccaggtcggttgcggcaagtcctcccttctgtccgccctgcttgccgagatggacaaagtggagggccacgtagccatcaagacgagaatcctagttacacactccatgtcttacctcccccaggtggacgtaatcattgtgatgtccggagggaagatctcagagatggggagctatcaggagcttcttgcccgggacggtgcattcgcagagttcttacgcacctacgcctctacagagcaggagcaggacgctgaggaaaatggtgtgaccggcgtgtctggaccaggtaaagaagccaaacagatggagaatggaatgctggtgacagattccgcggggaaacagctccagcgacagttgtcgtcttcatcctcttactctggcgacatctcccgtcatcacaacagtacggccgagctccagaaagccgaagctaaaaaggaggaaacatggaaattaatggaggccgataaggcccagactggccaagtgaagctgagcgtgtattgggactatatgaaggccattggattgtttatcagctttttatctatcttcttgttcatgtgcaaccatgtgagcgcgctggcctccaactactggctttcgctttggacagatgatcctatcgtcaacggcactcaggagcatactaaggtgaggctctcagtctatggagcactcggaatctctcagggcatcgcagtgttcggctactccatggccgtgagcatcggtggcatcctggcgagcaggtgtcttcatgtggatcttctgcattcaatccttcgtagccctatgagcttctttgagaggaccccctcaggcaacctggttaaccggttctccaaggagctggacactgtcgactctatgattcccgaagtaattaagatgttcatgggttccctgtttaatgtgataggcgcatgcatcgttattctattagcaacacccatagccgctatcatcatcccacctctaggactgatctatttcttcgtccaacgcttctacgttgcttcttcgcgacagctgaaacggctggaatccgtgagccggagccctgtgtactctcactttaatgagaccctcctcggggtgagtgtcatccgcgcctttgaagagcaagagcgattcattcatcaatcggatttaaaggtcgacgagaatcagaaggcctactacccttccattgtagccaaccgttggctcgccgtgagactcgaatgcgtcggaaactgtattgtcctgtttgccgccctgttcgccgtgatcagccgccattccctctccgccggtttggttggactgtccgtaagctacagcttacaggttaccacatacctcaactggctcgttagaatgtcctctgagatggagaccaacatcgtggctgtggagagactcaaagaatacagcgagacggagaaagaggctccctggcagatccaggagactgctcctccctcgagctggccacaggtggggcgggtcgaattcagaaattattgcctgcgctatcgagaggacctggactttgtgcttcggcacatcaacgtgaccatcaacgggggagagaaagttggaatagttggccgcaccggggccggaaaaagcagtctgacactggggctttttcggataaacgaatcagccgagggcgagatcatcattgatgggataaacatcgcgaagattggcctgcatgacctgaggtttaagatcaccattattcctcaggatccggtcctgttcagcggatccctgagaatgaatcttgaccctttctctcagtacagcgacgaagaggtgtggacctccctcgagctggcccatttgaaggatttcgtgagtgcattgcccgataagcttgaccacgagtgtgccgagggaggggaaaacctatccgtgggacaacgtcagttagtgtgcctggccagagcactgctgcgcaaaaccaaaatcctcgttctcgacgaggccacggctgccgtcgatctcgagacggacgacctgatacagtcgacaattcggacacagtttgaagattgtacggtcttaactatcgcccatagactgaataccattatggattacactcgggtgatcgtccttgataaaggggagatacaggagtatggtgcaccctctgacctgctgcagcaaaggggactgttctactcgatggcaaaggatgccggtcttgtgtag

SEQ ID NO: 151725 - DNA, 4419 bp, Artificial Sequence
  derived and/or modified sequence
atggccctcaggggcttttgttccgcagatggatcagaccctctctgggattggaatgtcacgtggaatacatctaaccctgactttactaagtgtttccagaatactgtgctggtatgggtgccatgcttttatctttgggcatgtttccctttctactttctctatctcagtcggcatgatagaggctacattcagatgacccctctcaataaaacaaaaaccgcactggggtttttactgtggatcgtgtgctgggcagacctgttctactctttttgggagcgttctcggggcatctttctggcacccgtcttcttggttagtcccacccttctgggtattaccatgctgcttgctacatttctgatccagctcgagcgccgaaaaggggttcagtcaagtggcatcatgctaaccttttggctggtcgccctggtttgtgcattggccatcttacgcagcaaaattatgactgccctcaaggaggatgcccaggtcgaccttttcagagatatcacattctatgtctatttttctctgctgttgatccaacttgtgctgtcatgcttctcagataggagccccctgttctcagagacaattcacgatcctaatccttgtcctgagagcagtgcaagtttcttaagtcggattaccttctggtggattactggacttatcgtgcggggctaccggcagccactggagggcagcgatctatggagtcttaacaaggaggatacatccgaacaggttgtgcccgtacttgtgaaaaactggaagaaggaatgcgcaaagactagaaagcagcccgtaaaagtcgtctacagtagtaaggaccctgctcagcctaaggagagctctaaagttgatgcgaacgaagaggtggaagcattaattgtgaagtctccccagaaagaatggaacccctccctctttaaagtgttatataagacatttggcccatacttccttatgtctttctttttcaaagctatccacgatctgatgatgttcagcggcccccagattctgaagctcttgataaagtttgttaatgacacgaaggcacctgattggcagggatacttctatactgtgttattgtttgtcacagcgtgtcttcaaacactggtactgcatcagtatttccatatttgcttcgtcagcggtatgagaatcaaaaccgccgtgattggggccgtctatagaaaagctttggttataaccaatagcgctcgaaaatcctccaccgtcggagagatcgtgaacctcatgagcgtagatgctcagaggtttatggatttggccacatatataaatatgatctggtccgcgccacttcaagtcatactagctctctatctactttggctgaaccttggcccctcagtgctagccggtgtcgctgtaatggtgctcatggtgcctgtcaacgcagttatggccatgaaaaccaagacatatcaggtcgcccatatgaagtccaaggacaaccgtattaagctgatgaacgagattctgaatggcatcaaagtactgaaactgtatgcgtgggagctggccttcaaagacaaagttctcgccatccgccaggaggaactgaaagtgctgaagaagagcgcctacttgtccgcagtggggacctttacatgggtttgtactccctttttggtagctttatgcacattcgcagtctatgtgaccattgatgagaataacattctcgacgcccaaaccgcatttgtgtccctggctctgttcaatatcttgcggtttccgctcaacatcctgccgatggttatctcatccatagtgcaggcttccgtgtctctgaagcggcttaggattttcttatctcatgaagagctggagccggactcaattgagaggcggccagtcaaagacggtggggggaccaatagcatcactgtccggaatgccaccttcacttgggctagatctgaccctcctaccctcaacggtatcacgttctccatcccagaaggcgccctagtagccgtcgtcgggcaggtggggtgcggcaaatcctcactcctttcggctctactggccgaaatggataaagtcgagggccacgttgccatcaagggcgttaacttgagcggtggccagaagcagcgcgtttcactcgctagagccgtctacagtaacgcagatatctacctcttcgacgacccattatccgcggtagacgcccatgtgggaaagcacatatttgagaacgtgattgggccaaagggtatgctgaaaaacaagactaggattttggttacccactccatgtcgtacctgccccaagtggacgtcattattgtgatgtccggcggaaagatcagcgaaatgggctcttaccaggagctactagctcgagacggtgcctttgccgagtttctgaggacatacgctagtactgaacaggagcaggacgccgaggagaatggcgtgacaggagttagcgggccaggcaaggaggcaaaacagatggagaacggcatgctggttaccgattccgctggcaagcagctgcagcgacagctgagctcttctagcagctatagcggggacatctcaaggcaccacaactcaactgctgagctgcaaaaggccgaagccaagaaagaggagacttggaagctgatggaagccgataaggcacagacaggccaagtcaaactttccgtgtactgggactatatgaaggctatcgggctcttcatttcctttctctccatctttctgttcatgtgtaatcatgtgtcagctctggcttcaaactactggctgtctctgtggactgacgacccaatcgttaacggcactcaggaacataccaaggtgagactaagcgtctacggagcgctggggatcagccaaggcatcgctgtgttcggttactctatggctgtctccatcggagggatcttggcctcacgctgcctccacgtcgacctcctgcactccatcctgcgatccccgatgtccttctttgaacggacccccagcgggaacctagtgaatagattttcgaaggagctcgatacagtggatagcatgatacccgaggtgataaaaatgttcatgggttcactgttcaatgttattggagcgtgtatcgtgatccttctggctacaccaatcgctgccattataatccctcccctggggctaatttatttcttcgtacagcgtttctacgtagcatctagcaggcagttgaaaagactcgagtccgtctcgcgctcaccagtctacagtcatttcaatgagaccctgctcggggtgagtgtgatcagggcttttgaggaacaagaacggttcattcatcagtccgatcttaaggtggacgagaaccagaaggcttattatccctcaatcgttgcaaataggtggctcgctgttcgtctcgaatgcgtgggtaattgtatagtgctatttgccgccctgttcgccgtgatctccagacactccctcagcgccggactagtcgggcttagtgtcagctacagcctgcaggtgaccacatatctgaactggctggtgcgcatgtcatccgaaatggagactaacatagtcgctgtggaacgcctgaaagaatactccgaaaccgagaaggaagccccatggcagatacaggagacggcccccccttcctcttggccccaggtgggtagagtggaattccgtaattactgtttgaggtaccgcgaagacctcgattttgtactgcggcacataaacgtaaccattaatgggggcgaaaaagtgggaatcgtcggtaggacgggcgcaggtaaatcatcactcaccttaggcctgtttcggataaacgaaagcgctgagggggagatcattattgacggtattaatatcgctaagatcggcttacatgacctgcggttcaaaataaccatcatcccccaggaccccgtgctgtttagcggctctctgcgcatgaatctcgacccgtttagccaatatagtgatgaggaagtgtggacctctctggaacttgctcacctcaaagattttgtatccgcactgcctgataagctagatcatgagtgcgccgaaggaggagaaaatctaagcgttgggcagcgtcagttagtgtgccttgcgcgagctctcctacgaaaaaccaagattttggtgctcgacgaggccacagctgctgtcgatcttgaaaccgatgatctcattcagtccactatcaggacccagttcgaggactgtaccgtgttgaccattgctcaccgtttaaacactatcatggattatacaagagtaatcgttctggacaaaggcgagatccaagagtatggagccccttcagacttactgcaacagagggggctcttttattcaatggctaaggacgctgggctcgtctag

SEQ ID NO: 151726 - DNA, 4626 bp, Artificial Sequence
  derived and/or modified sequence
atggctctgagaggattctgctcagctgatggatccgaccctctctgggactggaacgtgacctggaacactagcaaccctgacttcacaaaatgcttccagaacacagtgcttgtttgggtgccgtgcttctacctgtgggcctgcttcccgttctacttcctttacctctcacgtcacgataggggctatatacagatgacgccactcaacaagactaagacagccctaggcttcctgctgtggatcgtgtgttgggccgacctgttctactctttctgggagcgctctcgcggcatcttcctggcacctgtgtttttggtatctcctaccctgctggggatcaccatgttactagcgactttccttattcagttggaacgaagaaagggcgtgcaatcttctggaattatgctgaccttctggctggtcgccctggtgtgcgctcttgccattctcagatctaagatcatgacagccctcaaggaagacgctcaggttgacctgttcagagatatcacattttacgtatattttagtctccttctgattcagctggtgctgtcatgcttttcggacagatctcctctattctctgaaactattcatgatccgaatccatgcccagagtcttctgcatctttcctatccagaattaccttctggtggatcactggtttgatcgttagagggtataggcagcctctggaagggtctgacctctggagcctcaataaggaggacacctctgagcaagtggtgccggtcttggttaagaattggaagaaggaatgtgccaagacaagaaaacagcctgttaaggttgtgtatagttccaaggaccctgcacaacccaaggagagttccaaggtcgacgcaaatgaggaagtagaagccttgatcgtcaagagtcctcaaaaggagtggaatccttccctgttcaaagttctctacaagaccttcgggccctattttctgatgagcttctttttcaaagctatccatgatctaatgatgttttccggtccgcagattctgaagctcttaatcaagttcgtgaacgacactaaggctccagattggcagggctacttctataccgtcctgctgttcgtgacagcttgtctgcagacactggtgttacaccaatattttcacatctgtttcgtctctggcatgcgaataaagacagccgtcatcggcgccgtatataggaaggccctggttattactaattctgcccgcaagtcttccacagtcggggagattgtgaatctaatgtcggtggatgcccagcgcttcatggacctggccacatatatcaacatgatttggtccgctcccctccaagtcatactggctctgtatctcctgtggctgaacctggggcctagcgttctcgcaggcgtcgccgtgatggtgctgatggtgcctgttaacgccgtgatggcgatgaagaccaagacctaccaagtcgcacacatgaaaagcaaggacaatagaatcaaattaatgaacgagatactgaatgggatcaaggtgctgaaactttacgcctgggaacttgcctttaaggacaaagtgctcgccatacgccaggaagagctcaaggtgttgaagaaatcggcttacttgtccgctgtcggaactttcacatgggtttgcacaccattcctcgtggccctttgtactttcgccgtgtacgtaaccattgacgaaaacaatatattggatgcgcagactgcctttgttagcctcgcgttgtttaatatactgaggttccccctgaatatactgcctatggtgatttctagtattgtgcaagcttctgtgagtctgaagcgcctaagaatctttttaagccatgaagaactcgaaccagattcaatcgagcgaaggcccgtaaaggatggtgggggcacaaattccataaccgttcgcaatgcgacgtttacctgggcacggtcagacccacctacgctaaatggcatcaccttctcgatcccagagggcgctcttgtggcggttgtgggtcaagtcggttgtggcaaaagttccctgctgagcgctctgctcgccgagatggataaggtggagggacatgttgcgatcaaaggttccgtcgcatacgttccccaacaggcgtggatccagaatgacagcctccgcgagaatatcctgttcggatgccaacttgaggaaccctattatcggtcagtgatacaggcttgcgccctgctccccgatttggagattcttcctagcggcgacagaaccgagattggagaaaaaggcgtgaacttgagcgggggtcaaaagcagagggtcagcctcgctcgggccgtatacagtaatgcggatatctacttgttcgatgaccctttgtccgctgtggacgctcacgttggcaagcacattttcgaaaacgtcataggtcctaaaggcatgctcaagaacaagactcgcatattagtcactcactctatgagctatctcccccaggtagacgtgatcatcgtgatgagcggtggcaagataagcgaaatgggaagctatcaggaactgctcgcaagggatggcgcattcgccgaattcctgcgaacctacgcgtcaaccgagcaggagcaggatgcagaggagaacggcagcactgtcatggatgaggaagaagcaggagtgactggtgtgtcaggacctggcaaggaggccaagcagatggaaaatggcatgctcgtaaccgactctgccggaaaacagctacaacgtcaattaagctcctcttcctcctactctggagatattagtcgccatcacaactctaccgccgaactgcaaaaggcagaggcaaagaaagaagagacatggaagctcatggaagccgataaggctcaaacgggacaagtaaagctttcagtctactgggattacatgaaggcgatcggtttattcatctcattcctcagcatcttcctgttcatgtgtaaccacgtgtctgccctagctagcaactactggctctctctgtggacggatgaccctattgttaacggcactcaggaacataccaaggtccgcttatccgtatacggggctcttggtatctcccaggggattgccgtgttcggctactccatggccgtctctattggcggaatcctcgcaagccggtgtctccacgttgacctgctacatagtatcctacgctctcccatgtcgtttttcgaacgcacaccatctggaaatctggtgaaccgctttagtaaggaactggatactgttgattcaatgatcccggaagttattaaaatgtttatggggtcactctttaatgtgattggggcctgcatcgtaatccttcttgcaaccccgatcgccgccatcatcatccctccattgggcctgatttacttcttcgttcagagattttacgtcgcctcctcccgccaactgaagcggctggaaagcgtgtctcgctccccagtgtattcccattttaatgaaaccttgttgggcgtgtcagtgatccgagccttcgaagagcaggaacgcttcatacaccagtcagacttgaaggttgacgagaaccagaaagcctactatcctagcatcgtggctaaccgctggctagccgtcagactggagtgcgtggggaattgcatcgtattatttgccgccctgttcgccgtgatcagtcgccacagcctgtctgcaggtctggtgggtttgtcagttagctatagcctgcaggtcaccacttatctcaactggctggtacgaatgagttcagagatggagacaaatatcgtagcagtagagaggttgaaagaatactccgaaaccgagaaggaggcaccctggcagatccaggaaactgcccccccgagctcatggccccaggtcggtcgagttgagttccgaaattactgtcttcggtaccgcgaagatctggactttgtgctcaggcacattaatgttactattaatggtggagagaaggtgggcatcgtgggcagaaccggggcagggaaatcttcactgacactgggattatttcgaattaacgagtctgcagagggcgagatcattatagatggtatcaatatagccaagatcgggcttcacgatctaagattcaagatcaccatcatcccacaggatccagtcctcttctctggttccttgagaatgaatctggatcccttctcgcagtacagcgatgaagaagtgtggacctcactggaactcgcccatctgaaagatttcgtttctgcactgcctgacaaactcgatcatgaatgcgccgagggcggcgagaacctttccgtcggacagaggcaactcgtctgccttgcccgtgccctactgcgcaagacaaagattttggtgctagacgaggcaaccgctgccgttgacttagaaacagatgatctaatccagtctacaatcagaactcaatttgaagattgcaccgtgctaaccattgcgcatcgtctgaatacaatcatggattatacacgtgtcatcgtccttgacaagggagagattcaggagtatggagcaccttccgatctgctgcaacagcgcggccttttctactccatggccaaggacgccgggctagtgtag

SEQ ID NO: 151727 - DNA, 4596 bp, Artificial Sequence
  derived and/or modified sequence
atggcactgagaggattctgttcggctgatggctccgacccactctgggactggaatgtcacttggaacacgagcaatccagacttcaccaagtgctttcagaacactgtccttgtctgggtcccttgcttttacctgtgggcgtgcttcccgttttattttctatacctgagcagacatgatagggggtatatccagatgactccgttaaacaagaccaaaaccgcactcgggttcctgctttggattgtgtgttgggctgacctgttctattctttttgggaacgcagcagaggaatatttctggcacccgtgttcttggtgagcccgactttgcttggcatcactatgctactggcaacatttctgattcagttagagcgccgaaaaggagttcagagcagtgggatcatgctgaccttctggctggtggctttggtgtgtgctctggctatcttacggagcaagatcatgaccgccctgaaggaagacgcacaggtggacttgtttcgggatatcacgttttatgtgtattttagcctcctgctcattcagttagtgctctcttgcttcagcgaccgctcccccctgttttctgagactatccacgaccctaatccctgcccagagagttcagcaagtttcttgagccgcataactttctggtggatcactgggctcattgtaagaggctacaggcaaccgctcgagggcagcgacctctggtctctgaataaagaggatacgtccgagcaagttgtacccgtcctggtgaaaaattggaagaaggagtgtgcgaaaactagaaagcaacctgtcaaagtagtgtacagcagcaaagaccccgcacagccaaaggagtcaagtaaggtggatgcaaacgaggaagtcgaggccctcatcgttaagagcccacagaaggaatggaacccaagcttgtttaaggtcctctacaaaacctttggcccatacttcctgatgtccttcttcttcaaggccatccacgatctgatgatgttcagcggcccccagatcctgaaattattgattaaatttgtgaacgataccaaagcgcctgattggcaggggtatttctataccgtactgctgttcgtgaccgcctgccttcagaccctggtcctgcaccaatactttcacatctgcttcgtctctggcatgaggattaagacagctgtgatcggagccgtctataggaaggcactcgtcattaccaactcggcaagaaaaagcagcacagttggcgaaatcgtgaatctgatgagcgtcgatgcccaaagatttatggatctggctacctatatcaacatgatttggtctgcacccttacaggtcattctcgctctctacctcctgtggctgaacctgggacctagcgtgctcgctggggtagctgtcatggttctgatggtgccagtcaatgccgtaatggctatgaagaccaagacgtatcaggtggcccatatgaaatccaaagataatcgtattaagctcatgaacgaaatcttaaacggtattaaggtgctgaaactgtacgcctgggagctggcctttaaggataaagttttagccataaggcaggaggagctgaaggtcctgaaaaagagtgcatatctgtctgctgtgggaacttttacttgggtgtgtacaccgtttctggtggcactctgtacgttcgcagtttatgttacgattgacgagaacaacatcctggacgctcagaccgccttcgtaagcctcgccctttttaatatcctgagattcccactgaatattcttccgatggtgatttcatctattgtgcaggcgagcgtctctcttaagagacttagaatcttcctgagccacgaggaactcgagcccgattccattgagcggagaccagtgaaggatggaggtggcacaaatagcatcactgtgaggaacgctacttttacgtgggctcggagtgaccctcctactctcaatggtatcacattctccatcccagaaggtgcactggttgctgtagtgggccaggtcgggtgcggaaaaagctctttacttagtgctctgctggctgaaatggacaaggtggagggccacgttgccattaaaggatccgtcgcatacgtgccccaacaagcttggattcagaatgacagcctgagagagaacatcttgttcggctgtcagctagaggagccatattaccgcagcgtaattcaggcttgtgcgctcttgcccgacttggaaatcctgcctagtggagatcgcactgaaattggggaaaaaggcgtgaatttaagcggaggtcagaagcagagggtttcattggcccgcgcagtctactctaacgccgatatttacctatttgatgatcccctctccgccgtggatgctcacgtgggcaagcacatttttgaaaatgttattggaccaaagggcatgcttaaaaacaaaacaaggattctggtaacccattcaatgtcctacctacctcaggttgacgttataatcgtaatgtctggaggaaagatttctgagatgggatcttatcaggaacttctagcccgggacggtgcttttgcagaattcttgaggacctacgctagtaccgaacaagaacaagacgctgaggagaatggagtcacaggagtttcagggccagggaaggaggccaagcagatggaaaatgggatgcttgtgactgacagtgccggcaaacaactgcagcgtcagctctcttcaagttcatcttacagtggggacatcagccggcaccataacagtaccgccgaactgcagaaagctgaagcaaagaaggaagagacatggaaactgatggaagccgataaggctcagacgggccaggtgaagctatctgtgtactgggactacatgaaggccatcggcctatttatttcttttttgtccatctttctgttcatgtgcaaccacgtaagtgccctcgccagcaactattggctcagcctgtggactgatgatcccattgttaacggcacccaggaacataccaaggtgcggctcagtgtctatggcgcactcgggatatctcaggggatcgccgtgtttggatacagcatggccgtgagcattggcgggatcctcgcctcacggtgcctgcacgttgacctgctgcattccatactccggagccctatgtccttttttgaacggaccccaagcgggaacctggttaacaggttctcaaaagagttggatacggtggacagcatgattccagaagtgataaagatgtttatgggttccctctttaacgttataggggcttgtatagtcatactcttggcgacaccgatcgccgcgattataatcccaccactcggcctcatctacttctttgtacagcggttctacgtagccagtagccggcagcttaaacgactagaatcagttagtcggtctccagtttatagccattttaatgaaactttactcggggtcagcgtgatcagggcattcgaggagcaggagagattcattcaccagagcgacctgaaagtggacgagaaccagaaagcatattaccccagcatcgtagccaacagatggttggcggtgaggcttgagtgcgtgggaaattgtattgttctctttgctgccctgtttgctgtcatcagtcgacactcactctcggctggcctcgtgggtctgtctgtcagctactccctgcaagtgactacctatctaaattggctggttagaatgagcagtgagatggaaaccaatatagttgcagttgagagacttaaggagtactcagagacagagaaggaggctccgtggcagattcaagagacagcccctccaagtagttggccccaggttggacgagtggaattcaggaattactgcttgcgttaccgcgaggacctggacttcgttttgaggcacatcaacgtcactatcaatggcggtgagaaggtgggcattgttgggcggacaggggctggaaaatcctcattgacactgggcctcttccgcatcaatgaaagcgcagagggggaaattattattgacggtataaatatagcaaagataggcctacatgatctgcgtttcaagatcacaatcattccgcaagaccctgtccttttcagcgggtctctccgcatgaatttagatcccttctctcagtactccgacgaagaagtgtggacgagtctggagctggcgcacttaaaagacttcgtgtcagccctgccggataagcttgaccacgagtgcgcagagggaggggagaatctgtcggtcgggcaacgtcagctggtatgcctcgcccgcgcactactgcggaagacaaaaattctggttcttgacgaagccacagcagcagtggacctggagacagatgatctgatccagagcacaataagaactcagttcgaagactgtactgtgttgacgatcgcccatcggcttaacactataatggactatacgagagtcatcgtccttgataagggcgaaatccaggaatatggcgctccgtcggatctgctgcagcaacgtggcctgttttactctatggccaaggacgccggtctggtgtag

SEQ ID NO: 151728 - DNA, 3648 bp, Artificial Sequence
  derived and/or modified sequence
atgtcttttttcttcaaggcaatacatgatctaatgatgtttagtggcccccagattttaaaactgttaataaagttcgttaacgatactaaggcgccagattggcaaggatacttttatacagtgttactgttcgttacggcatgtctgcagacgctcgtactgcatcagtacttccatatttgctttgtctccgggatgaggatcaaaaccgcagtcatcggcgccgtctaccggaaggccctggtgatcaccaattccgcacggaagtctagcaccgtgggagagatcgtgaatctgatgagcgttgacgctcagcgatttatggatctggcaacctatattaacatgatatggtctgcgcctcttcaggtaatcctcgctttgtacctgctttggttaaacctcggaccttccgtactcgcaggagtcgccgttatggtactgatggtccctgttaatgctgtcatggccatgaagaccaagacctatcaagtcgctcacatgaagtcaaaagataataggatcaagctgatgaatgaaatactcaacggtatcaaggtgctcaagctgtatgcttgggagctcgccttcaaggataaggtactggctattagacaggaggagcttaaagttcttaaaaaatctgcctaccttagcgccgtgggaacattcacctgggtgtgcacgccgttcctggtcgccctatgtacattcgccgtgtacgttacgattgatgagaacaacattctcgacgcccagacggctttcgtatctttggccctcttcaatattctgcgcttccctctgaatatcctgcccatggtgatctcaagtattgtgcaggccagcgtgtcgctaaagcgactacgcatctttctgagtcatgaagagctcgaacccgactcaatcgagaggagacccgtgaaagacggaggtggcacaaacagcataactgtgcgcaatgctacattcacatgggccaggtctgatccccctactctgaatggtataaccttcagcatccctgagggagccctggttgcagtggtggggcaggtgggttgtgggaaaagtagtctgctgtctgctctgttggcagaaatggacaaggttgaaggacatgtggccatcaagggatccgtggcatacgtgccacagcaagcttggatccagaatgactctctgcgagagaacattctcttcggatgccagctcgaagagccctactatcggagtgtgatacaggcctgcgcactgttgccagacctcgaaatccttccatctggcgatcggactgaaattggggagaagggggttaatctttccggtggccagaagcagcgagtttctctggcacgcgccgtctactccaacgctgatatatatttattcgacgaccccttaagcgctgtggacgctcatgtgggaaaacacatttttgagaatgtgatcggcccgaaaggtatgttaaagaacaaaacgcggatactagtgacccattcaatgtcatatttaccacaagttgacgtgattattgtgatgagcggcggaaagatatctgagatggggagctatcaggagttactggcacgcgacggggcgttcgcggagtttcttagaacatatgcttcaactgagcaggagcaggatgcagaagaaaatgggagtacggtaatggatgaggaggaagcaggagtcaccggagtgtcagggccaggtaaagaggccaagcagatggaaaacgggatgctggtaactgattccgctggaaagcagcttcagagacagctgtcaagcagttcctcttatagcggtgacatctcccgacatcacaatagtaccgcggagttacagaaagcagaggcaaagaaagaggaaacatggaagctcatggaagccgacaaggcccagacggggcaggtgaagctttctgtgtactgggattacatgaaggcaatcggcctctttatctcctttctgtcaatcttcctgttcatgtgtaaccacgtaagtgctctcgctagtaactattggctgtcactttggaccgatgatcctatcgtcaacgggacccaggagcacaccaaagtgcgtctcagcgtgtacggagcgttaggtatctcccagggcatcgctgtctttggttactccatggcagtgagcatcggtggcatcctcgcctccagatgtttgcacgtcgacctactgcatagcatcctgcgttctccgatgagcttctttgagcgcacacccagcggaaatttagttaaccggttttccaaggagctggataccgtggactccatgatcccggaagtgatcaagatgtttatggggtccctatttaacgtgattggcgcttgtatcgttatactgctggcaaccccaatcgccgcaattatcatcccccccctgggcctgatctattttttcgtacaacgtttttatgtggctagtagccgccagctaaagagattggagagcgtgagtcgaagcccagtgtatagccattttaacgagacccttctgggcgtatcagtaatccgggccttcgaggaacaggaaaggttcattcaccagagtgacttaaaggtggatgagaaccagaaagcttactatcctagtatagtagcaaatcgctggctagccgttcgcctagagtgtgttgggaattgcattgtactatttgcagccctcttcgcagtcataagccggcatagcctttccgctggccttgtagggttgtccgtgagttacagccttcaggtgaccacatatttgaactggctggtgcggatgtcctccgagatggaaacgaacattgttgctgtggagcgcctgaaggaatacagcgagaccgagaaggaagccccttggcaaatacaggagaccgccccaccaagcagctggccacaagtaggtcgcgtggaattccgaaattactgtttgaggtatagggaggatctggattttgttctgcgacatattaacgtaaccattaacggtggggagaaggttggtatagtcgggcgcacaggcgcgggcaagtcatcgctgaccctgggtctgtttcgaattaacgaatctgctgagggcgaaattatcattgacggaattaacattgcaaaaataggactccatgatctccgcttcaaaataaccattattccccaggatcctgttctcttcagcggcagccttcgaatgaacttagatcctttctcccagtactcggacgaagaggtgtggacctcactcgaactggcccacttgaaggactttgtgtcagccttgccggacaagttagaccacgagtgtgccgaagggggagagaatctgtcagtcggccagaggcaactggtctgcctggccagggcacttctcagaaaaaccaaaatattggtgcttgatgaagctactgccgccgtggatctcgagaccgacgatttaattcagagcacaatccgtacccaattcgaggattgcacagtgttgaccatcgcccatcggcttaatacaattatggattacaccagggtaatcgtgctggataaaggcgaaatacaggaatacggcgctccctccgacctccttcaacagcgcggcttgttctattcaatggccaaagatgccggactggtatag

SEQ ID NO: 151729 - DNA, 4401 bp, Artificial Sequence
  derived and/or modified sequence
atggccctgcggggcttctgcagcgcagatggcagtgaccccctgtgggactggaatgtgacctggaacaccagcaacccagacttcaccaagtgcttccagaacacagtgctggtgtgggtgccctgcttctacctgtgggcctgcttccccttctacttcctgtacctgagcagacatgaccggggctacatccagatgacccccctgaacaagaccaagacagccctgggcttcctgctgtggatcgtgtgctgggccgacctcttctacagcttctgggagaggagccggggcatcttcctggcccctgtgttcctggtgagccccaccctgctgggcatcaccatgctgctggccaccttcctgatccagctggagaggaggaagggcgtgcagagcagcggcatcatgctgaccttctggctggtggccctggtgtgtgccctggccatcctgcggagcaagatcatgacagccctgaaggaggatgcccaggtggacctcttccgggacatcaccttctacgtgtacttcagcctgctgctgatccagctggtgctgagctgcttcagtgacaggagccccctcttcagcgagaccatccatgaccccaacccctgcccagagagcagcgccagcttcctgagccgcatcaccttctggtggatcaccggcctcatcgtgcggggctaccggcagcccctggagggcagtgacctgtggagcctgaacaaggaggacaccagcgagcaggtggtgcctgtgctggtgaagaactggaagaaggaatgtgccaagaccaggaagcagcctgtgaaggtggtgtacagcagcaaggaccctgcccagcccaaggagagcagcaaggtggatgccaatgaggaggtggaggccctgattgtgaagagcccccagaaggagtggaaccccagcctcttcaaggtgctgtacaagaccttcggcccctacttcctgatgtccttcttcttcaaggccatccatgacctgatgatgttttctggcccccagatcctgaagctgctgatcaagtttgtgaatgacaccaaggccccagactggcagggctacttctacacagtgctgctgtttgtgacagcctgcctgcagaccctggtgctgcaccagtacttccacatctgctttgtgtctggcatgaggatcaagacagctgtgattggagctgtgtacaggaaggccctggtgatcaccaacagcgccaggaagagcagcacagtgggggagatcgtgaacctgatgtctgtggatgcccagcgcttcatggacctggccacctacatcaacatgatctggagcgcccccctgcaggtgatcctggccctgtacctgctgtggctgaacctgggccccagcgtgctggccggcgtggccgtgatggtgctgatggtgcctgtgaatgctgtgatggccatgaagaccaagacctaccaggtggcccacatgaagagcaaggacaaccgcatcaagctgatgaatgagatcctgaatggcatcaaggtgctgaagctgtatgcctgggagctggccttcaaggacaaggtgctggccatccggcaggaggagctgaaggtgctgaagaagagcgcctacctgtctgctgtgggcaccttcacctgggtgtgcacccccttcctggtggccctgtgcacctttgctgtgtatgtgaccattgatgagaacaacatcctggatgcccagacagcctttgtgtccctggccctcttcaacatcctgcgcttccccctgaacatcctgcccatggtgatcagcagcatcgtgcaggcctctgtgtccctgaagaggctgcgcatcttcctgagccatgaggagctggagccagacagcattgaaagaagacctgtgaaggatggcggcggcaccaacagcatcaccgtgagaaatgccaccttcacctgggcccggagtgacccccccaccctgaatggcatcaccttcagcatccctgagggcgccctggtggccgtggtgggccaggtgggctgtgggaagagcagcctgctgagcgccctgctggccgagatggacaaggtggagggccacgtggccatcaagggctctgtggcctacgtgccccagcaggcctggatccagaatgacagcctgcgggagaacatcctgtttggctgccagctggaggagccctactacagaagtgtcatccaggcctgtgccctgctgcctgacctggagatcctgcccagcggggacagaacagaaattggagagaagggcgtgaacctgagcggcggccagaagcagagggtgtccctggcccgggctgtgtacagcaatgctgacatctacctgtttgatgaccccctgtctgctgtggatgcccacgtgggcaagcacatctttgaaaatgtgattggccccaagggcatgctgaagaacaagacccgcatcctggtgacccacagcatgagctacctgccccaggtggatgtgatcatcgtgatgtctgggggcaagatcagcgagatgggcagctaccaggagctgctggccagagatggagcctttgctgagttcctgcggacctacgccagcacagagcaggagcaggatgctgaggagaatggagtgactggagtgtctggccctgggaaggaggccaagcagatggagaatggcatgctggtgacagattctgctgggaagcagctgcagaggcagctgagcagcagcagcagctacagcggggacatcagccgccaccacaacagcacagctgagctgcagaaggccgaggccaagaaggaggagacctggaagctgatggaggccgacaaggcccagacaggccaggtgaagctgtctgtgtactgggactacatgaaggccatcggcctcttcatctccttcctgagcatcttcctgttcatgtgcaaccacgtgtctgccctggccagcaactactggctgagcctgtggacagatgaccccatcgtgaatggcacccaggagcacaccaaggtgcggctgtctgtgtatggagccctgggcatcagccagggcattgctgtgtttggctacagcatggctgtgtccattggaggcatcctggccagccgctgcctgcacgtggacctgctgcacagcatcctgcggagccccatgtccttctttgagaggaccccatctggcaacctggtgaaccgcttcagcaaggagctggacacagtggacagcatgatccctgaggtgatcaagatgttcatgggcagcctcttcaacgtcatcggggcctgcatcgtcatcctgctggccacccccatcgccgccatcatcatcccccccctgggcctcatctacttctttgtgcagcgcttctacgtggccagcagccggcagctgaagaggctggagagcgtgagccgcagccctgtgtacagccacttcaatgagaccctgctgggcgtgtctgtcatccgggcctttgaggagcaggagcgcttcatccaccagagcgacctgaaggtggatgagaaccagaaggcctactaccccagcatcgtggccaaccgctggctggccgtgcggctggagtgtgtgggcaactgcatcgtgctgtttgctgccctgtttgctgtgatcagccgccacagcctgtctgctggcctggtgggcctgtctgtgtcctacagcctgcaggtgaccacctacctgaactggctggtgaggatgagcagcgagatggagaccaacatcgtggccgtggagcggctgaaggagtacagcgagacagagaaggaggccccctggcagatccaggagacagccccacccagctcctggccccaggtgggccgggtggagttcaggaactactgcctgcgctaccgggaggacctggactttgtgctgcggcacatcaacgtgaccatcaatggaggagagaaggtgggcatcgtgggccgcactggagctgggaagagcagcctgaccctgggcctcttccgcatcaatgaatctgctgagggggagatcatcattgatggcatcaacatcgccaagattggcctgcatgacctgcgcttcaagatcaccatcatcccccaggaccctgtgctcttcagcggcagcctgaggatgaacctggaccccttcagccagtacagtgatgaggaggtgtggaccagcctggagctggcccacctgaaggactttgtgtctgccctgcctgacaagctggaccatgaatgtgccgagggcggggagaacctgcgggtgattgtgctggacaagggggagatccaggagtatggagcccccagcgacctgctgcagcagaggggcctcttctacagcatggccaaggatgctggcctggtgtag

SEQ ID NO: 151730 - DNA, 4428 bp, Artificial Sequence
  derived and/or modified sequence
atggccctgcggggcttctgcagcgcagatggcagtgaccccctgtgggactggaatgtgacctggaacaccagcaacccagacttcaccaagtgcttccagaacacagtgctggtgtgggtgccctgcttctacctgtgggcctgcttccccttctacttcctgtacctgagcagacatgaccggggctacatccagatgacccccctgaacaagaccaagacagccctgggcttcctgctgtggatcgtgtgctgggccgacctcttctacagcttctgggagaggagccggggcatcttcctggcccctgtgttcctggtgagccccaccctgctgggcatcaccatgctgctggccaccttcctgatccagctggagaggaggaagggcgtgcagagcagcggcatcatgctgaccttctggctggtggccctggtgtgtgccctggccatcctgcggagcaagatcatgacagccctgaaggaggatgcccaggtggacctcttccgggacatcaccttctacgtgtacttcagcctgctgctgatccagctggtgctgagctgcttcagtgacaggagccccctcttcagcgagaccatccatgaccccaacccctgcccagagagcagcgccagcttcctgagccgcatcaccttctggtggatcaccggcctcatcgtgcggggctaccggcagcccctggagggcagtgacctgtggagcctgaacaaggaggacaccagcgagcaggtggtgcctgtgctggtgaagaactggaagaaggaatgtgccaagaccaggaagcagcctgtgaaggtggtgtacagcagcaaggaccctgcccagcccaaggagagcagcaaggtggatgccaatgaggaggtggaggccctgattgtgaagagcccccagaaggagtggaaccccagcctcttcaaggtgctgtacaagaccttcggcccctacttcctgatgtccttcttcttcaaggccatccatgacctgatgatgttttctggcccccagatcctgaagctgctgatcaagtttgtgaatgacaccaaggccccagactggcagggctacttctacacagtgctgctgtttgtgacagcctgcctgcagaccctggtgctgcaccagtacttccacatctgctttgtgtctggcatgaggatcaagacagctgtgattggagctgtgtacaggaaggccctggtgatcaccaacagcgccaggaagagcagcacagtgggggagatcgtgaacctgatgtctgtggatgcccagcgcttcatggacctggccacctacatcaacatgatctggagcgcccccctgcaggtgatcctggccctgtacctgctgtggctgaacctgggccccagcgtgctggccggcgtggccgtgatggtgctgatggtgcctgtgaatgctgtgatggccatgaagaccaagacctaccaggtggcccacatgaagagcaaggacaaccgcatcaagctgatgaatgagatcctgaatggcatcaaggtgctgaagctgtatgcctgggagctggccttcaaggacaaggtgctggccatccggcaggaggagctgaaggtgctgaagaagagcgcctacctgtctgctgtgggcaccttcacctgggtgtgcacccccttcctggtggccctgtgcacctttgctgtgtatgtgaccattgatgagaacaacatcctggatgcccagacagcctttgtgtccctggccctcttcaacatcctgcgcttccccctgaacatcctgcccatggtgatcagcagcatcgtgcaggcctctgtgtccctgaagaggctgcgcatcttcctgagccatgaggagctggagccagacagcattgaaagaagacctgtgaaggatggcggcggcaccaacagcatcaccgtgagaaatgccaccttcacctgggcccggagtgacccccccaccctgaatggcatcaccttcagcatccctgagggcgccctggtggccgtggtgggccaggtgggctgtgggaagagcagcctgctgagcgccctgctggccgagatggacaaggtggagggccacgtggccatcaagggctctgtggcctacgtgccccagcaggcctggatccagaatgacagcctgcgggagaacatcctgtttggctgccagctggaggagccctactacagaagtgtcatccaggcctgtgccctgctgcctgacctggagatcctgcccagcggggacagaacagaaattggagagaagacccgcatcctggtgacccacagcatgagctacctgccccaggtggatgtgatcatcgtgatgtctgggggcaagatcagcgagatgggcagctaccaggagctgctggccagagatggagcctttgctgagttcctgcggacctacgccagcacagagcaggagcaggatgctgaggagaatggagtgactggagtgtctggccctgggaaggaggccaagcagatggagaatggcatgctggtgacagattctgctgggaagcagctgcagaggcagctgagcagcagcagcagctacagcggggacatcagccgccaccacaacagcacagctgagctgcagaaggccgaggccaagaaggaggagacctggaagctgatggaggccgacaaggcccagacaggccaggtgaagctgtctgtgtactgggactacatgaaggccatcggcctcttcatctccttcctgagcatcttcctgttcatgtgcaaccacgtgtctgccctggccagcaactactggctgagcctgtggacagatgaccccatcgtgaatggcacccaggagcacaccaaggtgcggctgtctgtgtatggagccctgggcatcagccagggcattgctgtgtttggctacagcatggctgtgtccattggaggcatcctggccagccgctgcctgcacgtggacctgctgcacagcatcctgcggagccccatgtccttctttgagaggaccccatctggcaacctggtgaaccgcttcagcaaggagctggacacagtggacagcatgatccctgaggtgatcaagatgttcatgggcagcctcttcaacgtcatcggggcctgcatcgtcatcctgctggccacccccatcgccgccatcatcatcccccccctgggcctcatctacttctttgtgcagcgcttctacgtggccagcagccggcagctgaagaggctggagagcgtgagccgcagccctgtgtacagccacttcaatgagaccctgctgggcgtgtctgtcatccgggcctttgaggagcaggagcgcttcatccaccagagcgacctgaaggtggatgagaaccagaaggcctactaccccagcatcgtggccaaccgctggctggccgtgcggctggagtgtgtgggcaactgcatcgtgctgtttgctgccctgtttgctgtgatcagccgccacagcctgtctgctggcctggtgggcctgtctgtgtcctacagcctgcaggtgaccacctacctgaactggctggtgaggatgagcagcgagatggagaccaacatcgtggccgtggagcggctgaaggagtacagcgagacagagaaggaggccccctggcagatccaggagacagccccacccagctcctggccccaggtgggccgggtggagttcaggaactactgcctgcgctaccgggaggacctggactttgtgctgcggcacatcaacgtgaccatcaatggaggagagaaggtgggcatcgtgggccgcactggagctgggaagagcagcctgaccctgggcctcttccgcatcaatgaatctgctgagggggagatcatcattgatggcatcaacatcgccaagattggcctgcatgacctgcgcttcaagatcaccatcatcccccaggaccctgtgctcttcagcggcagcctgaggatgaacctggaccccttcagccagtacagtgatgaggaggtgtggaccagcctggagctggcccacctgaaggactttgtgtctgccctgcctgacaagctggaccatgaatgtgccgagggcggggagaacctgtctgtgggccagaggcagctggtgtgcctggcccgggccctgctgaggaagaccaagatcctggtgctggatgaggccacagctgctgtggacctggagacagatgacctgatccagagcaccatccgcacccagtttgaggactgcaccgtgctgaccatcgcccaccggctgaacaccatcatggactacaccagggtcatcgtgctggacaagggggagatccaggagtatggagcccccagcgacctgctgcagcagaggggcctcttctacagcatggccaaggatgctggcctggtgtag

SEQ ID NO: 151731 - DNA, 4251 bp, Artificial Sequence
  derived and/or modified sequence
atggccctgcggggcttctgcagcgcagatggcagtgaccccctgtgggactggaatgtgacctggaacaccagcaacccagacttcaccaagtgcttccagaacacagtgctggtgtgggtgccctgcttctacctgtgggcctgcttccccttctacttcctgtacctgagcagacatgaccggggctacatccagatgacccccctgaacaagaccaagacagccctgggcttcctgctgtggatcgtgtgctgggccgacctcttctacagcttctgggagaggagccggggcatcttcctggcccctgtgttcctggtgagccccaccctgctgggcatcaccatgctgctggccaccttcctgatccagctggagaggaggaagggcgtgcagagcagcggcatcatgctgaccttctggctggtggccctggtgtgtgccctggccatcctgcggagcaagatcatgacagccctgaaggaggatgcccaggtggacctcttccgggacatcaccttctacgtgtacttcagcctgctgctgatccagctggtgctgagctgcttcagtgacaggagccccctcttcagcgagaccatccatgaccccaacccctgcccagagagcagcgccagcttcctgagccgcatcaccttctggtggatcaccggcctcatcgtgcggggctaccggcagcccctggagggcagtgacctgtggagcctgaacaaggaggacaccagcgagcaggtggtgcctgtgctggtgaagaactggaagaaggaatgtgccaagaccaggaagcagcctgtgaaggtggtgtacagcagcaaggaccctgcccagcccaaggagagcagcaaggtggatgccaatgaggaggtggaggccctgattgtgaagagcccccagaaggagtggaaccccagcctcttcaaggtgctgtacaagaccttcggcccctacttcctgatgtccttcttcttcaaggccatccatgacctgatgatgttttctggcccccagatcctgaagctgctgatcaagtttgtgaatgacaccaaggccccagactggcagggctacttctacacagtgctgctgtttgtgacagcctgcctgcagaccctggtgctgcaccagtacttccacatctgctttgtgtctggcatgaggatcaagacagctgtgattggagctgtgtacaggaaggccctggtgatcaccaacagcgccaggaagagcagcacagtgggggagatcgtgaacctgatgtctgtggatgcccagcgcttcatggacctggccacctacatcaacatgatctggagcgcccccctgcaggtgatcctggccctgtacctgctgtggctgaacctgggccccagcgtgctggccggcgtggccgtgatggtgctgatggtgcctgtgaatgctgtgatggccatgaagaccaagacctaccaggtggcccacatgaagagcaaggacaaccgcatcaagctgatgaatgagatcctgaatggcatcaaggtgctgaagctgtatgcctgggagctggccttcaaggacaaggtgctggccatccggcaggaggagctgaaggtgctgaagaagagcgcctacctgtctgctgtgggcaccttcacctgggtgtgcacccccttcctggtggccctgtgcacctttgctgtgtatgtgaccattgatgagaacaacatcctggatgcccagacagcctttgtgtccctggccctcttcaacatcctgcgcttccccctgaacatcctgcccatggtgatcagcagcatcgtgcaggcctctgtgtccctgaagaggctgcgcatcttcctgagccatgaggagctggagccagacagcattgaaagaagacctgtgaaggatggcggcggcaccaacagcatcaccgtgagaaatgccaccttcacctgggcccggagtgacccccccaccctgaatggcatcaccttcagcatccctgagggcgccctggtggccgtggtgggccaggtgggctgtgggaagagcagcctgctgagcgccctgctggccgagatggacaaggtggagggccacgtggccatcaagacccgcatcctggtgacccacagcatgagctacctgccccaggtggatgtgatcatcgtgatgtctgggggcaagatcagcgagatgggcagctaccaggagctgctggccagagatggagcctttgctgagttcctgcggacctacgccagcacagagcaggagcaggatgctgaagaaaatggagtgactggagtgtctggccctgggaaggaggccaagcagatggagaatggcatgctggtgacagacagcgctgggaagcagctgcagaggcagctgagcagcagcagcagctacagcggggacatcagccgccaccacaacagcacagctgagctgcagaaggccgaggccaagaaggaggagacctggaagctgatggaggccgacaaggcccagacaggccaggtgaagctgtctgtgtactgggactacatgaaggccatcggcctcttcatctccttcctgagcatcttcctgttcatgtgcaaccacgtgtctgccctggccagcaactactggctgagcctgtggacagatgaccccatcgtgaatggcacccaggagcacaccaaggtgcggctgtctgtgtatggagccctgggcatcagccagggcattgctgtgtttggctacagcatggctgtgtccatcggcggcatcctggccagccgctgcctgcacgtggacctgctgcacagcatcctgcggagccccatgtccttctttgagaggacccccagcggcaacctggtgaaccgcttcagcaaggagctggacacagtggacagcatgatccctgaggtgatcaagatgttcatgggcagcctcttcaacgtgattggagcctgcatcgtcatcctgctggccacccccatcgccgccatcatcatcccccccctgggcctcatctacttctttgtgcagcgcttctacgtggccagcagccggcagctgaagaggctggagagcgtgagccgcagccctgtgtacagccacttcaatgagaccctgctgggcgtgtctgtcatccgggcctttgaggagcaggagcgcttcatccaccagagcgacctgaaggtggatgagaaccagaaggcctactaccccagcatcgtggccaaccgctggctggccgtgcggctggagtgtgtgggcaactgcatcgtgctgtttgctgccctgtttgctgtgatcagccgccacagcctgtctgctggcctggtgggcctgtctgtgtcctacagcctgcaggtgaccacctacctgaactggctggtgaggatgagcagcgagatggagaccaacatcgtggccgtggagcggctgaaggagtacagcgagacagagaaggaggccccctggcagatccaggagacagccccacccagctcctggccccaggtgggccgggtggagttcaggaactactgcctgcgctaccgggaggacctggactttgtgctgcggcacatcaacgtgaccatcaatggaggagagaaggtgggcatcgtgggccgcactggagctgggaagagcagcctgaccctgggcctcttccgcatcaatgaatctgctgagggggagatcatcattgatggcatcaacatcgccaagattggcctgcatgacctgcgcttcaagatcaccatcatcccccaggaccctgtgctcttcagcggcagcctgaggatgaacctggaccccttcagccagtacagtgatgaggaggtgtggaccagcctggagctggcccacctgaaggactttgtgtctgccctgcctgacaagctggaccatgaatgtgccgagggcggggagaacctgtctgtgggccagaggcagctggtgtgcctggcccgggccctgctgaggaagaccaagatcctggtgctggatgaggccacagctgctgtggacctggagacagatgacctgatccagagcaccatccgcacccagtttgaggactgcaccgtgctgaccatcgcccaccggctgaacaccatcatggactacaccagggtgattgtgctggacaagggggagatccaggagtatggagcccccagcgacctgctgcagcagaggggcctcttctacagcatggccaaggatgctggcctggtgtag

SEQ ID NO: 151732 - DNA, 4419 bp, Artificial Sequence
  derived and/or modified sequence
atggccctgcggggcttctgcagcgcagatggcagtgaccccctgtgggactggaatgtgacctggaacaccagcaacccagacttcaccaagtgcttccagaacacagtgctggtgtgggtgccctgcttctacctgtgggcctgcttccccttctacttcctgtacctgagcagacatgaccggggctacatccagatgacccccctgaacaagaccaagacagccctgggcttcctgctgtggatcgtgtgctgggccgacctcttctacagcttctgggagaggagccggggcatcttcctggcccctgtgttcctggtgagccccaccctgctgggcatcaccatgctgctggccaccttcctgatccagctggagaggaggaagggcgtgcagagcagcggcatcatgctgaccttctggctggtggccctggtgtgtgccctggccatcctgcggagcaagatcatgacagccctgaaggaggatgcccaggtggacctcttccgggacatcaccttctacgtgtacttcagcctgctgctgatccagctggtgctgagctgcttcagtgacaggagccccctcttcagcgagaccatccatgaccccaacccctgcccagagagcagcgccagcttcctgagccgcatcaccttctggtggatcaccggcctcatcgtgcggggctaccggcagcccctggagggcagtgacctgtggagcctgaacaaggaggacaccagcgagcaggtggtgcctgtgctggtgaagaactggaagaaggaatgtgccaagaccaggaagcagcctgtgaaggtggtgtacagcagcaaggaccctgcccagcccaaggagagcagcaaggtggatgccaatgaggaggtggaggccctgattgtgaagagcccccagaaggagtggaaccccagcctcttcaaggtgctgtacaagaccttcggcccctacttcctgatgtccttcttcttcaaggccatccatgacctgatgatgttttctggcccccagatcctgaagctgctgatcaagtttgtgaatgacaccaaggccccagactggcagggctacttctacacagtgctgctgtttgtgacagcctgcctgcagaccctggtgctgcaccagtacttccacatctgctttgtgtctggcatgaggatcaagacagctgtgattggagctgtgtacaggaaggccctggtgatcaccaacagcgccaggaagagcagcacagtgggggagatcgtgaacctgatgtctgtggatgcccagcgcttcatggacctggccacctacatcaacatgatctggagcgcccccctgcaggtgatcctggccctgtacctgctgtggctgaacctgggccccagcgtgctggccggcgtggccgtgatggtgctgatggtgcctgtgaatgctgtgatggccatgaagaccaagacctaccaggtggcccacatgaagagcaaggacaaccgcatcaagctgatgaatgagatcctgaatggcatcaaggtgctgaagctgtatgcctgggagctggccttcaaggacaaggtgctggccatccggcaggaggagctgaaggtgctgaagaagagcgcctacctgtctgctgtgggcaccttcacctgggtgtgcacccccttcctggtggccctgtgcacctttgctgtgtatgtgaccattgatgagaacaacatcctggatgcccagacagcctttgtgtccctggccctcttcaacatcctgcgcttccccctgaacatcctgcccatggtgatcagcagcatcgtgcaggcctctgtgtccctgaagaggctgcgcatcttcctgagccatgaggagctggagccagacagcattgaaagaagacctgtgaaggatggcggcggcaccaacagcatcaccgtgagaaatgccaccttcacctgggcccggagtgacccccccaccctgaatggcatcaccttcagcatccctgagggcgccctggtggccgtggtgggccaggtgggctgtgggaagagcagcctgctgagcgccctgctggccgagatggacaaggtggagggccacgtggccatcaagggcgtgaacctgagcggcggccagaagcagagggtgtccctggcccgggctgtgtacagcaatgctgacatctacctgtttgatgaccccctgtctgctgtggatgcccacgtgggcaagcacatctttgaaaatgtcatcggccccaagggcatgctgaagaacaagacccgcatcctggtgacccacagcatgagctacctgccccaggtggatgtgatcatcgtgatgtctgggggcaagatcagcgagatgggcagctaccaggagctgctggccagagatggagcctttgctgagttcctgcggacctacgccagcacagagcaggagcaggatgctgaagaaaatggagtgactggagtgtctggccctgggaaggaggccaagcagatggagaatggcatgctggtgacagacagcgctgggaagcagctgcagaggcagctgagcagcagcagcagctacagcggggacatcagccgccaccacaacagcacagctgagctgcagaaggccgaggccaagaaggaggagacctggaagctgatggaggccgacaaggcccagacaggccaggtgaagctgtctgtgtactgggactacatgaaggccatcggcctcttcatctccttcctgagcatcttcctgttcatgtgcaaccacgtgtctgccctggccagcaactactggctgagcctgtggacagatgaccccatcgtgaatggcacccaggagcacaccaaggtgcggctgtctgtgtatggagccctgggcatcagccagggcattgctgtgtttggctacagcatggctgtgtccatcggcggcatcctggccagccgctgcctgcacgtggacctgctgcacagcatcctgcggagccccatgtccttctttgagaggacccccagcggcaacctggtgaaccgcttcagcaaggagctggacacagtggacagcatgatccctgaggtgatcaagatgttcatgggcagcctcttcaacgtgattggagcctgcatcgtcatcctgctggccacccccatcgccgccatcatcatcccccccctgggcctcatctacttctttgtgcagcgcttctacgtggccagcagccggcagctgaagaggctggagagcgtgagccgcagccctgtgtacagccacttcaatgagaccctgctgggcgtgtctgtcatccgggcctttgaggagcaggagcgcttcatccaccagagcgacctgaaggtggatgagaaccagaaggcctactaccccagcatcgtggccaaccgctggctggccgtgcggctggagtgtgtgggcaactgcatcgtgctgtttgctgccctgtttgctgtgatcagccgccacagcctgtctgctggcctggtgggcctgtctgtgtcctacagcctgcaggtgaccacctacctgaactggctggtgaggatgagcagcgagatggagaccaacatcgtggccgtggagcggctgaaggagtacagcgagacagagaaggaggccccctggcagatccaggagacagccccacccagctcctggccccaggtgggccgggtggagttcaggaactactgcctgcgctaccgggaggacctggactttgtgctgcggcacatcaacgtgaccatcaatggaggagagaaggtgggcatcgtgggccgcactggagctgggaagagcagcctgaccctgggcctcttccgcatcaatgaatctgctgagggggagatcatcattgatggcatcaacatcgccaagattggcctgcatgacctgcgcttcaagatcaccatcatcccccaggaccctgtgctcttcagcggcagcctgaggatgaacctggaccccttcagccagtacagtgatgaggaggtgtggaccagcctggagctggcccacctgaaggactttgtgtctgccctgcctgacaagctggaccatgaatgtgccgagggcggggagaacctgtctgtgggccagaggcagctggtgtgcctggcccgggccctgctgaggaagaccaagatcctggtgctggatgaggccacagctgctgtggacctggagacagatgacctgatccagagcaccatccgcacccagtttgaggactgcaccgtgctgaccatcgcccaccggctgaacaccatcatggactacaccagggtgattgtgctggacaagggggagatccaggagtatggagcccccagcgacctgctgcagcagaggggcctcttctacagcatggccaaggatgctggcctggtgtag

SEQ ID NO: 151733 - DNA, 4626 bp, Artificial Sequence
  derived and/or modified sequence
atggccctgcggggcttctgcagcgcagatggcagtgaccccctgtgggactggaatgtgacctggaacaccagcaacccagacttcaccaagtgcttccagaacacagtgctggtgtgggtgccctgcttctacctgtgggcctgcttccccttctacttcctgtacctgagcagacatgaccggggctacatccagatgacccccctgaacaagaccaagacagccctgggcttcctgctgtggatcgtgtgctgggccgacctcttctacagcttctgggagaggagccggggcatcttcctggcccctgtgttcctggtgagccccaccctgctgggcatcaccatgctgctggccaccttcctgatccagctggagaggaggaagggcgtgcagagcagcggcatcatgctgaccttctggctggtggccctggtgtgtgccctggccatcctgcggagcaagatcatgacagccctgaaggaggatgcccaggtggacctcttccgggacatcaccttctacgtgtacttcagcctgctgctgatccagctggtgctgagctgcttcagtgacaggagccccctcttcagcgagaccatccatgaccccaacccctgcccagagagcagcgccagcttcctgagccgcatcaccttctggtggatcaccggcctcatcgtgcggggctaccggcagcccctggagggcagtgacctgtggagcctgaacaaggaggacaccagcgagcaggtggtgcctgtgctggtgaagaactggaagaaggaatgtgccaagaccaggaagcagcctgtgaaggtggtgtacagcagcaaggaccctgcccagcccaaggagagcagcaaggtggatgccaatgaggaggtggaggccctgattgtgaagagcccccagaaggagtggaaccccagcctcttcaaggtgctgtacaagaccttcggcccctacttcctgatgtccttcttcttcaaggccatccatgacctgatgatgttttctggcccccagatcctgaagctgctgatcaagtttgtgaatgacaccaaggccccagactggcagggctacttctacacagtgctgctgtttgtgacagcctgcctgcagaccctggtgctgcaccagtacttccacatctgctttgtgtctggcatgaggatcaagacagctgtgattggagctgtgtacaggaaggccctggtgatcaccaacagcgccaggaagagcagcacagtgggggagatcgtgaacctgatgtctgtggatgcccagcgcttcatggacctggccacctacatcaacatgatctggagcgcccccctgcaggtgatcctggccctgtacctgctgtggctgaacctgggccccagcgtgctggccggcgtggccgtgatggtgctgatggtgcctgtgaatgctgtgatggccatgaagaccaagacctaccaggtggcccacatgaagagcaaggacaaccgcatcaagctgatgaatgagatcctgaatggcatcaaggtgctgaagctgtatgcctgggagctggccttcaaggacaaggtgctggccatccggcaggaggagctgaaggtgctgaagaagagcgcctacctgtctgctgtgggcaccttcacctgggtgtgcacccccttcctggtggccctgtgcacctttgctgtgtatgtgaccattgatgagaacaacatcctggatgcccagacagcctttgtgtccctggccctcttcaacatcctgcgcttccccctgaacatcctgcccatggtgatcagcagcatcgtgcaggcctctgtgtccctgaagaggctgcgcatcttcctgagccatgaggagctggagccagacagcattgaaagaagacctgtgaaggatggcggcggcaccaacagcatcaccgtgagaaatgccaccttcacctgggcccggagtgacccccccaccctgaatggcatcaccttcagcatccctgagggcgccctggtggccgtggtgggccaggtgggctgtgggaagagcagcctgctgagcgccctgctggccgagatggacaaggtggagggccacgtggccatcaagggctctgtggcctacgtgccccagcaggcctggatccagaatgacagcctgcgggagaacatcctgtttggctgccagctggaggagccctactacagaagtgtcatccaggcctgtgccctgctgcctgacctggagatcctgcccagcggggacagaacagaaattggagagaagggcgtgaacctgagcggcggccagaagcagagggtgtccctggcccgggctgtgtacagcaatgctgacatctacctgtttgatgaccccctgtctgctgtggatgcccacgtgggcaagcacatctttgaaaatgtgattggccccaagggcatgctgaagaacaagacccgcatcctggtgacccacagcatgagctacctgccccaggtggatgtgatcatcgtgatgtctgggggcaagatcagcgagatgggcagctaccaggagctgctggccagagatggagcctttgctgagttcctgcggacctacgccagcacagagcaggagcaggatgctgaggagaatggcagcacagtgatggatgaggaggaggccggcgtgactggagtgtctggccctgggaaggaggccaagcagatggagaatggcatgctggtgacagattctgctgggaagcagctgcagaggcagctgagcagcagcagcagctacagcggggacatcagccgccaccacaacagcacagctgagctgcagaaggccgaggccaagaaggaggagacctggaagctgatggaggccgacaaggcccagacaggccaggtgaagctgtctgtgtactgggactacatgaaggccatcggcctcttcatctccttcctgagcatcttcctgttcatgtgcaaccacgtgtctgccctggccagcaactactggctgagcctgtggacagatgaccccatcgtgaatggcacccaggagcacaccaaggtgcggctgtctgtgtatggagccctgggcatcagccagggcattgctgtgtttggctacagcatggctgtgtccattggaggcatcctggccagccgctgcctgcacgtggacctgctgcacagcatcctgcggagccccatgtccttctttgagaggaccccatctggcaacctggtgaaccgcttcagcaaggagctggacacagtggacagcatgatccctgaggtgatcaagatgttcatgggcagcctcttcaacgtcatcggggcctgcatcgtcatcctgctggccacccccatcgccgccatcatcatcccccccctgggcctcatctacttctttgtgcagcgcttctacgtggccagcagccggcagctgaagaggctggagagcgtgagccgcagccctgtgtacagccacttcaatgagaccctgctgggcgtgtctgtcatccgggcctttgaggagcaggagcgcttcatccaccagagcgacctgaaggtggatgagaaccagaaggcctactaccccagcatcgtggccaaccgctggctggccgtgcggctggagtgtgtgggcaactgcatcgtgctgtttgctgccctgtttgctgtgatcagccgccacagcctgtctgctggcctggtgggcctgtctgtgtcctacagcctgcaggtgaccacctacctgaactggctggtgaggatgagcagcgagatggagaccaacatcgtggccgtggagcggctgaaggagtacagcgagacagagaaggaggccccctggcagatccaggagacagccccacccagctcctggccccaggtgggccgggtggagttcaggaactactgcctgcgctaccgggaggacctggactttgtgctgcggcacatcaacgtgaccatcaatggaggagagaaggtgggcatcgtgggccgcactggagctgggaagagcagcctgaccctgggcctcttccgcatcaatgaatctgctgagggggagatcatcattgatggcatcaacatcgccaagattggcctgcatgacctgcgcttcaagatcaccatcatcccccaggaccctgtgctcttcagcggcagcctgaggatgaacctggaccccttcagccagtacagtgatgaggaggtgtggaccagcctggagctggcccacctgaaggactttgtgtctgccctgcctgacaagctggaccatgaatgtgccgagggcggggagaacctgtctgtgggccagaggcagctggtgtgcctggcccgggccctgctgaggaagaccaagatcctggtgctggatgaggccacagctgctgtggacctggagacagatgacctgatccagagcaccatccgcacccagtttgaggactgcaccgtgctgaccatcgcccaccggctgaacaccatcatggactacaccagggtcatcgtgctggacaagggggagatccaggagtatggagcccccagcgacctgctgcagcagaggggcctcttctacagcatggccaaggatgctggcctggtgtag

SEQ ID NO: 151734 - DNA, 4596 bp, Artificial Sequence
  derived and/or modified sequence
atggccctgcggggcttctgcagcgcagatggcagtgaccccctgtgggactggaatgtgacctggaacaccagcaacccagacttcaccaagtgcttccagaacacagtgctggtgtgggtgccctgcttctacctgtgggcctgcttccccttctacttcctgtacctgagcagacatgaccggggctacatccagatgacccccctgaacaagaccaagacagccctgggcttcctgctgtggatcgtgtgctgggccgacctcttctacagcttctgggagaggagccggggcatcttcctggcccctgtgttcctggtgagccccaccctgctgggcatcaccatgctgctggccaccttcctgatccagctggagaggaggaagggcgtgcagagcagcggcatcatgctgaccttctggctggtggccctggtgtgtgccctggccatcctgcggagcaagatcatgacagccctgaaggaggatgcccaggtggacctcttccgggacatcaccttctacgtgtacttcagcctgctgctgatccagctggtgctgagctgcttcagtgacaggagccccctcttcagcgagaccatccatgaccccaacccctgcccagagagcagcgccagcttcctgagccgcatcaccttctggtggatcaccggcctcatcgtgcggggctaccggcagcccctggagggcagtgacctgtggagcctgaacaaggaggacaccagcgagcaggtggtgcctgtgctggtgaagaactggaagaaggaatgtgccaagaccaggaagcagcctgtgaaggtggtgtacagcagcaaggaccctgcccagcccaaggagagcagcaaggtggatgccaatgaggaggtggaggccctgattgtgaagagcccccagaaggagtggaaccccagcctcttcaaggtgctgtacaagaccttcggcccctacttcctgatgtccttcttcttcaaggccatccatgacctgatgatgttttctggcccccagatcctgaagctgctgatcaagtttgtgaatgacaccaaggccccagactggcagggctacttctacacagtgctgctgtttgtgacagcctgcctgcagaccctggtgctgcaccagtacttccacatctgctttgtgtctggcatgaggatcaagacagctgtgattggagctgtgtacaggaaggccctggtgatcaccaacagcgccaggaagagcagcacagtgggggagatcgtgaacctgatgtctgtggatgcccagcgcttcatggacctggccacctacatcaacatgatctggagcgcccccctgcaggtgatcctggccctgtacctgctgtggctgaacctgggccccagcgtgctggccggcgtggccgtgatggtgctgatggtgcctgtgaatgctgtgatggccatgaagaccaagacctaccaggtggcccacatgaagagcaaggacaaccgcatcaagctgatgaatgagatcctgaatggcatcaaggtgctgaagctgtatgcctgggagctggccttcaaggacaaggtgctggccatccggcaggaggagctgaaggtgctgaagaagagcgcctacctgtctgctgtgggcaccttcacctgggtgtgcacccccttcctggtggccctgtgcacctttgctgtgtatgtgaccattgatgagaacaacatcctggatgcccagacagcctttgtgtccctggccctcttcaacatcctgcgcttccccctgaacatcctgcccatggtgatcagcagcatcgtgcaggcctctgtgtccctgaagaggctgcgcatcttcctgagccatgaggagctggagccagacagcattgaaagaagacctgtgaaggatggcggcggcaccaacagcatcaccgtgagaaatgccaccttcacctgggcccggagtgacccccccaccctgaatggcatcaccttcagcatccctgagggcgccctggtggccgtggtgggccaggtgggctgtgggaagagcagcctgctgagcgccctgctggccgagatggacaaggtggagggccacgtggccatcaagggctctgtggcctacgtgccccagcaggcctggatccagaatgacagcctgcgggagaacatcctgtttggctgccagctggaggagccctactacagaagtgtcatccaggcctgtgccctgctgcctgacctggagatcctgcccagcggggacagaacagaaattggagagaagggcgtgaacctgagcggcggccagaagcagagggtgtccctggcccgggctgtgtacagcaatgctgacatctacctgtttgatgaccccctgtctgctgtggatgcccacgtgggcaagcacatctttgaaaatgtgattggccccaagggcatgctgaagaacaagacccgcatcctggtgacccacagcatgagctacctgccccaggtggatgtgatcatcgtgatgtctgggggcaagatcagcgagatgggcagctaccaggagctgctggccagagatggagcctttgctgagttcctgcggacctacgccagcacagagcaggagcaggatgctgaggagaatggagtgactggagtgtctggccctgggaaggaggccaagcagatggagaatggcatgctggtgacagattctgctgggaagcagctgcagaggcagctgagcagcagcagcagctacagcggggacatcagccgccaccacaacagcacagctgagctgcagaaggccgaggccaagaaggaggagacctggaagctgatggaggccgacaaggcccagacaggccaggtgaagctgtctgtgtactgggactacatgaaggccatcggcctcttcatctccttcctgagcatcttcctgttcatgtgcaaccacgtgtctgccctggccagcaactactggctgagcctgtggacagatgaccccatcgtgaatggcacccaggagcacaccaaggtgcggctgtctgtgtatggagccctgggcatcagccagggcattgctgtgtttggctacagcatggctgtgtccattggaggcatcctggccagccgctgcctgcacgtggacctgctgcacagcatcctgcggagccccatgtccttctttgagaggaccccatctggcaacctggtgaaccgcttcagcaaggagctggacacagtggacagcatgatccctgaggtgatcaagatgttcatgggcagcctcttcaacgtcatcggggcctgcatcgtcatcctgctggccacccccatcgccgccatcatcatcccccccctgggcctcatctacttctttgtgcagcgcttctacgtggccagcagccggcagctgaagaggctggagagcgtgagccgcagccctgtgtacagccacttcaatgagaccctgctgggcgtgtctgtcatccgggcctttgaggagcaggagcgcttcatccaccagagcgacctgaaggtggatgagaaccagaaggcctactaccccagcatcgtggccaaccgctggctggccgtgcggctggagtgtgtgggcaactgcatcgtgctgtttgctgccctgtttgctgtgatcagccgccacagcctgtctgctggcctggtgggcctgtctgtgtcctacagcctgcaggtgaccacctacctgaactggctggtgaggatgagcagcgagatggagaccaacatcgtggccgtggagcggctgaaggagtacagcgagacagagaaggaggccccctggcagatccaggagacagccccacccagctcctggccccaggtgggccgggtggagttcaggaactactgcctgcgctaccgggaggacctggactttgtgctgcggcacatcaacgtgaccatcaatggaggagagaaggtgggcatcgtgggccgcactggagctgggaagagcagcctgaccctgggcctcttccgcatcaatgaatctgctgagggggagatcatcattgatggcatcaacatcgccaagattggcctgcatgacctgcgcttcaagatcaccatcatcccccaggaccctgtgctcttcagcggcagcctgaggatgaacctggaccccttcagccagtacagtgatgaggaggtgtggaccagcctggagctggcccacctgaaggactttgtgtctgccctgcctgacaagctggaccatgaatgtgccgagggcggggagaacctgtctgtgggccagaggcagctggtgtgcctggcccgggccctgctgaggaagaccaagatcctggtgctggatgaggccacagctgctgtggacctggagacagatgacctgatccagagcaccatccgcacccagtttgaggactgcaccgtgctgaccatcgcccaccggctgaacaccatcatggactacaccagggtcatcgtgctggacaagggggagatccaggagtatggagcccccagcgacctgctgcagcagaggggcctcttctacagcatggccaaggatgctggcctggtgtag

SEQ ID NO: 151735 - DNA, 3648 bp, Artificial Sequence
  derived and/or modified sequence
atgtccttcttcttcaaggccatccatgacctgatgatgttttctggcccccagatcctgaagctgctgatcaagtttgtgaatgacaccaaggccccagactggcagggctacttctacacagtgctgctgtttgtgacagcctgcctgcagaccctggtgctgcaccagtacttccacatctgctttgtgtctggcatgaggatcaagacagctgtgattggagctgtgtacaggaaggccctggtgatcaccaacagcgccaggaagagcagcacagtgggggagatcgtgaacctgatgtctgtggatgcccagcgcttcatggacctggccacctacatcaacatgatctggagcgcccccctgcaggtgatcctggccctgtacctgctgtggctgaacctgggccccagcgtgctggccggcgtggccgtgatggtgctgatggtgcctgtgaatgctgtgatggccatgaagaccaagacctaccaggtggcccacatgaagagcaaggacaaccgcatcaagctgatgaatgagatcctgaatggcatcaaggtgctgaagctgtatgcctgggagctggccttcaaggacaaggtgctggccatccggcaggaggagctgaaggtgctgaagaagagcgcctacctgtctgctgtgggcaccttcacctgggtgtgcacccccttcctggtggccctgtgcacctttgctgtgtatgtgaccattgatgagaacaacatcctggatgcccagacagcctttgtgtccctggccctcttcaacatcctgcgcttccccctgaacatcctgcccatggtgatcagcagcatcgtgcaggcctctgtgtccctgaagaggctgcgcatcttcctgagccatgaggagctggagccagacagcattgaaagaagacctgtgaaggatggcggcggcaccaacagcatcaccgtgagaaatgccaccttcacctgggcccggagtgacccccccaccctgaatggcatcaccttcagcatccctgagggcgccctggtggccgtggtgggccaggtgggctgtgggaagagcagcctgctgagcgccctgctggccgagatggacaaggtggagggccacgtggccatcaagggctctgtggcctacgtgccccagcaggcctggatccagaatgacagcctgcgggagaacatcctgtttggctgccagctggaggagccctactacagaagtgtcatccaggcctgtgccctgctgcctgacctggagatcctgcccagcggggacagaacagaaattggagagaagggcgtgaacctgagcggcggccagaagcagagggtgtccctggcccgggctgtgtacagcaatgctgacatctacctgtttgatgaccccctgtctgctgtggatgcccacgtgggcaagcacatctttgaaaatgtgattggccccaagggcatgctgaagaacaagacccgcatcctggtgacccacagcatgagctacctgccccaggtggatgtgatcatcgtgatgtctgggggcaagatcagcgagatgggcagctaccaggagctgctggccagagatggagcctttgctgagttcctgcggacctacgccagcacagagcaggagcaggatgctgaggagaatggcagcacagtgatggatgaggaggaggccggcgtgactggagtgtctggccctgggaaggaggccaagcagatggagaatggcatgctggtgacagattctgctgggaagcagctgcagaggcagctgagcagcagcagcagctacagcggggacatcagccgccaccacaacagcacagctgagctgcagaaggccgaggccaagaaggaggagacctggaagctgatggaggccgacaaggcccagacaggccaggtgaagctgtctgtgtactgggactacatgaaggccatcggcctcttcatctccttcctgagcatcttcctgttcatgtgcaaccacgtgtctgccctggccagcaactactggctgagcctgtggacagatgaccccatcgtgaatggcacccaggagcacaccaaggtgcggctgtctgtgtatggagccctgggcatcagccagggcattgctgtgtttggctacagcatggctgtgtccattggaggcatcctggccagccgctgcctgcacgtggacctgctgcacagcatcctgcggagccccatgtccttctttgagaggaccccatctggcaacctggtgaaccgcttcagcaaggagctggacacagtggacagcatgatccctgaggtgatcaagatgttcatgggcagcctcttcaacgtcatcggggcctgcatcgtcatcctgctggccacccccatcgccgccatcatcatcccccccctgggcctcatctacttctttgtgcagcgcttctacgtggccagcagccggcagctgaagaggctggagagcgtgagccgcagccctgtgtacagccacttcaatgagaccctgctgggcgtgtctgtcatccgggcctttgaggagcaggagcgcttcatccaccagagcgacctgaaggtggatgagaaccagaaggcctactaccccagcatcgtggccaaccgctggctggccgtgcggctggagtgtgtgggcaactgcatcgtgctgtttgctgccctgtttgctgtgatcagccgccacagcctgtctgctggcctggtgggcctgtctgtgtcctacagcctgcaggtgaccacctacctgaactggctggtgaggatgagcagcgagatggagaccaacatcgtggccgtggagcggctgaaggagtacagcgagacagagaaggaggccccctggcagatccaggagacagccccacccagctcctggccccaggtgggccgggtggagttcaggaactactgcctgcgctaccgggaggacctggactttgtgctgcggcacatcaacgtgaccatcaatggaggagagaaggtgggcatcgtgggccgcactggagctgggaagagcagcctgaccctgggcctcttccgcatcaatgaatctgctgagggggagatcatcattgatggcatcaacatcgccaagattggcctgcatgacctgcgcttcaagatcaccatcatcccccaggaccctgtgctcttcagcggcagcctgaggatgaacctggaccccttcagccagtacagtgatgaggaggtgtggaccagcctggagctggcccacctgaaggactttgtgtctgccctgcctgacaagctggaccatgaatgtgccgagggcggggagaacctgtctgtgggccagaggcagctggtgtgcctggcccgggccctgctgaggaagaccaagatcctggtgctggatgaggccacagctgctgtggacctggagacagatgacctgatccagagcaccatccgcacccagtttgaggactgcaccgtgctgaccatcgcccaccggctgaacaccatcatggactacaccagggtcatcgtgctggacaagggggagatccaggagtatggagcccccagcgacctgctgcagcagaggggcctcttctacagcatggccaaggatgctggcctggtgtag

SEQ ID NO: 151736 - DNA, 4401 bp, Artificial Sequence
  derived and/or modified sequence
atggccctgcggggcttctgcagcgccgacggcagcgaccccctgtgggactggaatgtgacttggaacacttccaaccctgacttcacaaagtgtttccaaaatacagtactggtctgggtgccctgtttttatttatgggcttgcttccctttctactttttgtacctgtcacggcatgatagaggatatatccagatgactcctctgaacaaaacaaaaactgccctcggtttcctgctctggattgtgtgttgggccgacctgttctactcattctgggaacgcagccggggcattttcctcgcccctgtgtttctggtcagccccacactgctcggaatcaccatgttgctcgccacgtttctgatccaattagagaggagaaagggagttcaatctagcggcattatgctgacgttttggctggtggctctcgtgtgtgccctggcaattctgcgaagcaaaattatgacagcgctaaaggaggacgcacaggtggatctgttccgcgacatcacattttatgtctatttctccctactgctgattcagcttgtgctgtcatgcttcagtgaccgttctccacttttttcagagaccatccacgatcccaacccttgccctgaatcttctgcatctttcctgagtaggatcaccttttggtggattaccgggctcatcgtgcggggatatcggcagccattggagggctcagacctgtggtccttgaataaggaggacacatccgagcaggtggtgcctgtcctggtgaaaaattggaagaaagagtgcgccaagacaagaaagcagcctgttaaggtcgtatactcttccaaagatcccgctcagccaaaagagtcgtccaaagtggatgccaacgaggaggtggaggccctgatcgtcaagagcccccaaaaggaatggaacccctccctctttaaggtgctctataaaacgtttggcccttacttcctgatgagtttcttttttaaagccattcacgatctcatgatgttttctggccctcagattttgaagcttctgatcaaatttgttaacgatactaaggctcccgactggcaggggtacttctacaccgtgctcctctttgtcacagcctgtttgcagactctggtccttcatcagtactttcacatctgttttgtcagcgggatgaggattaaaaccgctgttattggagcagtatacaggaaggcactggtcataaccaacagcgcccgaaagtcctccaccgtgggcgaaatagtaaatctgatgtctgttgacgcccagcgctttatggatctggcaacctatattaacatgatctggagcgctccgctccaggtcattctggctctgtatctactgtggctgaatctgggcccgtccgttctcgcaggggtggccgtgatggtgttaatggtccccgtgaacgctgtgatggctatgaagacaaaaacctatcaggtggcccatatgaagtccaaagacaatcgcatcaaacttatgaatgaaatattaaatggtataaaagtgcttaaactctacgcatgggaactggcattcaaagataaggtgttagctattcgccaggaagaattgaaggttttgaaaaagtcagcttatctcagtgcagtgggtaccttcacttgggtgtgcactccttttctcgtagcactctgtacatttgcggtgtacgtgactatcgacgaaaacaacatcctggacgcccagactgcattcgtatccttggcgctttttaatattttgcgctttcccctgaatatattgcctatggtaatttcgtccattgtccaggcatctgtctccctaaaaagactgagaatattcctgagtcatgaagaacttgagccggatagtatcgagcggagacccgtaaaggacggcggaggcacaaattctattactgtgagaaatgcaacatttacatgggcacgctccgatccaccaacactaaatgggattaccttttcaatcccagagggtgcgctggtggctgtggtcggacaagttgggtgtggaaaatcctctctcctgtccgccctactggccgagatggacaaagtggagggtcacgtagccatcaaagggtcagtcgcatatgtgccccagcaagcgtggatccagaacgacagtttgagggaaaacatactgttcggctgccagttagaggaaccctactacaggagtgtgattcaagcgtgtgcattactgcctgatcttgagatcctgccatcgggcgatcgcaccgaaattggggaaaaaggcgtgaatctgtcaggagggcagaagcagagagtctctctcgcccgggctgtttactctaatgctgacatctatctgttcgatgaccctcttagtgccgttgacgcccatgtcgggaaacatatcttcgaaaatgtcatcggtccaaaaggtatgctgaagaacaaaactcgaatcctcgtgacccacagcatgtcctaccttccacaggtggatgtgatcatcgttatgagcgggggcaagatctcggaaatgggcagctaccaggagctgctggcgcgagatggcgcctttgccgaattcctgagaacctacgcctccaccgagcaagaacaggacgcagaagaaaatggcgtgacaggggtgtcaggcccggggaaagaggcgaagcaaatggagaatggtatgctggtgacggattctgcaggcaagcaacttcagaggcaattatcctctagttcttcctactccggggacattagcagacatcacaactcaactgcagagctgcagaaggccgaggccaagaaagaggaaacatggaaactcatggaggccgacaaggcacagaccgggcaggtgaaactatctgtatattgggactacatgaaagcaatcggcctgtttatctcgttcctttccatatttctgttcatgtgcaaccacgtttcagctctagccagcaactattggctgtccctttggaccgacgacccaattgtcaacggaacacaggagcataccaaagtcagattatccgtttacggagctctcggcatcagccagggtatcgccgtctttggatactccatggcggtctcaatcggcggcatcttagcaagccgttgtctgcacgtggatcttctccactctattctccgatctcctatgtccttctttgagaggacaccatcggggaatctggtgaatagattctccaaggagctggatacagttgatagcatgatcccggaggtaatcaagatgtttatgggctcccttttcaacgtgatcggagcctgtatcgttatccttctcgctaccccgattgctgccatcatcattccccccctcggcctgatatattttttcgtccagcggttctacgtggcgtcttctcggcagctgaagagattggagagcgttagccgctcacccgtttactcgcatttcaatgagaccctgcttggcgtctctgtgattcgcgcctttgaagagcaggagaggttcattcaccaaagcgacctaaaggtagatgaaaaccagaaggcttactacccgagtatcgtggctaatcgctggctcgctgtccgactggaatgcgtcggtaattgtatcgtcctattcgctgctcttttcgcagtgatttcccggcatagccttagcgccggcttagtaggattgtcagtctcgtattccttgcaggtcaccacatacttaaattggctcgtaaggatgtcttcggagatggagacaaatatcgtcgcggtggaacggttgaaggaatactccgagactgagaaagaggccccctggcagatacaggagaccgcccccccctcaagctggccacaagttggaagagtggagttcaggaattactgtttgaggtatcgggaggatctggacttcgtgctacggcatattaacgtaactatcaatgggggcgagaaggtgggaatcgtcggtcggaccggtgctggaaaaagctccctgacactggggctttttaggattaacgagagcgccgaaggcgagataatcattgacggtattaacatcgccaaaattggcctccacgacctgcgatttaaaataacaattattccacaagacccagtgctgttttctggaagtttgcgcatgaatctggaccctttttcccagtacagcgacgaagaggtctggacttcccttgagctcgcccacctcaaggatttcgtttctgccttacccgacaaactcgaccacgaatgcgccgaaggcggggaaaatctcagagtcattgtgctcgataaaggggagatccaggaatacggtgccccttcagatctgctacagcagaggggccttttctactccatggcaaaggatgccggactagtctag

SEQ ID NO: 151737 - DNA, 4428 bp, Artificial Sequence
  derived and/or modified sequence
atggccctgcggggcttctgcagcgccgacggcagcgaccccctgtgggactggaatgtaacttggaacacttctaatcctgacttcacaaaatgcttccaaaacactgttttagtgtgggttccatgtttctatctatgggcctgcttccccttttactttctgtatttgagccgacatgatcggggttacattcagatgacccccctcaacaaaaccaagactgccctaggctttcttctctggattgtctgctgggcagacttgttctacagtttttgggagcgatcgcgaggaatctttttagccccagtattcctggtctctcccactctgctggggatcaccatgctcttggccactttcctgattcagctggaacgaaggaagggtgtccagtcaagtggcatcatgctgacgttttggttagtcgctctagtttgtgctctggctattctgagatctaaaatcatgacggcattgaaagaagatgcacaagttgacttattccgcgacatcactttctatgtgtattttagtttactgctgatccagctggttcttagctgtttttccgatcgaagcccactgttttctgaaacaatccatgatcccaacccctgtccggagagctctgccagctttctgtcccgtatcaccttttggtggatcaccggcctcatcgtccggggttaccgccagccactggaggggagcgacctatggtctcttaacaaagaggatacatctgaacaggtggtccccgtgcttgtgaaaaattggaagaaagaatgcgcaaagaccaggaagcagcccgtgaaggtagtctactcttctaaggatccggctcaacctaaagagtcttctaaggtcgacgctaatgaagaggtagaggccctgatcgtgaagtctccccaaaaggaatggaatccttccctcttcaaggtgttatacaaaacatttggtccctatttcttaatgtctttcttcttcaaagccatccacgatctgatgatgttctcaggcccgcagatactcaaactgctgatcaagtttgtgaatgacaccaaagcaccagactggcagggatacttttacactgttcttcttttcgtgactgcatgcttgcaaaccctggtgctgcatcagtatttccacatttgcttcgtgtccggtatgcgaattaagacagccgttatcggcgcagtctatcggaaggctctcgtcatcaccaatagcgcacgcaaaagctccaccgttggagaaattgttaaccttatgtccgtggatgctcagcgatttatggatttggcgacctacatcaacatgatttggtcggcccccctacaggtaatactcgcactgtacctcctgtggctgaatttgggcccatctgtactggctggcgtagcggttatggtcttaatggtgccagtgaatgctgtaatggccatgaaaactaaaacctaccaagtggcccacatgaaatcaaaagacaatcggattaaacttatgaacgagatccttaacggcatcaaggtgctgaaactgtatgcttgggagcttgccttcaaggataaggtcttggccataaggcaggaagagctgaaggttctgaaaaagtcggcatacctatccgcagtcggtacatttacttgggtctgtactcctttcttagtggctttgtgcacctttgcggtgtatgtaacaattgacgagaacaacattctcgacgcccagactgcgttcgtgagcctcgcactgtttaatatcttgaggtttccattgaacatcctccccatggtgatttcctccatcgtacaggcttccgtgagcttgaaaaggttacggatcttcctgagtcacgaggagctggagcccgatagtattgagagacgtccagtaaaggacggtggcggaactaactccataacagtgcgcaatgccactttcacttgggctcgctccgatccccccactcttaacggtataaccttcagtatcccagagggggcgctagtcgctgtcgtcggccaggtggggtgtggtaagagctccctgctttctgcactgttggcggaaatggataaggtagaggggcacgtggcaattaaaggctccgttgcctacgtgcctcagcaagcttggatccaaaacgactcccttcgggaaaacatcctctttggctgccaattggaggagccctactatcggagcgtgatacaggcctgcgctctgctgcctgacctggaaatcctgccgtccggggaccgcaccgaaataggcgaaaagactcggattctggtcacccactcaatgagttacctcccacaggtggacgtgattatcgtgatgtcggggggaaagatctccgaaatgggctcctatcaggagttactggcacgcgacggcgcctttgcagaatttttacggacatacgctagcacagaacaggagcaggacgctgaggaaaatggagttactggcgtgtcagggccgggcaaagaggccaagcagatggaaaatggaatgctagttacagacagcgctggaaaacagcttcagagacaactgtcgtcttcatcttcgtattccggcgacataagccggcaccacaatagtacagctgagctgcagaaagccgaagctaagaaagaggagacttggaaactcatggaggccgacaaggcccaaaccggccaagtgaaacttagcgtgtattgggattacatgaaagccattggattgttcatttcatttctatcaatatttctttttatgtgcaatcacgttagcgctcttgccagtaattattggttgagcctgtggacagacgatcccatcgtgaatgggacacaggaacacactaaggtgagactgagcgtatatggtgcccttggcatctctcaaggtatcgctgtgtttggctacagcatggcagtatctattggcgggatcctcgcttcacgttgtctgcatgtggacctgctacattctattctccgctcacccatgtcattctttgaacgcaccccttcaggaaatctggtcaaccgcttttccaaggagctggataccgtcgacagcatgatccccgaagtgattaagatgtttatgggcagcttattcaacgtcatcggagcctgcatcgtaattctgctcgcaacgcctattgcagccataatcatccctccacttggcctcatttacttcttcgtgcaacggttttacgttgccagttcccggcagctgaaaagattagaatccgtatcacgctcacctgtgtacagtcattttaatgaaacactgctgggtgtgagtgtcatcagggctttcgaggagcaagaacgatttatccaccaaagcgatctaaaagtggatgagaaccagaaggcatattaccccagtatcgtcgccaacagatggctggccgttcgcctagaatgcgtgggcaactgcatcgttctctttgcggctctgtttgctgttattagtcgccactccctgagcgccgggttggttgggctgtctgtaagctacagtctgcaagtaactacctacctgaactggctggtgcggatgagttcggaaatggagactaatattgtggctgtcgagcgcctgaaggaatactcagaaacagaaaaggaggctccttggcagattcaggaaactgcgcccccatctagctggccccaggtgggacgcgtggagttcagaaattactgtttaaggtaccgcgaggacctcgattttgtgctcaggcacatcaacgtaacaataaacgggggcgagaaggtcggcatagtagggcgaaccggcgcgggaaaatcatcactgacccttggattgttccggatcaacgaatccgccgaaggcgaaatcataatcgacggaattaatattgccaagattggtctgcatgatttgagattcaagataacaatcattccccaagaccccgtcctatttagcgggagcctccgcatgaatctggatcctttttcccagtactccgacgaggaagtctggacatccctggagcttgcccatctcaaagactttgtgtcagctcttccagacaagctggaccatgaatgcgccgaaggtggcgagaacctgtccgtgggtcagcggcagttggtgtgtctggcccgcgcattgctgcgcaagaccaaaatcctggtgctggatgaggcgaccgccgccgtggaccttgaaacggatgacttaatccagagtaccatacgcactcaattcgaggactgtactgtcctgaccatcgctcaccggctcaataccattatggactacactcgcgtcatcgttcttgataagggcgagattcaggaatacggcgcaccctcggatctgttgcagcagcggggattattctactctatggctaaggacgccggcctcgtctag

SEQ ID NO: 151738 - DNA, 4251 bp, Artificial Sequence
  derived and/or modified sequence
atggccctgcggggcttctgcagcgccgacggcagcgaccccctgtgggattggaacgtgacctggaatacatccaatcccgactttactaaatgcttccaaaatactgttctcgtttgggtcccctgcttctatttatgggcttgttttcccttttacttcctatatctgagccgccatgatagggggtatatccagatgaccccactcaataaaacaaagaccgccctggggttcttgctctggattgtgtgttgggccgacctgttttattcattctgggaacgctccagaggaatttttctcgctccagtgttcctggtgtctcccaccctgctgggcatcacaatgctcctcgccacttttttaatccagcttgagcgcagaaagggggtgcagagctcaggtatcatgctcactttctggctggttgccctcgtttgtgccctggccatcctgcggagcaaaataatgaccgctctgaaggaggatgcacaggtggatttatttagggatatcacattttatgtgtacttttcattactcttgatccagcttgtgttatcgtgttttagtgatcgctcaccactgttctccgagacaatccacgatcctaacccctgccccgaatcgagcgcgtcctttcttagcaggattacgttctggtggatcaccggactcatagtgcgggggtaccgtcagcccctcgaaggctccgatctgtggtctttgaacaaggaagacacaagtgaacaggttgtcccagtgttagtgaagaattggaagaaggaatgtgcaaagacaagaaagcagcctgttaaagtggtgtacagctctaaagatcctgcccagccaaaggagagtagtaaggtcgacgctaacgaggaggtagaggctctgattgtcaagagcccccaaaaggaatggaacccgtctctcttcaaagtcctttacaagacctttgggccttatttcctgatgagcttcttctttaaagccattcatgacctcatgatgttttctggacctcagattctgaagcttctgattaagttcgttaacgacactaaagcccctgattggcagggatacttctataccgtcctgttgttcgtgaccgcctgtttgcagacactcgtcctgcatcagtacttccacatttgctttgtctctggaatgaggattaagacggccgtcatcggggccgtgtaccgcaaggccctggttattactaacagcgcccgtaagagtagcaccgtgggtgagattgtgaacctgatgagcgtcgatgcacaacgttttatggacctagctacgtatatcaacatgatctggtccgccccactgcaggtgattttggccctgtatttactgtggctgaatctcggcccaagcgtgcttgccggtgtggctgtcatggtactgatggtgcccgtgaacgctgtcatggcaatgaagacaaaaacatatcaagtggcccacatgaagtccaaggacaatagaattaagctcatgaacgagatattgaacggaatcaaggttctcaagttgtacgcatgggagctagccttcaaggacaaggtgctggcaataagacaggaggagctcaaagtgttaaaaaaaagtgcctacctctcagctgtgggcactttcacttgggtgtgcactcctttcctcgtggctttgtgcaccttcgcagtgtatgttaccatcgatgagaacaatatccttgacgcgcagactgcattcgtctctctggccttgtttaatattttgaggttccccctcaatatccttcccatggtgataagtagcattgtgcaggcctctgtgtctctgaaacggctgagaatcttcttatcccacgaggagctggagcccgatagtatcgaacgacgtcctgtgaaggatggagggggaaccaatagcatcactgtaagaaacgcaacctttacttgggcgcgcagcgacccccccactttgaatgggatcacattctccatccccgagggcgccctcgtggcagtggttggacaggtggggtgtggaaagagctctctgcttagtgcgttgttggctgagatggataaggttgaggggcatgttgcaatcaaaacccgtattctggtcacccatagtatgtcctatttgccccaggtggatgttatcatagtgatgtccgggggaaaaataagcgagatgggttcatatcaggaactgctcgctcgcgacggtgccttcgcagaatttctccggacctacgcctccactgagcaggaacaggacgccgaagaaaacggggtaaccggcgtaagcggccctgggaaagaggcgaaacaaatggagaacggcatgctggtcaccgactcagctggtaaacaactgcagcgccagttaagctctagttcctcttactcgggcgacattagcagacatcacaacagcacagccgaattacagaaagccgaagccaagaaggaggagacctggaaactcatggaagcagacaaggcacagacaggccaggttaagctgagcgtttactgggactacatgaaggcgatcgggctcttcatttcatttctgtctatttttttgtttatgtgcaatcatgtaagcgcactcgcttcgaattattggctgagcctctggactgatgaccccattgtgaatggtactcaggaacacaccaaagttcgactttctgtctacggcgccctcggtatcagccaaggtattgcggtgttcggttattcgatggccgtgtccataggcggtatactggcctcaaggtgcttgcacgtagacctgttacactccatcctgcgatctcctatgtccttttttgaaagaacccccagtggaaacttggtgaacaggttcagtaaagagctagacaccgttgattctatgatacctgaagtgataaagatgttcatggggtccttgtttaacgtgatcggcgcctgtatcgtgatcctacttgcgactccaattgccgcaatcatcatacctccactcggactcatttatttctttgtgcagcggttttatgttgcgtcctcccgacagctgaagcggctggagagcgttagtcggtcacctgtgtatagtcacttcaatgagaccctcctgggcgtgagtgttatcagagccttcgaagagcaggagagatttattcatcagagcgatctcaaggtcgatgagaatcagaaggcttattatcctagcatcgtggctaaccgatggcttgcggtcaggttggaatgtgttggcaattgcattgttctgttcgcagccttatttgctgtcatatcacggcactccctgtcggcagggctggtgggcttgtcagtgagctactccctgcaggtgacgacgtaccttaattggttagtgaggatgtccagcgagatggagaccaacattgtcgcagtggaacggttgaaggaatactcagaaacggagaaagaggcgccgtggcagatccaggaaacagctccaccatcaagttggccccaggtaggacgcgtggagtttcgcaactattgcctgaggtaccgcgaagacctggacttcgttctgcgacacatcaatgtcacaataaacgggggagagaaggtggggatcgtgggcaggaccggcgccggaaagagttccttgacactgggcctgttccggattaacgaaagtgccgagggtgagattataattgacggaatcaacattgctaaaattggtctccacgacctgagattcaaaataacgattatcccgcaagatcctgtgttattcagtgggagcctgagaatgaacctggatccattcagccagtactccgatgaggaggtttggacgtctttggaactcgcacacctgaaggatttcgtatcagcgttacccgacaaactcgatcacgagtgcgctgagggaggggagaacctgtctgtcggccagcgtcagctggtgtgcctggcgagggcactgctgagaaagacaaagatactcgtcttggacgaggctaccgctgccgtcgatctggagacagatgatctgatccagagcaccatccgcacccaattcgaagactgcaccgttctgaccattgcccatcggcttaatactattatggattatactcgggtgattgtgcttgacaagggcgaaattcaggagtatggtgcaccctccgatctactgcagcagcgtggattgttttattccatggcaaaagacgctggccttgtgtag

SEQ ID NO: 151739 - DNA, 4419 bp, Artificial Sequence
  derived and/or modified sequence
atggccctgcggggcttctgcagcgccgacggcagcgaccccctgtgggactggaacgtcacttggaataccagcaacccagatttcacaaaatgcttccagaatactgtgttagtatgggtgccatgcttttatctgtgggcctgttttcccttctattttctgtatctctcacgccatgacagagggtacatccagatgacacctctcaacaagaccaagacagcattgggtttcctcctatggatcgtctgttgggctgatctgttttattccttttgggagcgatctcgggggatcttcctggcccctgtctttctggttagccccacactactaggaattactatgcttctggctaccttcctgatccagctggaaaggcggaagggcgtccagtccagtggcattatgctcactttctggctagtggcacttgtgtgcgcattggccattctcaggagtaagattatgaccgcacttaaggaggacgcacaggtggatctgtttagagatataaccttttatgtttacttctctctactgcttatccaactggtgctaagctgtttttcggaccgctctcccctgtttagtgagaccatccacgacccgaacccttgcccggagtcatcagcctcattcctatcgcggattacattctggtggataacgggactaatcgtgcgaggctataggcagccactcgaaggttctgacctatggtctcttaacaaggaggacacgtccgaacaggtggtccccgtacttgtaaaaaattggaagaaggagtgtgccaaaacgagaaaacagcccgtgaaggtggtatactccagcaaggacccagcccagccaaaggagtcttcaaaagtggacgccaacgaagaggtcgaggcactgattgtcaagagtccacagaaagagtggaatccaagtcttttcaaagtattatacaagacctttggcccatatttcctcatgagtttctttttcaaagccattcacgacctcatgatgttctccgggcctcagattttaaagctcctgatcaagttcgtgaatgatactaaggcccccgactggcaggggtatttctacaccgtcctgctgttcgtgactgcctgcctgcagaccctggtgctgcaccaatacttccacatctgcttcgtttccggaatgcggatcaaaaccgcggtgattggcgccgtgtatagaaaggctctcgtcataactaattccgcccgcaaatcatccactgtgggagagattgtcaacctgatgagtgtagatgcccagaggtttatggacttggcaacttatatcaacatgatttggtctgctcccctgcaagttatcctcgctctgtatctactctggctcaatctcgggccttctgtcttggcgggagtagcagtgatggtgctgatggttcccgtcaacgccgtaatggccatgaaaactaaaacctaccaagtcgcacatatgaagtccaaggacaatcgcatcaagttaatgaacgagatcttaaatggcatcaaagtattaaaactgtacgcttgggaacttgcttttaaagataaggtcttggctattcgacaggaggagctgaaggtcctgaaaaaaagcgcttacctctctgcagttggtacatttacatgggtctgcacccccttcttggtggctctctgtaccttcgcagtgtacgtcacaatcgatgagaataatattcttgatgcccagaccgcttttgtgagtctggccctcttcaacatactgcggtttcccctcaacattctgccgatggtgatttccagtatcgtgcaggcctccgttagccttaagcgtttgcgtatctttctgtcacacgaggaactggaaccagattctatcgaacggcggccagtcaaggatggaggggggacaaattctattaccgttcggaatgcaacttttacttgggctaggtccgaccccccaacattaaatgggatcacattcagcataccggaaggggctctggtcgctgttgtcggccaggtgggctgtggtaaatctagtctcctatctgctcttctagcggaaatggacaaggtcgaggggcatgttgctattaagggagttaacctgtctggtggccaaaagcaaagagtgtcattggcccgcgccgtatacagcaatgccgacatctatctgtttgacgatcctctgagcgctgtcgacgcccacgtcgggaagcacatttttgaaaacgtgatcggtcccaagggcatgcttaagaataaaacgaggattcttgtcactcatagcatgtcctatctgccccaggtcgatgttatcattgttatgtcaggaggcaaaatcagtgaaatggggtcttatcaggaactccttgcccgagatggagcctttgctgaatttctccgaacgtatgcaagcactgaacaggagcaggatgctgaggagaatggagtcaccggggtgtccggtccaggtaaagaggctaagcagatggagaatggcatgctcgttactgacagcgcagggaaacagttgcaacgccaattatcttcttctagttcctattctggcgacattagtaggcaccataatagtactgctgagctgcagaaggccgaagctaaaaaagaggaaacctggaaactgatggaagccgataaagctcagacagggcaggtgaagctgtctgtgtattgggattatatgaaagccatcggtctgttcatctctttcttgtcgatcttcctgtttatgtgtaaccatgtgagcgcgctggcgagtaactattggctcagcctatggaccgacgaccctatcgtgaatgggacacaggagcacactaaagtgaggctgtcggtctacggagccctcggtattagccaagggattgctgtgttcggctattcgatggcggtgtccatagggggaatcctggcgagccgctgcctacacgtggacttactgcattcaatattgcgcagtcctatgtccttttttgagcgtaccccctccggcaatttagtcaaccgtttctctaaagagctggacacagtggattccatgatccccgaggttatcaagatgttcatgggatccttgtttaacgtcatcggagcttgcatcgtcatcctcttagcaacacccatagccgctattataattccaccactcggacttatctacttttttgttcaacgtttttacgtcgcatcttctcgccagctcaagagattagagtctgtcagccgtagcccggtgtattcacatttcaatgagacgctgctcggcgtgtcagtgattagggcattcgaggaacaggagcgcttcatccaccagtctgatcttaaagtggatgagaaccagaaggcctattaccccagcatcgtggccaatcggtggctcgccgtacgactggaatgtgtggggaattgcatcgtgctctttgctgccctctttgccgtcatcagtcggcactctttgtccgccggactggtggggctgtctgttagttacagcctgcaggttaccacctacttgaactggctagtaagaatgtcttctgaaatggaaactaatatcgttgcagtcgaaaggctaaaggagtattccgagacagaaaaagaagcaccatggcaaattcaggaaactgctcctccctcctcctggccccaggtcgggcgggtggagtttcgcaactattgcctgaggtatagagaggacctggattttgtcttaaggcacattaatgtcaccatcaacgggggtgagaaggtgggcatcgtcggaaggaccggcgctgggaagagttcattaacccttggattattcagaatcaacgaaagcgccgaaggagagattattatcgatggaataaacattgctaaaatcggcctgcacgatctccggttcaaaatcaccatcatccctcaggaccccgtattgttctccggaagcctgaggatgaatctcgacccatttagtcaatattcagacgaagaggtgtggacttccctggagctcgctcatttgaaggattttgtatccgccttaccggataaactggaccacgagtgtgccgaaggaggtgagaatctgagcgtgggacagagacagcttgtctgcttggccagagccttgctccgcaagaccaaaattctggtcctggatgaggcgaccgccgctgttgacctggaaaccgacgatctgattcagagtactattaggacacagttcgaggactgtacagtccttacaatcgcgcatcggctaaacaccataatggattatacccgggtcattgtgttggataaaggtgaaattcaggagtatggggcaccgtctgatctgctgcaacagcgcggacttttttacagcatggcaaaggacgctggactggtgtag

SEQ ID NO: 151740 - DNA, 4626 bp, Artificial Sequence
  derived and/or modified sequence
atggccctgcggggcttctgcagcgccgacggcagcgaccccctgtgggactggaacgtaacgtggaacacaagcaaccccgattttacaaagtgcttccagaacaccgttctggtttgggttccatgcttctacttgtgggcatgtttccctttttacttcctatacctgtcccgacacgatagaggatacattcagatgacacctctgaacaaaacaaagaccgccctcggcttcctcctgtggatcgtctgctgggccgacctcttctactccttttgggaaaggagccgcgggattttcctggcccctgtgtttttagtgtctccgacactcttgggcattactatgctgctggctacattcctaatccagctggaaaggagaaaaggtgttcagtcctctggcatcatgctaactttctggctggtggccctcgtctgcgctctcgccatcctccgctctaaaattatgacagccctgaaggaggatgcgcaagttgatttatttagggacattacgttttatgtttatttctctctcctcttaattcaattagtcctgagctgtttctccgatcggtcacccctgttttcagaaacaatccatgatccaaacccttgccccgaatctagcgcctcctttctctctcgaatcactttttggtggatcaccggtctcatcgtcagaggctaccgacagcctcttgaaggatctgatctatggtccctgaataaggaagacacgagcgaacaggtggttcccgttctcgtgaaaaattggaaaaaagagtgcgctaagactcgcaagcagccagtgaaggtggtatacagttcgaaggacccagcccagcctaaagagtcttcgaaggttgatgcaaatgaggaagtcgaggccctaatcgtgaagagtccgcagaaagagtggaatccatcattgtttaaggtgctatataagacttttgggccctacttcttaatgagctttttctttaaagcgatacacgacctaatgatgtttagtggaccccagattctcaaattacttataaagttcgttaacgacaccaaagcaccagactggcaggggtatttctacacagtgctccttttcgtgacagcatgcctgcagacactggttctgcaccagtacttccacatctgctttgtcagcggcatgcggataaagactgcagttattggcgcagtctaccggaaggccttagttattacaaattcggctagaaaaagcagtaccgtcggggagatcgtaaacctcatgagtgttgatgcccagaggtttatggacctggccacttatatcaacatgatctggagcgctcctctccaagtcatcttagcactgtatctgctgtggctgaacctgggcccaagtgtccttgcaggtgttgctgtcatggttctcatggtacctgttaatgctgttatggcaatgaaaacaaaaacctaccaggtagctcacatgaagtccaaagacaatcggattaagctgatgaacgaaatattgaacggtattaaagtgctgaaactgtacgcgtgggaactggctttcaaggataaagtcctcgccatccgccaggaagaactcaaagtgctgaagaagtcagcgtacctttctgccgttgggacgtttacctgggtttgtactccctttctcgtggccctctgtaccttcgccgtatacgtgaccatcgatgagaacaacatcctggatgcgcaaactgcatttgtatcgctggctctgtttaatatcttacgcttcccactcaatatactgccgatggtgatctcgagcattgttcaggccagcgttagcctgaaacggctccgaatcttcttatctcacgaagaactggagccagatagcatcgagcgtcggccagtgaaggatgggggcgggaccaattcgatcactgtccgcaacgcaacatttacctgggcccggtccgatccgcccacactgaacggaattacgtttagcatcccagagggggccctggtggccgtggtcgggcaggtaggctgcggcaagtccagtctcctctcggccctccttgccgaaatggacaaggttgagggccatgttgccattaagggctcagtcgcatatgtgccacagcaagcttggatccagaatgactccttgcgggagaacattctttttggctgccagctcgaagagccttactacaggtcagtgattcaggcttgcgccctcctgcccgacttggaaatcctgccctcgggtgataggacagagattggggagaagggagtgaatctgtcggggggacagaagcagagagtctctctggcaagggccgtgtatagtaacgccgatatttatctgttcgacgatcctctgagcgccgttgatgcccacgttggaaaacacatcttcgaaaacgtgataggcccaaaggggatgctgaaaaacaaaaccaggatactggtgacacacagcatgtcctacctcccgcaggttgatgtcatcatcgtcatgagcgggggaaagatctctgagatgggttcttaccaggaactcctggcgagagacggggcttttgccgaattcctgagaacatatgcttccacagaacaggaacaggatgctgaagaaaacggcagcactgtgatggacgaagaggaggcgggcgtcacaggggtgtcgggacctggaaaagaagccaagcagatggagaatggcatgttagtaactgacagcgccgggaagcaactccagcgacagctgagcagttcatcgtcatacagcggcgatatcagtcgccaccacaattcgacagcagagttacagaaggctgaggccaagaaggaagagacttggaagctcatggaggccgacaaggcacagactggccaagtcaagctgagcgtctattgggattacatgaaagccatcgggctgtttatttctttcttgagcatatttctttttatgtgtaaccatgtgagcgcactggctagtaactattggctgagcctgtggactgacgaccccatcgttaacggcacccaagagcacaccaaggtgcgactgagcgtttatggagccctggggattagccagggcatcgccgtgttcggttattcaatggccgtcagcatcggcggaattcttgcatctcgttgtctgcacgtagatctcttgcacagcatccttcgctctcccatgtctttttttgaacggacaccaagcggcaatctggttaataggttcagcaaagaactggacacagtggattctatgatccccgaggtcatcaaaatgtttatgggctctctgttcaacgtgattggggcttgcatcgtgatcttactggccacccccatagccgcaattatcattcctcctctcggtctcatatacttctttgtgcagcggttttacgtcgcctctagccgccaacttaaacggttggagtctgtcagccggtccccagtgtacagtcactttaacgagaccttgctgggggtctccgtgattcgggcatttgaggaacaggagaggtttattcaccagtctgatttgaaggtggacgagaaccaaaaggcttattacccttctatcgtggccaatagatggttggccgtacgccttgagtgtgtaggcaattgcatcgtcctgttcgcagcactgttcgccgttataagcagacattctctctcagctggcctggtgggtctttccgtgtcctactccctgcaagtgactacctacctcaactggctggtcaggatgagctctgagatggagacgaacattgttgctgtcgagcggctgaaagagtatagcgagactgaaaaagaggctccatggcagatccaagagactgccccacccagcagttggccgcaggtgggccgcgttgagtttaggaattactgcctgagatacagggaggatctggattttgtgttgcgtcatattaatgtcacaattaacggcggcgagaaggtcgggattgtcgggcgaaccggcgctggaaaatctagtctgactctaggcttgttccggatcaatgagagcgctgaaggtgaaattatcatcgacggtatcaatattgccaagattggtctgcatgaccttcgtttcaagataacaatcattccccaagaccctgtcctgttcagcggaagcctccggatgaatctggatccattctcccagtattctgacgaggaggtgtggacatctttagagctagcccacctgaaagacttcgttagcgccttacccgacaaacttgatcatgaatgcgccgagggcggtgaaaatctgtctgtaggacagcgtcagctggtgtgcctggccagggctctcctgcgaaaaacaaagatcctggttctggatgaggcaactgctgcagtagatctggagaccgatgatctgattcagtctactataaggacccagttcgaggactgcactgtacttacaattgcgcatagattgaataccatcatggattacacaagagttattgtgctggacaaaggtgagatccaggagtatggcgctccaagtgatctgctgcagcagcgcggcctcttttatagtatggctaaagacgccgggctggtgtag

SEQ ID NO: 151741 - DNA, 4596 bp, Artificial Sequence
  derived and/or modified sequence
atggccctgcggggcttctgcagcgccgacggcagcgaccccctgtgggactggaacgtgacatggaatactagtaatcccgactttactaagtgcttccagaatacagtcctggtctgggtcccgtgcttttatctgtgggcctgtttccccttctacttcctgtacctaagccgtcacgacaggggatacattcagatgacgccactgaacaagaccaagaccgcgctgggcttcttactatggatcgtctgctgggcggatcttttctactctttctgggagcggtcaagaggcattttcctggcgcccgtatttctggtcagccctacgctgctgggcatcactatgctgctcgccacttttctgatccaattagagcgccgcaagggagtccagtcttctggaattatgctcacattttggcttgttgcccttgtgtgtgctcttgcaatcctgaggtccaagatcatgacggcacttaaagaagacgcccaggtagatcttttccgtgatatcacgttctatgtgtatttttcactgctgctgatccagctagtgttgtcctgtttctccgaccgcagccctttatttagcgaaactatccacgaccctaatccttgtccagagagttcagccagctttttaagccgaattaccttttggtggattacggggcttattgtccggggctatcgccagccgcttgagggatctgacctgtggtcactgaataaagaggatacctcggagcaagttgtgccagttttagtgaaaaactggaagaaggaatgtgccaaaactagaaaacaacccgtgaaggtggtctacagctcaaaggatccagcccaacccaaggagagtagcaaagtggatgccaacgaggaagttgaggccttgattgtgaaatctccacaaaaagagtggaaccccagtctctttaaagtcctgtataagacgtttggcccttattttctcatgtcttttttctttaaagccatacatgacctcatgatgttttcggggcctcagattcttaagctgctgattaagttcgtgaatgataccaaagccccagactggcaaggctacttctacaccgtgttgttgtttgtgaccgcctgtctgcagacccttgtactgcatcagtatttccatatttgtttcgtgagcgggatgaggattaagacagcagtgatcggtgccgtgtaccggaaggcactagtcatcactaacagcgctagaaagagctccactgttggtgagatcgtgaacctgatgtctgtagatgcccagcgtttcatggaccttgccacctatatcaacatgatctggtcggctcctttgcaggtgatcctggcactgtacttgctgtggctgaacttaggcccatcagtgctggcgggcgtcgcagtgatggtcctgatggtaccggtgaatgcagtcatggctatgaaaactaagacctaccaggttgctcacatgaaatcaaaagataatagaattaagctgatgaacgagatcctgaacggtatcaaggtgctgaagttgtatgcctgggaactcgcttttaaagacaaggtgttggcaattcgccaggaggaactcaaggtgctgaaaaaatctgcctatctgtccgccgtgggaacctttacctgggtgtgtacccccttcttggtcgcgctgtgcacattcgctgtatacgttactatcgacgaaaataatatcttagacgctcagacggcctttgtgtccctcgccctgtttaatattctgcgcttcccactcaatatattgcccatggtgatttccagcattgtgcaggcttctgtctctctgaagcgactccgcattttcctgagtcatgaggagttggaaccagacagcatcgagcgccgtcccgtcaaagacggtggcgggacaaactcaataaccgtgagaaacgctaccttcacttgggctaggagtgaccctccaaccttaaatggtataactttcagcatcccagaaggcgccctcgtagctgtcgtgggccaggtggggtgtggcaagagttctcttctgagtgccctcttggccgagatggataaggtcgagggccacgttgcgataaagggttccgtggcgtacgtcccacaacaagcctggattcaaaatgactccctgcgggagaatatccttttcggctgccagctggaagaaccttactatcggtccgtgattcaagcctgcgcgctcctgcctgatcttgagattttgcccagcggtgaccgaacagagatcggagaaaaaggcgtgaacctcagcggaggtcaaaaacagagggtttctctggcacgggcagtgtattctaacgccgatatttacctgtttgacgatcccctctcagccgtcgacgctcacgtgggcaagcatattttcgagaatgtgatcggcccgaaaggcatgcttaagaacaagacgaggatcctggtgacccactccatgtcttatttgcctcaggttgatgtcatcatcgtaatgtctggcgggaagattagcgagatggggagttaccaggagctgctggctcgggacggcgctttcgcagagttcttaagaacctacgcgagcaccgagcaggagcaggacgcagaggaaaacggcgtgacaggcgtcagcggacccggtaaggaggcgaaacagatggaaaacggcatgctggtgactgactccgccggaaagcagctccagaggcagctcagttctagctcaagctactctggtgatatatccaggcaccacaatagcaccgcggaactccaaaaggccgaggcgaaaaaggaggagacatggaagctaatggaagcagacaaagcccaaacgggacaggtaaagctgagcgtgtactgggactacatgaaagcaatcggactctttattagttttttgtccattttcctcttcatgtgtaatcatgtgtctgccctcgctagtaactactggctttcactctggaccgacgatccgatcgtgaatggaacacaggaacacaccaaagtaaggctgtctgtgtatggcgccttggggataagccaggggattgccgtgtttgggtacagcatggcagtttccattggtggaattttggcctcccggtgtttgcacgttgacttgcttcacagcatcctcagaagccccatgtccttctttgaacggaccccaagcggaaatctcgttaacagattctccaaggagctggacactgtggacagcatgattcccgaagtgattaagatgtttatgggtagcctatttaacgtaatcggggcctgtatcgtcatcctgctggcaacacctatcgctgccatcataatacccccactcggactcatctatttctttgtgcagaggttctacgtggcatcgagccgccagttaaaacggctagaaagcgtctcgagatctccggtgtattcacactttaatgaaacgttgttaggcgtctctgtcattagagcctttgaggagcaggagcgcttcatacaccagtcagatttgaaggttgacgagaaccaaaaggcctattatccctccatcgtggcaaatcgttggctggcagtgcggctggagtgcgtggggaactgtattgtcctattcgccgccctgtttgccgtgatttctagacatagcttaagcgcgggcctcgtgggcctgtccgtttcttattcgcttcaggtgaccacctacctgaactggctggtgagaatgagctctgaaatggagaccaatatcgttgccgtggaaagattgaaagaatacagcgagaccgagaaggaagcaccctggcagattcaggagaccgcaccaccaagttcttggccccaggtcgggcgagtggaatttaggaactactgtctgaggtaccgggaggacctggatttcgttttgaggcacataaacgtaacaatcaacggaggtgagaaggtagggatcgtgggtagaacaggggccggaaagtcatcactgactctgggcttattcagaatcaacgagtcagccgaaggcgagatcatcatagacggcataaatattgctaaaattgggctgcatgatctgagattcaaaatcaccatcatcccacaggatcccgtgcttttcagcggctcacttcggatgaacctggacccattttctcaatacagtgatgaagaggtgtggacatcgctggagcttgcgcacttgaaggactttgtttccgccctgcctgacaagctggatcacgagtgcgccgagggaggtgagaatctatctgtgggccagcggcagttagtgtgcctggctagggcgttgttaaggaaaacaaagattctggtgctggacgaggcaacggcagcagtagacctcgaaacagacgacctgattcagtcaactataagaacccagtttgaggattgtaccgtcttgacaatcgcccaccgcttaaacaccatcatggattatacacgggtcatcgttttggacaaaggagagattcaagaatacggagctccgagcgacctgctgcagcagcgcgggctgttctactccatggcaaaagatgccggcctggtgtag

SEQ ID NO: 151742 - DNA, 3648 bp, Artificial Sequence
  derived and/or modified sequence
atgagcttcttcttcaaggccatccacgacctgatgatgttcagcgggccccagattttgaagcttctaatcaaatttgtgaatgataccaaggctcctgattggcaggggtacttctacaccgtactactattcgtgaccgcatgtctgcagaccttggtcttgcaccaatatttccacatctgttttgtttccggcatgagaatcaaaaccgctgtcatcggtgccgtgtaccgaaaggcactggtcattaccaatagcgcaaggaagtcctcaactgttggagagattgtgaacctgatgtctgtggatgcacaaagattcatggatctggccacctatataaacatgatctggtctgcaccactccaagtaatccttgccctctaccttctctggttgaatctgggcccatcagtgctggctggggtcgcagtgatggtgctcatggtgcctgttaacgcagtaatggctatgaagacaaagacctaccaggtggcccacatgaagtctaaggacaacagaataaagctgatgaatgagatactaaatggcatcaaggttttgaaattatatgcctgggaacttgcatttaaggacaaggtgctggccatacggcaggaggaactcaaggttcttaagaagagtgcatatctgtcagctgtgggaactttcacctgggtctgtactccgttccttgtggctctgtgtacttttgccgtgtacgttaccatcgacgaaaacaacattcttgacgctcaaaccgcctttgtgtccttagctttgtttaatattctgaggttccccctcaacatccttcctatggtgattagtagcattgtccaggcttcggtgagccttaagaggctccggatcttcctgtcacatgaggaactcgaacctgacagcatcgagcgacggccagtgaaggatggcggagggactaacagcattacagtgagaaacgcaactttcacctgggctcggtcagacccacctaccctcaacggaattacctttagtattcctgagggggctctggtagccgtagtcggacaagtgggctgcggtaagtcatctttgctgtctgcactgctggcagagatggataaggtggaagggcatgtggctatcaagggatctgtggcctacgtcccccaacaagcctggatccagaatgactctctccgggagaatatcctgttcggatgccagctggaagagccttactaccggtctgtcatacaagcatgcgcactgctgcctgaccttgaaattctgccttcaggtgatagaaccgagattggagaaaaaggcgtaaaccttagcggaggccaaaagcagcgcgtgtccctagccagggccgtttactcaaatgccgacatatacttgttcgatgacccacttagcgccgtggacgcccacgtgggtaaacatatttttgaaaacgttattggccctaaggggatgctcaagaacaagacgaggatcctggtgacgcatagtatgagttatctgcctcaagtggatgtcatcattgtgatgtctgggggcaaaatttccgaaatggggtcttatcaagagctgcttgctagagacggggcatttgcagagtttctgagaacttacgcaagcacagagcaagagcaggatgctgaggagaacggtagcacagtgatggatgaggaggaagcgggcgtgaccggcgtttctggtccagggaaggaagccaagcaaatggagaacggcatgctagtgacagacagcgctggtaagcaactgcaacgccagctttcatcttccagcagctactccggagatatttctcgacaccacaatagtactgcagaactgcagaaggccgaggctaaaaaagaagagacctggaaacttatggaagctgacaaggctcaaacgggtcaggtcaaactctcagtgtactgggactacatgaaagctattgggctgttcatctccttcctcagtattttccttttcatgtgcaaccacgtttccgcacttgcttctaactactggctgtctctctggactgatgatccaatcgttaatggcactcaagaacacaccaaagtgcgtctctccgtctacggcgccctagggatcagccaggggatagctgtttttggatactcaatggcagtctcgattggggggatcctggcctcccgctgccttcacgttgacctccttcacagcatcctcaggtctccaatgagcttttttgagaggaccccgtccggcaatctcgtgaaccgcttctccaaagagctcgataccgtggatagcatgattccggaggttataaagatgtttatgggctctctgtttaacgtcatcggggcctgtatcgtgattctgttggccacaccgattgctgcaatcattattcctcctcttgggctgatttacttcttcgtccagcgcttttatgttgcatcctcaagacagttgaaacgtttggagtccgtgtctaggtcacctgtttatagccatttcaatgaaacattactgggggtcagcgttatccgggcctttgaggagcaggaacgattcattcatcaaagcgacctgaaggtggatgagaaccagaaagcctactacccctcaattgttgccaatcggtggctcgcagttcggttagagtgcgtgggtaattgtatagttctgttcgcagctctgttcgcggtgataagcaggcatagtctgtccgcaggtttagtgggcctttccgtaagttattccttacaggttaccacctacttgaattggttggtgaggatgtctagtgagatggagacaaacattgtcgccgtggaacggctcaaagagtattctgagaccgagaaagaagcaccatggcagatccaggaaaccgccccgccttcctcctggccccaggtcgggagagtagaattccgtaactactgcctgaggtatagagaagatcttgacttcgtgttgagacacataaacgtgactatcaacgggggtgaaaaggtgggcatcgtcggtcgcaccggtgctggtaagagtagtctgacgctgggcctctttagaataaacgaatcagctgagggcgagattatcattgatggtatcaatattgcaaaaatcggactgcatgatctgcggtttaaaattacaataatcccccaagacccggtcttattctcaggctccctgcggatgaacttagacccctttagccagtacagcgatgaggaggtgtggacctctttggaactggctcatttgaaagactttgtttctgctttacccgacaagctcgaccacgagtgtgccgagggcggcgagaatctcagtgttggacaaaggcagctggtttgcctggcgcgggccctgttacgaaaaaccaagattctggtgctcgatgaagccacagccgccgtggatctcgagaccgacgatctcatccaatctaccattcgcacccagttcgaagactgcacggttcttactattgcgcaccggctcaacaccatcatggactacacacgggtcatcgtgctggataaaggggagattcaggagtacggggccccaagcgacctgctgcagcagagggggctgttctattctatggctaaagatgccggactggtgtag

SEQ ID NO: 151743 - DNA, 4401 bp, Artificial Sequence
  derived and/or modified sequence
atggctctccgcggattctgctccgccgacggaagtgatccgctgtgggactggaacgtgacttggaacaccagcaatcctgacttcaccaagtgttttcaaaacactgtgctggtctgggtgccctgcttttatctgtgggcttgtttcccgttctactttctatacctttcccgccacgacagaggctatatccagatgactcctcttaataaaaccaagaccgcattgggattcctgctgtggatcgtgtgctgggccgacctgttttacagcttttgggaaagaagccgtggcatcttcctcgctcctgtctttctggtttcgccaacgctactggggattaccatgctcctcgcaacattcttaattcaactcgagcggaggaagggggtgcagagtagcgggatcatgctaactttttggctggtggccctcgtgtgtgcacttgccatcttacgttccaagattatgaccgccctcaaggaggacgcgcaggtggatttgtttcgagacatcacattttatgtatacttctctcttctccttatccaacttgtgctgagttgcttctccgaccggtcccctctcttctctgagacgattcatgaccctaatccgtgcccggagtcaagcgcctccttcctctcacgaattaccttttggtggataaccgggcttatagtacggggttacagacagccactggagggcagtgacctttggagcctgaacaaggaggacacgtccgagcaggtcgtgccagtgcttgttaaaaactggaagaaggagtgcgcgaaaacaaggaaacagcccgtcaaagtggtgtactctagcaaggacccagcacagcctaaagaaagctcaaaagtggacgcaaatgaagaagtggaagccctaatagtcaagtctcctcagaaagagtggaatccatcactattcaaagttctttataagacttttggtccttacttccttatgtcgtttttttttaaagccattcacgacctcatgatgttttcagggcctcagattctgaagctgctgataaagttcgtcaacgataccaaagctcctgactggcaaggctacttttatacagtgctgctctttgtcaccgcatgcctgcaaacattagttctgcatcagtatttccacatatgttttgtgtcgggcatgcgaatcaagaccgccgttataggcgcagtgtaccggaaggcactcgtgatcacgaattctgctagaaaaagtagcacagtgggggaaatagtgaatctcatgtcagtggacgcccagagattcatggatctggccacttacatcaatatgatttggagcgcaccactgcaggtaatcctagccctttatctattgtggctgaacctcgggccttccgtgctcgctggtgttgccgtcatggtccttatggtgcctgtcaatgccgtgatggccatgaaaactaagacttatcaggtggcgcacatgaagtcaaaggataaccgtatcaagctgatgaacgagattcttaatgggattaaagtccttaagctgtacgcttgggagctggccttcaaggataaggtcctcgcgatcaggcaagaagaactgaaggtgctgaaaaagagcgcgtatctgagcgctgtgggcacctttacatgggtgtgtacccctttccttgtggccctttgtaccttcgcagtgtacgtcacaatagacgagaataacattctggacgcacaaactgcattcgtgtctctagccctcttcaatatcttgagattccctctaaacatcctccccatggtgattagctccatcgtgcaggcgagcgtgtccttgaagcgccttcgcattttcttgtcacacgaagagctcgagccggactcgattgaaagaagacctgtgaaagatggtggcggaacaaattcaattactgttcggaatgccacattcacatgggcacgatcagacccaccaacattgaacggcatcaccttctccattcccgaaggagccctggtggctgtcgtaggacaagtcggatgtgggaagtcttccctcctgtctgccctgctggctgagatggacaaggtcgagggccacgtcgccataaaggggtccgtggcctacgtgccccaacaggcctggattcaaaacgattcactgagggagaacattctattcggttgtcagctcgaggaaccctactaccggtccgtgatccaggcctgcgcgctactgccggatttggagatcctgccatctggagatcgaactgaaataggagaaaagggcgtaaacctcagcgggggacaaaagcagagagtgtctctagctcgggcagtctattcaaacgcagacatctatctgttcgacgaccctctgtcagccgtcgacgcccacgtgggcaaacacatattcgagaatgttatcggaccaaagggcatgttaaagaacaagactcggattctcgttacacattctatgtcatacttaccacaggtggacgttatcatcgtgatgtcgggcggaaaaattagtgaaatgggaagttatcaagagttattggctagagatggcgctttcgctgagtttctgcgaacctacgcatctacagagcaggaacaggatgcggaggagaacggcgtcactggggtgtcgggcccagggaaagaggctaagcagatggagaacgggatgctagtcacagactcagccggaaaacagctccagcggcagttgagctcttcttcctcatattccggcgacattagtcgtcaccataacagtacagccgagctgcaaaaggcggaagccaaaaaagaagaaacctggaaacttatggaagccgataaagcgcaaacaggacaagtgaagctgtccgtgtattgggactatatgaaggccattgggcttttcatcagtttcctgtccatattcctattcatgtgtaaccatgtgtcggctctggcctccaattattggttaagtctgtggaccgatgatcctatcgttaacgggacccaggagcataccaaagtgaggctgagcgtgtacggggcactgggtatctcgcagggaatcgcagtattcgggtatagcatggccgtgagcatcggtggcatcctagcaagccggtgccttcacgtagacctgctacactccattctgcggagtccaatgtcctttttcgaaagaacccccagcggcaaccttgtgaaccggtttagcaaggagttggatactgtggactcgatgatcccggaggtgatcaaaatgttcatgggtagcctgtttaacgtgatcggggcatgtatcgtaatcctgctcgccacaccaatagcggctataataattcccccattgggcctgatttatttcttcgttcagcgtttctacgtcgcctctagtcgacagctgaaacgtcttgaaagtgtctctcgctcacccgtgtatagccactttaacgaaacactcctcggtgtatctgttatacgagctttcgaggagcaagaacgcttcatccatcaaagcgatctgaaggtcgatgagaatcagaaggcctattatcccagcatcgtggctaatcgttggctggctgtgaggctcgaatgcgtcggtaattgtattgttcttttcgctgcactctttgcagtgatctcccgccattctctgtcggccggacttgttggcctcagcgtgtcttactccctacaagtgaccacatacttgaattggctcgtcaggatgtcctctgagatggagaccaacatcgtcgcggtcgaaagacttaaggaatatagcgaaaccgagaaggaggctccgtggcagatccaggagacagccccacccagttcctggcctcaggtcgggagagttgagtttcggaactattgccttagatacagggaggaccttgattttgtgctgagacatattaatgtaaccattaatggcggtgagaaagtgggtattgtaggcaggaccggtgcagggaaaagctcccttaccctgggattgttcaggattaatgagagcgcggaaggagagatcatcatcgatggcatcaacatagccaaaataggactgcacgatcttaggtttaaaattaccatcattccacaggaccccgttctgttcagcggcagcctgcgcatgaatctcgatccttttagccaatattccgatgaggaagtatggacttctctggagttagcccacctgaaggacttcgtctccgccctgcctgataaactggatcacgaatgtgccgagggtggggagaacctcagagtgattgtgctggataagggcgagatccaggagtacggagcaccttccgacctcttgcaacaaaggggattgttctacagcatggccaaagatgcaggtttggtgtag

SEQ ID NO: 151744 - DNA, 4428 bp, Artificial Sequence
  derived and/or modified sequence
atggccctgagaggtttctgctctgccgatggtagcgatcccctctgggactggaatgttacttggaacacatcgaatcctgattttaccaagtgctttcagaatactgtgctggtttgggtcccctgcttctatctgtgggcttgctttccattctattttttgtaccttagcagacatgaccgcggttacatccagatgacccccttaaataaaacaaaaacagccctgggatttctcctgtggatcgtctgttgggccgacttattctacagcttttgggagagaagccgcggaatctttctggcgcctgtcttccttgtatcgccaaccctccttggaattactatgctcctggccaccttcctgatacaactggaacgccgtaaaggcgtacagagttccggaatcatgctgactttctggcttgtggccttggtgtgcgcgctagctatactgcgctccaaaatcatgacagctctgaaagaagatgcgcaggtcgatttgtttcgagatattacgttctacgtgtacttcagtctcctgctgattcagctggtgctgtcctgtttctccgaccgatcccccttgttttccgaaaccatacacgaccctaacccttgccccgagagcagtgccagcttcctgtcaaggatcaccttttggtggatcactggactgatcgtccggggttataggcaacccctggagggctccgacctgtggtcgctgaacaaggaggatacgtcggaacaggtagttccagtgctcgttaaaaactggaagaaagaatgtgccaagacacgcaagcagcctgtgaaggtggtgtactcttcgaaggatccggctcagcctaaggagtcatctaaggttgacgcaaacgaggaagtggaagcgctcatcgtgaagtccccccagaaggagtggaatccatccttgttcaaggtcttatacaagacatttggaccatatttcctgatgtctttcttctttaaggctatacacgatctgatgatgttctctggccctcaaattcttaaactgcttattaagtttgtgaatgataccaaggccccagactggcagggctacttttacactgtcctattatttgtgactgcttgccttcagacattagtgttgcatcagtacttccacatatgctttgtgtcgggaatgcgcataaagacagcagtaatcggtgccgtgtatcgaaaggcgttagtgatcacgaacagcgccaggaaaagcagcacagtgggcgagatcgtcaacttaatgtccgtggatgcccagcgcttcatggatctagcaacctacatcaatatgatctggtccgcacccctacaggtaatccttgccctgtacctcctctggctaaatctggggccttctgtgcttgcaggtgtggctgtcatggtgttaatggtgcccgtcaacgctgtcatggccatgaaaacaaagacttaccaggtcgcgcatatgaagtcaaaagacaatagaatcaaacttatgaacgaaatacttaacggcattaaagtcctcaaactttacgcctgggaactcgccttcaaggacaaggtgttagcaatccgccaggaagagctgaaagtcctgaagaagagtgcttatctgagtgcagttggaacgttcacttgggtgtgtaccccgtttctagtggccctgtgcactttcgccgtgtacgtaacaattgacgagaataatattttggatgcacagactgccttcgtgtctttggctctctttaacatcctgcggtttcctctcaatatcctgccaatggtgatttctagcatcgtgcaggcgagcgtgtctctcaagcgcctgcggatttttctctctcatgaggaacttgagcctgacagtattgaaaggagaccagtcaaggacggaggcggtaccaacagtatcactgttcgaaatgcaacgttcacctgggctcgatcagacccccctacactgaacggcattacttttagcattccagagggcgctctggtggccgtcgttggtcaagtagggtgcggaaagtcctccctcctatccgcgcttctggcagaaatggacaaggtggaggggcatgtagccatcaagggtagtgttgcttacgtcccacagcaagcatggatacagaatgactccctgcgggaaaatattctattcgggtgccagcttgaagagccctattaccggtccgtcattcaggcatgcgctctcctgcctgatctcgaaatcctcccttcgggagatcgcacagaaattggagagaaaacccgtatccttgtgactcatagtatgagttacctgccacaggtggacgtaattattgttatgagcggtggtaagattagcgaaatgggcagctaccaagagcttctagctagagatggagcctttgccgaattccttaggacctacgccagcaccgagcaggagcaggacgcagaagagaacggagtcaccggggtgtccggtccaggcaaggaagcaaaacagatggagaatggaatgttagtgaccgactcagctggtaagcagctccagcgccagcttagcagctcctcttcgtatagcggcgatatctccagacaccataattccaccgccgagttgcaaaaagctgaggccaagaaagaggaaacctggaaattaatggaggcagacaaggctcagaccggccaggttaaattatctgtgtattgggactacatgaaagccattggactctttattagcttcctgagtatctttctgtttatgtgcaatcatgtgtccgcactcgcctccaactactggctgtctctttggactgatgatcccatcgttaacgggacacaggagcataccaaagtacgcttatctgtatacggcgcattgggcatcagccagggcatagctgtgtttggatattctatggcggtgtccattggcggtatactagcgtctagatgcttgcatgtggacctcctgcactctattttgaggagcccaatgagctttttcgaaaggacccctagtggtaaccttgtgaaccggttcagtaaagaactcgacacggtcgacagtatgatccctgaggtaattaaaatgttcatggggtccctttttaacgtcatcggggcatgcatagtgattctgctcgccacccctatcgctgccattattataccgcctctcggattaatttacttcttcgtccaacgattttatgttgcgtcaagtcgacagctgaagaggctggaatctgtgagtcgcagcccagtctatagccatttcaatgagactctcctaggggtttcggtgatcagggcttttgaagagcaggagcggttcattcatcagtctgacttgaaggtggacgagaaccagaaggcgtattacccctccatcgtggctaacagatggttagctgtccggctggaatgcgtcgggaattgcatcgtgctctttgccgcactgtttgctgtaatatcacgccattctttatctgccggtctcgtgggtctgagcgtctcttacagcctccaggtgacaacttaccttaactggcttgtccgaatgtcctcagagatggaaacaaacatcgtggcggtcgaaagactgaaggagtattctgagaccgagaaggaggcaccctggcagatacaagagacggcccctccatcttcttggccacaagtcgggcgtgtggagttcagaaactactgtttacgttaccgcgaagatcttgactttgtgctcaggcacatcaatgtcaccatcaatgggggtgagaaggtgggcatcgtgggtagaactggtgcaggcaagtcctctctgactctgggtctgttccggatcaatgagtccgcagagggtgaaatcattatcgatggaattaacatagcgaagatcggacttcatgacctcaggttcaagattaccatcattccccaagaccccgtactgttttccggttcgctgcgaatgaatttagacccatttagtcagtattccgacgaagaagtgtggacgtccctggaactagcacatcttaaggactttgtctccgctctccccgataagttggaccatgaatgtgccgaggggggtgagaacttgagcgtggggcaacgccagcttgtatgtttagctcgagctttgctgcgtaagactaaaatactggtgctcgatgaggccaccgcggcagtggacctggagactgatgaccttattcagagcacaatacgtacccagttcgaagactgcacagtgctgacaatagcccaccgattgaataccatcatggattatacacgagtcatcgtgcttgacaaaggagagatacaggaatacggcgcacccagtgacctgcttcagcagcgaggactgttctattccatggctaaggacgctggactggtctag

SEQ ID NO: 151745 - DNA, 4251 bp, Artificial Sequence
  derived and/or modified sequence
atggctcttcgcggtttttgctctgccgacggatcagacccgctgtgggactggaacgtcacttggaacacatctaatcctgactttactaagtgctttcagaatactgtcctcgtgtgggtgccctgtttctacctatgggcctgtttccctttctactttctgtacctgtcaaggcatgacagagggtatatacagatgacccctctgaataagacaaagactgccttgggattcctgctctggatcgtatgctgggcggatctgttctattccttctgggaacgttcaagaggcatctttctggccccagtgttcttggtgtcgccaaccttgctcggcattactatgctgctggccacctttctgattcagttggaaaggcggaaaggggtgcagtcaagcggaatcatgttgacattctggttggtggctctggtctgtgccctggcaatactgcgatctaagatcatgactgcattaaaggaggatgcccaggtcgatttgtttcgggatattacattttatgtctacttttcactgttactgatccagctggtgctgtcatgtttcagcgaccgttccccattgttcagtgagacaatacacgatcccaatccctgtccagagtcctccgctagttttctaagcagaattactttctggtggatcactggtctgatcgtgaggggctatcggcaacccctcgaaggaagcgacctgtggtccttaaataaagaagatacctctgaacaagtggtacctgtgctggttaagaattggaagaaagagtgcgctaaaacacgtaaacagccagtgaaagtcgtctattcgagcaaggatcccgctcaacctaaggagagcagtaaagtggatgccaatgaagaggtggaggcgctgatcgtgaagtcacctcaaaaggagtggaacccttccttatttaaggtgctctataaaactttcggaccatactttctcatgagcttctttttcaaggcaatccacgacctcatgatgttctccggtccccagatcttgaagttactgataaaatttgtcaatgatactaaggcccctgactggcaggggtacttctacacggtgcttctgtttgtgaccgcatgtttgcaaacgctggttctgcaccagtactttcatatctgctttgtgtctggtatgcgcattaagactgccgtgatcggcgcagtctaccgaaaggcactggtcataaccaattctgctcgaaagagttcaactgtgggtgagatcgtgaacctgatgtctgtcgatgctcagcggtttatggatctggccacctatatcaacatgatttggtcagctccactgcaggtgatcctggcgttatatctgctgtggctgaacctgggaccttctgtattagccggagtcgccgtgatggtgctaatggtgccggttaacgcagttatggccatgaaaactaagacctatcaggttgcacatatgaagtccaaggacaaccgtattaagcttatgaacgaaatcctgaacggaatcaaagtattgaagctgtacgcctgggagctggcattcaaggacaaagtcctggctatccggcaggaagagctgaaggttctgaagaagtccgcctacctgagtgctgtggggactttcacctgggtctgtacaccgtttctggtcgctctgtgcactttcgctgtgtacgtgaccatcgatgagaacaacatcctcgatgcacagactgcttttgtgagtctggcactgttcaacatactgcgctttcctctgaacatcctacccatggtgatctcatcaatcgtgcaggcctccgtctcactgaaacgcctcagaatctttctgtctcatgaggaactcgagccagacagcatcgaacgtagacctgtgaaagatggcggtggaacgaacagcataaccgtacgaaacgccacgtttacatgggcacgaagtgaccctccaacactaaacggcattacatttagtatcccagaaggggctttggtggcagtcgtgggacaggtgggatgtggtaagtctagcctcctttccgcgctgttggcagaaatggataaagttgagggacacgtcgccattaagactaggatacttgtgacccattcaatgtcttacttgcctcaagtggatgttattattgtgatgagcggtggcaagatctctgaaatgggctcctaccaggagctgctggccagggatggagcctttgccgaatttctccggacctacgcctctactgagcaagaacaagacgccgaagaaaacggggtgaccggcgtgagcggtccaggcaaagaagcgaaacagatggagaatggaatgctcgtcaccgatagtgcaggaaaacagctgcagcggcaactaagttcatcttcatcatattcaggggacatttcccgccaccacaattctacggcagagctgcaaaaggcagaagctaagaaggaggagacctggaagcttatggaagccgataaagctcagacaggtcaggtcaaactctctgtgtactgggattacatgaaagcaatagggttattcatcagcttcctgagtatttttctgtttatgtgtaatcatgtctccgctctggcctcgaactactggctgagtctttggacagacgatcctatcgtgaacggcacccaagaacacacgaaggtaaggctgtctgtgtatggtgccttgggtatctcacagggcatcgccgtgttcggctactctatggcagttagcattggtgggatccttgcctctcgatgtctgcacgtggatcttcttcatagcatactgaggtcgccgatgagtttcttcgagcgcacacccagtggcaacctggttaataggttttccaaagaactggataccgtggattccatgataccggaggttataaagatgttcatggggtcgctgttcaacgttatcggagcttgtatagtgattttgttggctaccccgatcgcagcgatcatcatcccccctttaggcctgatatactttttcgtgcagcgcttttacgtggcatcttcccgtcagctcaaacgcctggagtcagtgtcacgatctccagtgtactcacactttaacgaaacgctgctcggtgtttctgtgattagagctttcgaagagcaagaacgctttatacatcagtcagaccttaaggtggatgaaaatcaaaaggcctattatccgtcaattgtcgccaaccggtggcttgccgttcgccttgaatgcgtggggaattgtatagtgttgttcgccgctctgtttgctgtgatttccaggcatagcctgtccgctggcctggttggattgtcagtgagctactctctacaggtaacgacgtacctgaactggctggtgcgtatgtccagtgagatggaaacgaatattgtcgcagtcgagcgcttgaaagagtacagtgaaacagagaaggaagcgccttggcagatccaggagactgcccctccgagctcttggccccaggtgggccgagtggaattccggaattactgtctgcggtatagagaggacttggatttcgtgctgcgccacattaacgtcaccatcaacggcggagagaaggtcggaattgtcggcagaacaggagcaggaaagagtagcctgactctcggattatttcgcataaacgagtccgccgaaggggaaattatcattgacgggatcaacattgcaaagatagggcttcacgacctgcggttcaagattacaatcatcccacaggatcccgtgttgttctccggaagcctgagaatgaaccttgaccccttctcccagtacagtgacgaggaggtttggaccagtctggaactggctcacctcaaagacttcgtgagcgccttaccggataaactcgatcacgagtgcgcggagggaggcgagaacctatcagtgggacaacgacagttagtgtgcctcgctcgcgctctgctgaggaagaccaagatcctggtgctggacgaagcaaccgccgcagtggatctggagacagatgatcttatacaaagcacaataaggacccagttcgaagactgcacagtgctgaccatcgctcacagacttaacaccatcatggattatactcgagttattgtgctcgataagggcgaaatccaggaatacggcgctcctagcgacttgctgcagcagcgaggcctgttctacagcatggctaaagatgccggactggtgtag

SEQ ID NO: 151746 - DNA, 4419 bp, Artificial Sequence
  derived and/or modified sequence
atggctctgcggggattttgttccgcagacgggagtgatcctttgtgggactggaacgtgacctggaatacctcaaatcccgactttacgaaatgctttcagaacaccgtcctggtctgggtgccatgtttttacctgtgggcctgtttccccttttattttttatacctgagtcggcacgaccggggatacattcagatgaccccactgaacaagaccaagaccgctttgggtttcctgttgtggattgtttgttgggccgacctgttttacagcttttgggaacgaagccgtggcatattcctagcccctgtgttcctggtgtccccaaccttactgggtataacaatgttgctggcaactttccttatacagctcgaacggagaaagggggtgcagtcctccggaatcatgctcacgttctggttggtagctttggtgtgcgctctggcgatcctgcggtctaaaatcatgacggctttgaaggaggacgcacaggtggatctcttccgtgacataactttttacgtgtactttagccttcttctgatccagttagtactatcatgtttttcagaccggtctcccttatttagcgagacaattcatgatccaaatccctgtcctgagtcctctgcttcctttctgagcagaatcaccttttggtggataacgggcctgattgtgcgtggctatcggcagccactggaaggcagtgacctgtggagccttaacaaagaagatacgtccgagcaggttgttcctgtcctggtaaagaactggaaaaaagaatgtgcgaaaactcgaaagcaacctgttaaggttgtgtattcttcaaaggatcctgcgcagccaaaggaatccagtaaagtggatgctaatgaagaagtcgaagccctcatcgtcaagagtccccagaaggaatggaatccgtctctgtttaaagtgttgtataaaacttttggaccatatttcttaatgtccttcttctttaaggccattcacgatctaatgatgttttcaggcccacagattctgaagctgctgataaagtttgtgaacgacacaaaggctccggattggcagggatatttctacacagtcttactgttcgtcaccgcctgcctccagaccctggtacttcatcagtatttccacatctgcttcgtgtctgggatgagaattaagacagccgtgatcggggcagtgtaccgtaaggctctggtgatcacaaatagtgctcgaaagtcttctactgtcggggagatcgtcaatctgatgagtgtggatgcccagaggtttatggatctggccacttatattaatatgatttggtcagcccctctccaggttatcctggccctatacctgctgtggctgaaccttggaccttccgtgctggccggagttgccgtgatggtcttaatggtgccagttaacgccgtcatggctatgaaaaccaagacataccaagtggcccatatgaagtcaaaggataaccggatcaagctcatgaacgaaatcctgaacggtatcaaggttctgaagctgtatgcctgggaactggcatttaaggataaagtgcttgctattcggcaggaggaactcaaggtcctgaagaagtccgcatacctgagtgctgttggcactttcacttgggtgtgcacccctttcctggttgcactctgcaccttcgccgtatatgtgactatagacgaaaacaacatcctggacgctcagacagcattcgtgtccttagccctcttcaacatactccgtttccccctgaatatactgccgatggtaataagttctatcgtgcaggcttcagtgtctctaaagcgacttcggattttcctctcccacgaggagctggagcccgactctattgaacggagaccagtgaaagatggaggcggaactaatagcattacagtgagaaacgctacatttacatgggccagaagcgacccaccgacgctaaacgggatcaccttttccattcctgagggcgctttagtcgcagtggtcgggcaagtcggctgcggcaaaagcagtctcctgagtgcgctgttggccgagatggacaaagttgaaggtcacgtcgccatcaagggcgtaaatctgtccggtgggcagaagcagagagtgtcccttgccagggcagtgtacagcaatgctgacatctacctgttcgatgaccccctgtcagctgttgacgcccatgtcggtaagcacatcttcgaaaacgtcatcggtcccaaaggtatgctgaaaaacaagacccgaatcctggtgacacacagcatgtcctatctgccacaagtcgacgtgattattgtaatgtctggtggcaagattagcgaaatggggtcgtaccaagaattattagccagagacggagcgttcgcggaatttctgaggacttacgcatccacggaacaggaacaggatgcagaagaaaacggcgtgactggtgtctccggccctggcaaggaggcaaaacagatggagaatggcatgctagtgaccgacagcgccggtaagcaactgcaaaggcagttgagttctagtagcagctactctggagacatttccaggcaccataatagtacagcggaactgcagaaagcagaagcaaagaaagaagagacgtggaaactgatggaggcagacaaggcgcagaccggccaggtgaagttaagtgtttattgggactacatgaaagccattggcctgttcatctcctttctgagcattttcctcttcatgtgcaatcacgtctcggctctggcatcaaactattggctctcactgtggacagacgaccctatcgtgaacgggacacaggagcacaccaaggtgagacttagcgtgtatggcgctcttggaattagccaggggatcgctgtgtttgggtacagcatggctgtctctattggcggtatcctggcttctcgctgtctgcatgtggatctgttacacagcattcttcgctcccctatgtcattctttgaaagaacaccctccgggaatcttgtaaatcgtttcagtaaggagctcgacactgttgattccatgattcctgaagtgatcaagatgttcatgggctccttattcaatgtgatcggcgcatgcattgtcatcctactggctacacctatcgcggcaattatcattcctcctttgggactcatttattttttcgttcagcgtttctacgtggcttcttctagacagttgaaacgccttgagagtgtctcccgcagtcctgtgtactcccatttcaatgagactttactcggcgtttcggttatacgggcattcgaagaacaagaaaggttcatacatcagagcgacctcaaggtggacgagaaccaaaaagcatactatcccagcattgtggcgaaccggtggttggctgtcaggctggagtgcgtgggcaactgcatagtgctctttgccgctttgtttgctgtaatctcgcgacactcgctgagtgcaggattggttgggctgtccgtgtcttattcattgcaggtaacaacatatctaaattggcttgttcggatgagctccgaaatggaaaccaacattgtagcggtcgaacgtctcaaagagtacagcgagaccgagaaggaggccccttggcaaatccaagaaactgcgcctcccagcagttggcctcaggtcggccgagtggaattccgaaattattgtctcagatatcgagaggatctagactttgtgctgagacatatcaatgttactattaatggcggagagaaggtcggaatcgtgggtcgcacaggagccggtaagagttccctcacgcttggactgttccgtatcaatgagagtgccgagggagaaattattatcgatgggatcaacatcgcgaagattggactccacgacctgagatttaaaattaccatcatcccacaggaccccgtcctgttctctggatctctgaggatgaaccttgacccgttttctcagtacagtgacgaggaggtgtggacttctctggaactggcccacctgaaggactttgtttcagcccttcccgataagctcgaccacgagtgcgccgagggcggagaaaacctgtcagtcggccagagacagcttgtttgcctggcacgggcactgttgcgcaaaaccaagattctcgttctggacgaggctacagctgctgtggacctggaaacagacgatcttatccaaagcacgatcaggacccagtttgaggactgtacagtcttgaccattgcccatcgccttaataccattatggactatactagagtgatcgtgcttgacaagggggagatccaggaatacggcgctcccagtgatctgcttcagcaaagagggctgttctactccatggccaaggatgccggtctcgtttag

SEQ ID NO: 151747 - DNA, 4626 bp, Artificial Sequence
  derived and/or modified sequence
atggccctaagaggattctgttcagcggacgggagcgatcctctctgggattggaacgttacctggaacacttctaaccctgatttcaccaaatgttttcagaacaccgtcctggtttgggtgccgtgtttctatctctgggcctgcttcccattttatttcctttatctgtcaagacacgacagaggttacattcagatgaccccgctcaataaaacgaagactgcgctgggttttctactatggatcgtctgttgggcagatttgttctatagcttctgggagagatctcgcggaatatttctcgcaccagtatttctggtctcacccacgctgttgggcattacgatgctgttggctacctttttgatccaactggagcgacgaaagggcgtccaatcctcgggtattatgctgacattttggctagtagccttggtgtgcgcactcgccatattgaggtctaagattatgaccgccctgaaggaagacgcccaggttgacttgtttagggatattaccttctacgtttatttcagtctgctgctgatccagttggttttgtcctgttttagcgaccgctcccccttattctctgagacgatccacgacccaaatccctgtcccgaatcttcggcttccttcttgagtcgtattactttctggtggatcaccggcctgatcgtgcgtggatatcggcaaccgctggagggctcagatctatggagcctgaacaaagaggatactagcgagcaagtagtccctgtgttggtgaagaactggaaaaaggagtgcgctaagacaagaaaacagcccgtcaaggttgtgtattcgtccaaagaccccgctcaacctaaggagtccagcaaggtagacgcaaatgaagaagtggaagccctgattgtgaagagcccgcagaaggagtggaatccttcattgtttaaggtattgtacaaaactttcggtccatacttcctgatgagctttttctttaaggccattcacgacctgatgatgttttctgggccacagattctgaaactccttatcaaatttgtcaatgacacaaaagcacctgactggcaagggtacttttacacagtgctcctgtttgtgaccgcctgtctccagacactcgtgttacatcagtacttccacatttgctttgtgtctggcatgaggattaagactgcagttatcggggctgtgtatcgtaaggcacttgtgataaccaacagcgctaggaaatcgtccaccgtaggcgagatagtgaacctcatgagcgtggatgcccagagatttatggacctcgcaacctatatcaatatgatttggagtgctcccctccaagtaatactcgccctttatttgctgtggctgaacctcggcccatccgttcttgccggtgtggctgtgatggtgttaatggttcccgtgaacgccgtcatggctatgaagacgaaaacttatcaggtcgctcacatgaaaagcaaagacaacaggatcaaacttatgaatgagatcctgaatgggataaaagtactgaaactatatgcctgggagctggccttcaaagacaaggtcctcgccatccgtcaggaagagctgaaggtgcttaagaaatccgcttatctgagcgctgtggggacgttcacctgggtctgcacacctttcttagtagcactatgcaccttcgcagtctatgtgactattgatgaaaacaacattctagacgctcagaccgcttttgtaagtttggcactgttcaacattcttcgctttcctctgaatattcttccaatggtaattagcagcatcgtacaagccagcgtaagtctgaagcgattaaggattttcctaagtcatgaggaactggaacctgacagcattgagcgacgtcccgtgaaggacggcggtgggactaactctatcacagtcagaaatgcaactttcacctgggcacgttctgaccccccaacactcaatgggatcaccttctcgatccccgaaggtgccctggtcgccgtggtaggccaggtggggtgtggaaaatctagcttgctttccgcgctccttgctgaaatggacaaggtcgagggacatgtggcgattaagggctcggttgcatacgtcccccagcaagcctggatccaaaatgattccctcagggagaatatcctgttcggatgccagctagaagaaccttattatcgaagtgtcatccaggcctgtgctctgctccccgaccttgaaattctaccgagtggtgaccgcacggagatcggggaaaagggagtaaacctttccgggggtcagaagcagcgggtgagtcttgctagagcagtgtacagcaatgcagacatctatctgttcgatgatcctttgagtgctgttgatgcacacgtgggcaaacatatctttgaaaatgtgattggtcctaagggaatgctgaaaaacaagaccaggatcctggtcactcattccatgagctacctccctcaggtggatgtgataatcgtgatgtctggcggaaaaataagtgagatggggagctaccaggagttgctcgcccgagatggggcatttgcagagtttttgcggacatacgcctcaactgaacaagaacaagatgctgaggagaacggatccaccgtaatggatgaggaggaggctggtgtgacaggtgtgtccggccctggcaaagaggccaaacagatggaaaacggaatgcttgtgaccgactccgcagggaagcagctccaaaggcagctgtcatcttcctccagctattcgggagatatctccaggcatcacaacagcaccgccgagttacagaaagccgaagccaagaaggaagaaacctggaagctgatggaggccgacaaggcgcaaactggccaagtgaagctttcggtttactgggactacatgaaagccatcggtctttttatctcttttttatccatattcctttttatgtgtaaccacgttagcgctctggccagcaactactggctgagcttgtggactgacgacccaattgtcaatggtactcaggagcatacgaaggtccggctgagcgtgtatggtgccctgggaatcagccagggaatcgctgtctttggatattcaatggcagtgtctataggaggcatcctggccagtagatgccttcatgtggacctgctgcactctatactcagatcgccgatgtcgttctttgagaggacacctagtggcaacctcgtaaataggttcagcaaggaactagatacagtggatagcatgatacctgaagtgattaaaatgttcatgggaagtctgttcaacgtgatcggcgcttgcatcgtcattctgcttgctacaccaatcgcggcaattatcattccaccgcttgggctaatttactttttcgtacagcgattttatgtggcctccagccgtcaactgaagcgtttagagagtgtgtccaggtcccccgtctacagccatttcaacgaaacactgctgggagtgagcgtcattcgagcttttgaagagcaagagcgttttatccaccagtcagacttgaaagtggacgagaatcagaaagcatactacccatctatcgtggctaataggtggctggcagtcaggctggagtgtgtgggtaactgtatcgtactgttcgctgccctgtttgcagtgatcagtcggcacagcctgtccgccggattggttggcctcagcgtctcgtattctctacaggttacaacatatcttaattggctggtccgaatgagctcggagatggaaaccaatatcgtggccgtcgagagactgaaggaatacagcgaaaccgaaaaagaggccccttggcagatacaggaaactgcgccaccatcttcctggccgcaggtgggcagagtcgagttcaggaattactgcctgcgttatcgggaagacttagacttcgtgctcagacacattaatgtgacgataaatggcggagagaaggtgggtatcgttgggaggaccggtgcaggtaaaagtagccttacactgggactctttaggatcaacgaatctgctgagggagaaatcattatcgacggaatcaatatcgctaaaattggccttcatgaccttaggtttaagatcacaatcattccacaagatcctgtattattttcaggatccctaaggatgaacctcgatccctttagtcagtactcggatgaggaggtgtggacgtcactggagcttgctcacttgaaggattttgtaagtgctctgccagacaaactcgaccacgagtgcgccgaaggaggcgagaacttgagcgtgggtcagagacagctggtctgcctggccagggccctgctcaggaaaacgaagatcctcgtgttggatgaggctaccgctgcagtagatctggaaaccgacgacctcatccagtcaaccatcaggacacaattcgaggattgtactgttctgacgattgcacacagactcaacacaataatggattatacaagggtgatcgtgctggataaaggggagattcaagaatatggagccccaagcgatcttttgcagcagcgcggattattctattccatggctaaagacgcgggtcttgtctag

SEQ ID NO: 151748 - DNA, 4596 bp, Artificial Sequence
  derived and/or modified sequence
atggctctgcgcggtttctgcagcgctgatggcagcgacccactgtgggactggaatgttacctggaacactagtaatcctgattttaccaaatgcttccagaatacagtgttggtatgggtaccatgtttttacttgtgggcctgtttcccgttctacttcctctacttgtcccggcatgatcgaggctacattcagatgacccctctgaacaaaacaaagaccgccttgggcttcctactctggatagtttgctgggcagatctgttctattcgttctgggagaggtccagaggaatctttcttgccccagtctttcttgtgagccctacgctcctgggcatcaccatgctattagccaccttcctaatccaactcgaacggaggaaaggagtccagagctccggaataatgctgacgttctggctcgtggctttggtgtgcgccctggcaattctacgatccaagattatgactgcccttaaggaagatgcccaggttgacctttttcgtgatattacgttttacgtgtacttctcccttcttttgattcagctggtcctttcctgcttttccgacagatctcctttattctctgagaccatccatgatcccaatccgtgtccagaatctagcgcaagcttcttgtcccgaatcacattctggtggatcacagggctcattgtccggggatacaggcagcccctggagggcagcgatctctggtctctgaataaagaggatacctcagagcaagtcgttccagttctggtgaaaaactggaaaaaggagtgtgctaagaccagaaaacagccggtgaaagtggtttactcatccaaggatcccgctcagcctaaggagagctctaaggtggacgccaacgaagaggtggaagccttaattgttaagagtcctcagaaggagtggaatcctagcctttttaaagttctgtacaagacatttgggccttatttcttaatgtccttcttctttaaagcgatccacgacttgatgatgttttctggtccacagatactgaagctgctgattaaatttgtgaacgacacaaaggcccctgactggcaggggtacttctacaccgttctgcttttcgtaacggcctgcctgcagactctcgtgctgcatcagtactttcacatttgtttcgtatcgggtatgcgcatcaaaactgctgtcattggtgccgtgtaccgaaaggctttggtcattacgaatagcgcgaggaagtcatccaccgttggtgagatcgtcaacctcatgtctgtggacgcccagagattcatggacctggcgacctacataaacatgatctggtcagcccctttacaggtgatcctagccctgtatctgctgtggctgaacctcggaccttccgttttagcaggcgtggctgtcatggtgctgatggttcctgtgaatgcagtaatggcaatgaaaactaaaacctatcaggtggcacatatgaaatctaaagacaatcgcataaagctcatgaatgaaatccttaacgggatcaaagtgttaaaactctatgcctgggaactagcttttaaggataaggtcctcgcgataagacaggaggagctgaaagtgttgaagaagagtgcctacctgtctgctgtaggcaccttcacctgggtgtgtaccccttttttggtggccctttgcactttcgcagtgtatgttactatcgacgagaacaacatattggacgcacagaccgccttcgtttccttagcactcttcaatatcttgagatttcccctcaacatcttacccatggttatcagtagcatcgttcaggcttctgtcagcctgaaaagacttcggatcttcctttctcatgaggagctcgagccagacagcattgagcgccgacccgtcaaggatgggggtggcactaattccattacagtccgcaatgctactttcacttgggccagatccgatcccccaaccctaaacggtataacattctccatccctgaaggggctctagtcgccgtcgtgggccaggtgggctgtggcaagtcaagcttgctgtcggcgctgctggccgaaatggataaagttgaagggcacgtggcaataaagggaagtgtggcgtacgtaccccagcaagcttggatccagaacgacagcctgcgtgagaatatcctttttggctgtcagttagaggagccttactaccgttccgttatccaagcctgcgcattactgccagatctggaaatcctacccagcggggacagaaccgagattggagagaagggggtgaatctctcaggcggtcagaaacaacgggtaagtctcgcaagggccgtttacagcaacgcggacatctatctgtttgacgatcccctgtctgcagtcgacgcacatgtggggaaacatattttcgagaacgttattggccctaagggtatgctcaaaaataagacccggatcctcgttacccactctatgtcttacttaccacaagttgatgtgattatcgtgatgtccgggggtaagatctcagagatgggatcataccaggaactgctagcacgggacggggctttcgctgaattcctgcggacatatgcttccactgaacaggagcaggatgcagaggaaaatggcgtcactggggtgagcgggcctgggaaggaggctaaacagatggaaaatggcatgctcgtgacggatagcgcaggaaagcagctgcagcgccagctgtctagttctagtagttattccggggatatttccagacatcacaactcaacagccgagttgcagaaagccgaggctaaaaaagaggaaacctggaaactaatggaagctgacaaggctcaaaccggacaggtaaagttatctgtgtattgggattatatgaaggcaatagggcttttcatcagttttctatccatcttcttgttcatgtgtaaccatgtgtccgccctggcctctaactactggctgtctctgtggacagacgaccctattgtgaatggaacacaggaacatacaaaagtgaggctgtccgtgtacggtgccctcggcatctcccagggcatcgccgtgtttgggtactctatggcagtctccatcggcggaatcctagccagtcgctgcctgcacgtggacctactgcatagtattttacggtcacccatgagctttttcgaaaggacacctagcgggaaccttgttaatcggttctctaaggagctcgatacagtcgacagcatgatcccagaggttatcaagatgtttatggggagcctcttcaacgtgataggcgcttgtatcgtcattttattggccacaccaattgctgcgatcatcatcccacctctcggattgatctacttctttgtacagaggttttatgtggccagctctagacagctgaagcggctcgagagcgtctcacgctcacccgtctattcacatttcaatgagaccttgctcggggtgagtgtcattagggctttcgaggagcaggaaagatttattcaccagtccgacctcaaggtggatgaaaatcaaaaggcttactaccctagcatcgtggccaacaggtggcttgccgtgcgcctggaatgtgtcggaaattgcatcgttctcttcgccgctttatttgccgtgatatcacgtcattccctgtctgccggactggtgggactttccgtatcctactccctgcaagtgacaacctatcttaactggctggtccgaatgtcttcagagatggagacgaatatcgtcgccgtcgaaaggttaaaagagtattctgagactgagaaggaagccccatggcagattcaggaaactgcgcctccctctagctggccccaggtgggtcgggtagagtttagaaattactgcctccgttatagggaagacttggattttgttctgagacatattaatgttaccattaacggaggcgagaaggtcggcatcgttggtaggacaggggcaggaaaatcgtccctgaccctgggccttttccgtatcaatgaaagcgcggagggcgaaataattatagatggtatcaatattgcaaagatcgggttgcacgacctcaggttcaaaattaccattatcccacaggatcccgtattgttctccggatctctgcggatgaacctggacccattctctcagtacagtgacgaggaagtgtggactagcctggaactggcccacctcaaagattttgtgtcagccctgccagataaacttgaccacgagtgcgctgagggaggtgaaaatctcagcgtgggacagcggcaactggtatgtcttgccagagcgctgctgcgcaagaccaagatcctggtgctcgatgaggcaacagccgctgtggacctcgaaacagacgatctcatccaaagcaccatacggacacagttcgaggactgtaccgttctgacaattgcacataggttgaatactattatggattatacccgggtcatcgtgctcgataaaggcgagatacaggaatatggagccccatctgacctgcttcagcagcggggtctgttctacagcatggcaaaagacgctgggctggtgtag

SEQ ID NO: 151749 - DNA, 3648 bp, Artificial Sequence
  derived and/or modified sequence
atgagctttttctttaaggccattcacgacctgatgatgttttctgggcctcagatcctcaaacttctgatcaaatttgtgaatgacactaaagcccctgattggcaggggtacttttatacagttttgctgttcgtgacagcttgcttgcaaaccctggttcttcatcagtacttccacatctgctttgtttctggaatgcgaatcaagactgcggtgattggggcagtataccgaaaagccctggtgatcacaaattcagcaagaaaaagctccaccgtgggggaaatagtgaacttaatgagcgtggacgcccagcgttttatggatctggccacgtacatcaatatgatttggagcgccccactgcaggtgatactcgccctatatttgctttggctaaatcttgggccaagcgtacttgcaggcgtcgctgtcatggtgctcatggttccagtgaatgccgtgatggcaatgaagacaaaaacctaccaggtcgctcatatgaagtctaaggataacagaattaaattaatgaacgaaatcctcaacggcattaaggttctcaagctgtatgcctgggagttggcatttaaagataaggtactcgccattcggcaagaggaactgaaagtgctgaagaaatctgcctatctatcagcagtgggaacctttacatgggtctgcacgccttttctcgtcgccctgtgcactttcgcagtctatgtcaccatcgacgagaacaatatcctcgacgctcagaccgcttttgtgagtctagctctcttcaatattttgaggtttcccctcaacatacttcccatggtgatttctagcattgtccaggcttcggtttcactgaagagactgagaattttcctgagccatgaggaattggagcccgacagcatcgaaaggcgtcccgtaaaggacggtggtggaactaatagtattacagttcgcaatgccacgtttacctgggctcgtagcgatccacccacccttaacgggataaccttctccatccctgagggggctctggtcgccgtcgtcggccaggttggctgtggaaagtccagtctgctctctgcacttttggccgagatggataaagtcgagggtcatgtggctatcaaaggttctgtggcctacgtgcctcagcaagcctggatacagaacgacagcctgcgagagaacatactttttggctgtcagttggaagaaccgtactatcgaagcgttatccaggcctgcgccctgttacctgatctggaaattctgccaagcggcgaccgaacagagatcggcgagaagggcgttaatctcagtggcggtcagaagcagagggttagcctcgcccgagccgtgtatagcaatgcggatatctatcttttcgatgaccccctaagcgccgtagacgcccacgtgggaaaacatatcttcgagaatgtgatcggacctaaaggtatgttgaaaaataagacccgcattctggtgacacactcaatgagctaccttcctcaagtagacgtgattattgtaatgtctggcggaaagatctctgagatgggaagctaccaggaacttttggctcgcgacggcgcattcgcggaatttttgaggacatacgcctctactgagcaggaacaggacgctgaggagaatggcagcactgtgatggatgaggaggaggctggagtgaccggtgtcagtggcccaggcaaagaggccaaacagatggaaaatggaatgctggtgactgactccgccggaaagcagctgcagcgccagctaagctcttctagttcatacagcggcgatataagccgccaccacaatagtacggccgagctacagaaggcagaggccaaaaaagaggaaacatggaagcttatggaagcagataaagctcagactggtcaagtcaagttgagtgtctactgggactacatgaaggcaattggtctgttcattagttttctgagcatctttctctttatgtgcaaccacgtctcagcgttagcaagcaactactggctgagtctctggaccgacgaccccatcgttaacggaactcaagaacacactaaggtgcgcttgtccgtgtacggcgcattgggcatcagtcagggtatcgctgtcttcggttacagtatggcggtctctatcggtgggatccttgccagccggtgtctgcacgtggatctgctgcattcaatactgaggtcacctatgtccttctttgaacgcaccccgagcggtaacctcgtgaacaggttctcaaaggaactcgacaccgtggacagtatgattcccgaggttatcaaaatgtttatgggctctctattcaacgttattggcgcatgtatcgtgatactgctggctacgccaatagccgctatcatcattcccccactcggcctcatttacttctttgttcaacgcttttacgtagcttcttccagacagctcaaaagactggaaagtgtttcacgatcccctgtgtatagccatttcaatgaaaccctgctgggggtgagtgtgattagggcattcgaggagcaggagaggtttattcaccagtcggacctaaaagtggacgagaatcaaaaggcgtattatccttctatcgtggccaataggtggctggccgtgaggcttgaatgtgtgggaaattgtatagtgctctttgcggcactgtttgcggtgatcagcagacatagcctttccgccggactggtcggtctgtccgtctcctactcgctgcaggtgaccacgtatctcaattggctggttagaatgtcttcagaaatggaaaccaacattgtcgccgtggaacggctgaaagagtacagcgagactgagaaggaggctccatggcagatccaggaaaccgctccgccatcgtcttggccccaagtggggcgagtggagttccgaaactactgtctgcgctaccgagaggatcttgactttgtacttaggcacataaacgtcacaataaatggtggtgagaaagtgggtatcgtggggaggacaggcgctggaaagagtagtttaacactcggcctttttagaatcaatgagtctgctgagggggaaatcatcatcgatggaatcaatatagccaagattggactgcatgacctacgattcaagatcactataatacctcaggaccccgtcctgtttagtggatcgctgcggatgaatctggatccatttagccagtattcggatgaagaggtgtggacctccctggagttggcccatctcaaagattttgtgtctgcactccctgacaaacttgaccatgagtgtgccgaggggggagaaaacctgagcgtcggtcagcggcaattggtatgtcttgcaagggctttactgcgcaaaactaaaatcctcgtattggatgaagccaccgctgctgtggacctcgaaacagacgatctgatccaatcaaccatccggacgcagtttgaggattgcaccgtgttgacgatagctcatcgtctgaacaccatcatggactacactcgggtcattgtgttagacaaaggggaaatccaggagtatggcgctccgtctgacctcctccaacagcgagggctgttctattccatggccaaggacgctggactggtttag

SEQ ID NO: 151750 - DNA, 6369 bp, Artificial Sequence
  derived and/or modified sequence
ccaggcggcgttgcggccccggccccggctccctgcgccgccgccgccgccgccgccagcgctagcgccagcagccgggcccgatcacccgccgcccggtgcccgccgccgcccgcgccagcaaccgggcccgatcacccgccgcccggtgcccgccgccgcccgcgccaccggcatggcgctccggggcttctgcagcgccgatggctccgacccgctctgggactggaatgtcacgtggaataccagcaaccccgacttcaccaagtgctttcagaacacggtcctcgtgtgggtgccttgtttttacctctgggcctgtttccccttctacttcctctatctctcccgacatgaccgaggctacattcagatgacacctctcaacaaaaccaaaactgccttgggatttttgctgtggatcgtctgctgggcagacctcttctactctttctgggaaagaagtcggggcatattcctggccccagtgtttctggtcagcccaactctcttgggcatcaccatgctgcttgctacctttttaattcagctggagaggaggaagggagttcagtcttcagggatcatgctcactttctggctggtagccctagtgtgtgccctagccatcctgagatccaaaattatgacagccttaaaagaggatgcccaggtggacctgtttcgtgacatcactttctacgtctacttttccctcttactcattcagctcgtcttgtcctgtttctcagatcgctcacccctgttctcggaaaccatccacgaccctaatccctgcccagagtccagcgcttccttcctgtcgaggatcaccttctggtggatcacagggttgattgtccggggctaccgccagcccctggagggcagtgacctctggtccttaaacaaggaggacacgtcggaacaagtcgtgcctgttttggtaaagaactggaagaaggaatgcgccaagactaggaagcagccggtgaaggttgtgtactcctccaaggatcctgcccagccgaaagagagttccaaggtggatgcgaatgaggaggtggaggctttgatcgtcaagtccccacagaaggagtggaacccctctctgtttaaggtgttatacaagacctttgggccctacttcctcatgagcttcttcttcaaggccatccacgacctgatgatgttttccgggccgcagatcttaaagttgctcatcaagttcgtgaatgacacgaaggccccagactggcagggctacttctacaccgtgctgctgtttgtcactgcctgcctgcagaccctcgtgctgcaccagtacttccacatctgcttcgtcagtggcatgaggatcaagaccgctgtcattggggctgtctatcggaaggccctggtgatcaccaattcagccagaaaatcctccacggtcggggagattgtcaacctcatgtctgtggacgctcagaggttcatggacttggccacgtacattaacatgatctggtcagcccccctgcaagtcatccttgctctctacctcctgtggctgaatctgggcccttccgtcctggctggagtggcggtgatggtcctcatggtgcccgtcaatgctgtgatggcgatgaagaccaagacgtatcaggtggcccacatgaagagcaaagacaatcggatcaagctgatgaacgaaattctcaatgggatcaaagtgctaaagctttatgcctgggagctggcattcaaggacaaggtgctggccatcaggcaggaggagctgaaggtgctgaagaagtctgcctacctgtcagccgtgggcaccttcacctgggtctgcacgccctttctggtggccttgtgcacatttgccgtctacgtgaccattgacgagaacaacatcctggatgcccagacagccttcgtgtctttggccttgttcaacatcctccggtttcccctgaacattctccccatggtcatcagcagcatcgtgcaggcgagtgtctccctcaaacgcctgaggatctttctctcccatgaggagctggaacctgacagcatcgagcgacggcctgtcaaagacggcgggggcacgaacagcatcaccgtgaggaatgccacattcacctgggccaggagcgaccctcccacactgaatggcatcaccttctccatccccgaaggtgctttggtggccgtggtgggccaggtgggctgcggaaagtcgtccctgctctcagccctcttggctgagatggacaaagtggaggggcacgtggctatcaagggctccgtggcctatgtgccacagcaggcctggattcagaatgattctctccgagaaaacatcctttttggatgtcagctggaggaaccatattacaggtccgtgatacaggcctgtgccctcctcccagacctggaaatcctgcccagtggggatcggacagagattggcgagaagggcgtgaacctgtctgggggccagaagcagcgcgtgagcctggcccgggccgtgtactccaacgctgacatttacctcttcgatgatcccctctcagcagtggatgcccatgtgggaaaacacatctttgaaaatgtgattggccccaaggggatgctgaagaacaagacgcggatcttggtcacgcacagcatgagctacttgccgcaggtggacgtcatcatcgtcatgagtggcggcaagatctctgagatgggctcctaccaggagctgctggctcgagacggcgccttcgctgagttcctgcgtacctatgccagcacagagcaggagcaggatgcagaggagaacggggtcacgggcgtcagcggtccagggaaggaagcaaagcaaatggagaatggcatgctggtgacggacagtgcagggaagcaactgcagagacagctcagcagctcctcctcctatagtggggacatcagcaggcaccacaacagcaccgcagaactgcagaaagctgaggccaagaaggaggagacctggaagctgatggaggctgacaaggcgcagacagggcaggtcaagctttccgtgtactgggactacatgaaggccatcggactcttcatctccttcctcagcatcttccttttcatgtgtaaccatgtgtccgcgctggcttccaactattggctcagcctctggactgatgaccccatcgtcaacgggactcaggagcacacgaaagtccggctgagcgtctatggagccctgggcatttcacaagggatcgccgtgtttggctactccatggccgtgtccatcggggggatcttggcttcccgctgtctgcacgtggacctgctgcacagcatcctgcggtcacccatgagcttctttgagcggacccccagtgggaacctggtgaaccgcttctccaaggagctggacacagtggactccatgatcccggaggtcatcaagatgttcatgggctccctgttcaacgtcattggtgcctgcatcgttatcctgctggccacgcccatcgccgccatcatcatcccgccccttggcctcatctacttcttcgtccagaggttctacgtggcttcctcccggcagctgaagcgcctcgagtcggtcagccgctccccggtctattcccatttcaacgagaccttgctgggggtcagcgtcattcgagccttcgaggagcaggagcgcttcatccaccagagtgacctgaaggtggacgagaaccagaaggcctattaccccagcatcgtggccaacaggtggctggccgtgcggctggagtgtgtgggcaactgcatcgttctgtttgctgccctgtttgcggtgatctccaggcacagcctcagtgctggcttggtgggcctctcagtgtcttactcattgcaggtcaccacgtacttgaactggctggttcggatgtcatctgaaatggaaaccaacatcgtggccgtggagaggctcaaggagtattcagagactgagaaggaggcgccctggcaaatccaggagacagctccgcccagcagctggccccaggtgggccgagtggaattccggaactactgcctgcgctaccgagaggacctggacttcgttctcaggcacatcaatgtcacgatcaatgggggagaaaaggtcggcatcgtggggcggacgggagctgggaagtcgtccctgaccctgggcttatttcggatcaacgagtctgccgaaggagagatcatcatcgatggcatcaacatcgccaagatcggcctgcacgacctccgcttcaagatcaccatcatcccccaggaccctgttttgttttcgggttccctccgaatgaacctggacccattcagccagtactcggatgaagaagtctggacgtccctggagctggcccacctgaaggacttcgtgtcagcccttcctgacaagctagaccatgaatgtgcagaaggcggggagaacctcagggtgatcgtcttggacaaaggagaaatccaggagtacggcgccccatcggacctcctgcagcagagaggtcttttctacagcatggccaaagacgccggcttggtgtgagccccagagctggcatatctggtcagaactgcagggcctatatgccagcgcccagggaggagtcagtacccctggtaaaccaagcctcccacactgaaaccaaaacataaaaaccaaacccagacaaccaaaacatattcaaagcagcagccaccgccatccggtcccctgcctggaactggctgtgaagacccaggagagacagagatgcgaaccacccaaaacacgcacaccctgcccctggtgccctgagacagacacacagcctcacgcccccaggaatgcaagtggtttcctggtgcttcccacggaggagttttggcagccagacttctggaggaattggttgtatagaagatcctagtgaccaaattcagcctactgcctcggatctctccagccgaagtctgtggactgcaagtctttgagatgcttctggctcccatcacctctaacatccttgtctgggtctaccaggaacgcttcatttccttggggctgcagttttgtggttgaggggcctggagaaaatcattttctccccttggcagtgtcccagggccctggatggtcctcttaccaacatctggtcttccaggcactcaaaagctgggaaccagcatctcagcgccagctctaccagttctcgttttgggccagaggcagcctctgcactcccacgcctgtcctcctggaagggacctggttggactaacggctaacctggacctggaactgtagggccaggggattgtctcagggccgacgttccacctggggcttccctccccacccaccccgactccaggctttcccttttttcttttgttcaacattgtaagaacaatcaatgctgttattactgttcccaccatgattgatgtggggtaaatattaaggagatggcctcatgggaatttgaccttgactagaaatagagactgagagtgagcaaccagctggaaggtactatgccagtcctagcagaaaaatgtgttaggggcctggcccaaagcagtgttggttgcttacagtgttgattgattttgttcttttttcttaccacctcttttctttccctctcatggtacctgctcatggttatgaagctttcaaagtaaagaacacgaaatacctcccaagtattaccagtgggtaccaaaaaaatgtccccttgagtcttttccttgtttttagatgttaattctctcccttggcatccggttagccccccagggggggcagcattgtggagaacttgatatttagttactgatgctcttccaggacacgaaaagaacccatctttgaatatcaatgattttttttttttaagtactgttccggggagaaaaacagtctcaaaacttgaacttcttgggaatagaagtgttgggctgagaagtaacattcccaggaaatagtgagaagctcgccctgtgtttgaaaccgtgttggtctctgtgttcctggaagaaaacagggaagcagcatcttttaaagcctgttctttaaggtgtctcgttagagcccaaagtggaatccggaaggcagccagagctgaggctgccccaagactcagacttgctaagaattacgccgccgacttcaaacccagagagcatctttcttttaggcgaaaacgcatatatttattttttgtaagttataccattctttcacattagataaactaagttttgggggatccttttgtaatgacttacactggaaatgcgaacatttgcagtaaaaaaatatatatatatctatatattttatttctttctaaa

SEQ ID NO: 151751 - DNA, 6396 bp, Artificial Sequence
  derived and/or modified sequence
ccaggcggcgttgcggccccggccccggctccctgcgccgccgccgccgccgccgccagcgctagcgccagcagccgggcccgatcacccgccgcccggtgcccgccgccgcccgcgccagcaaccgggcccgatcacccgccgcccggtgcccgccgccgcccgcgccaccggcatggcgctccggggcttctgcagcgccgatggctccgacccgctctgggactggaatgtcacgtggaataccagcaaccccgacttcaccaagtgctttcagaacacggtcctcgtgtgggtgccttgtttttacctctgggcctgtttccccttctacttcctctatctctcccgacatgaccgaggctacattcagatgacacctctcaacaaaaccaaaactgccttgggatttttgctgtggatcgtctgctgggcagacctcttctactctttctgggaaagaagtcggggcatattcctggccccagtgtttctggtcagcccaactctcttgggcatcaccatgctgcttgctacctttttaattcagctggagaggaggaagggagttcagtcttcagggatcatgctcactttctggctggtagccctagtgtgtgccctagccatcctgagatccaaaattatgacagccttaaaagaggatgcccaggtggacctgtttcgtgacatcactttctacgtctacttttccctcttactcattcagctcgtcttgtcctgtttctcagatcgctcacccctgttctcggaaaccatccacgaccctaatccctgcccagagtccagcgcttccttcctgtcgaggatcaccttctggtggatcacagggttgattgtccggggctaccgccagcccctggagggcagtgacctctggtccttaaacaaggaggacacgtcggaacaagtcgtgcctgttttggtaaagaactggaagaaggaatgcgccaagactaggaagcagccggtgaaggttgtgtactcctccaaggatcctgcccagccgaaagagagttccaaggtggatgcgaatgaggaggtggaggctttgatcgtcaagtccccacagaaggagtggaacccctctctgtttaaggtgttatacaagacctttgggccctacttcctcatgagcttcttcttcaaggccatccacgacctgatgatgttttccgggccgcagatcttaaagttgctcatcaagttcgtgaatgacacgaaggccccagactggcagggctacttctacaccgtgctgctgtttgtcactgcctgcctgcagaccctcgtgctgcaccagtacttccacatctgcttcgtcagtggcatgaggatcaagaccgctgtcattggggctgtctatcggaaggccctggtgatcaccaattcagccagaaaatcctccacggtcggggagattgtcaacctcatgtctgtggacgctcagaggttcatggacttggccacgtacattaacatgatctggtcagcccccctgcaagtcatccttgctctctacctcctgtggctgaatctgggcccttccgtcctggctggagtggcggtgatggtcctcatggtgcccgtcaatgctgtgatggcgatgaagaccaagacgtatcaggtggcccacatgaagagcaaagacaatcggatcaagctgatgaacgaaattctcaatgggatcaaagtgctaaagctttatgcctgggagctggcattcaaggacaaggtgctggccatcaggcaggaggagctgaaggtgctgaagaagtctgcctacctgtcagccgtgggcaccttcacctgggtctgcacgccctttctggtggccttgtgcacatttgccgtctacgtgaccattgacgagaacaacatcctggatgcccagacagccttcgtgtctttggccttgttcaacatcctccggtttcccctgaacattctccccatggtcatcagcagcatcgtgcaggcgagtgtctccctcaaacgcctgaggatctttctctcccatgaggagctggaacctgacagcatcgagcgacggcctgtcaaagacggcgggggcacgaacagcatcaccgtgaggaatgccacattcacctgggccaggagcgaccctcccacactgaatggcatcaccttctccatccccgaaggtgctttggtggccgtggtgggccaggtgggctgcggaaagtcgtccctgctctcagccctcttggctgagatggacaaagtggaggggcacgtggctatcaagggctccgtggcctatgtgccacagcaggcctggattcagaatgattctctccgagaaaacatcctttttggatgtcagctggaggaaccatattacaggtccgtgatacaggcctgtgccctcctcccagacctggaaatcctgcccagtggggatcggacagagattggcgagaagacgcggatcttggtcacgcacagcatgagctacttgccgcaggtggacgtcatcatcgtcatgagtggcggcaagatctctgagatgggctcctaccaggagctgctggctcgagacggcgccttcgctgagttcctgcgtacctatgccagcacagagcaggagcaggatgcagaggagaacggggtcacgggcgtcagcggtccagggaaggaagcaaagcaaatggagaatggcatgctggtgacggacagtgcagggaagcaactgcagagacagctcagcagctcctcctcctatagtggggacatcagcaggcaccacaacagcaccgcagaactgcagaaagctgaggccaagaaggaggagacctggaagctgatggaggctgacaaggcgcagacagggcaggtcaagctttccgtgtactgggactacatgaaggccatcggactcttcatctccttcctcagcatcttccttttcatgtgtaaccatgtgtccgcgctggcttccaactattggctcagcctctggactgatgaccccatcgtcaacgggactcaggagcacacgaaagtccggctgagcgtctatggagccctgggcatttcacaagggatcgccgtgtttggctactccatggccgtgtccatcggggggatcttggcttcccgctgtctgcacgtggacctgctgcacagcatcctgcggtcacccatgagcttctttgagcggacccccagtgggaacctggtgaaccgcttctccaaggagctggacacagtggactccatgatcccggaggtcatcaagatgttcatgggctccctgttcaacgtcattggtgcctgcatcgttatcctgctggccacgcccatcgccgccatcatcatcccgccccttggcctcatctacttcttcgtccagaggttctacgtggcttcctcccggcagctgaagcgcctcgagtcggtcagccgctccccggtctattcccatttcaacgagaccttgctgggggtcagcgtcattcgagccttcgaggagcaggagcgcttcatccaccagagtgacctgaaggtggacgagaaccagaaggcctattaccccagcatcgtggccaacaggtggctggccgtgcggctggagtgtgtgggcaactgcatcgttctgtttgctgccctgtttgcggtgatctccaggcacagcctcagtgctggcttggtgggcctctcagtgtcttactcattgcaggtcaccacgtacttgaactggctggttcggatgtcatctgaaatggaaaccaacatcgtggccgtggagaggctcaaggagtattcagagactgagaaggaggcgccctggcaaatccaggagacagctccgcccagcagctggccccaggtgggccgagtggaattccggaactactgcctgcgctaccgagaggacctggacttcgttctcaggcacatcaatgtcacgatcaatgggggagaaaaggtcggcatcgtggggcggacgggagctgggaagtcgtccctgaccctgggcttatttcggatcaacgagtctgccgaaggagagatcatcatcgatggcatcaacatcgccaagatcggcctgcacgacctccgcttcaagatcaccatcatcccccaggaccctgttttgttttcgggttccctccgaatgaacctggacccattcagccagtactcggatgaagaagtctggacgtccctggagctggcccacctgaaggacttcgtgtcagcccttcctgacaagctagaccatgaatgtgcagaaggcggggagaacctcagtgtcgggcagcgccagcttgtgtgcctagcccgggccctgctgaggaagacgaagatccttgtgttggatgaggccacggcagccgtggacctggaaacggacgacctcatccagtccaccatccggacacagttcgaggactgcaccgtcctcaccatcgcccaccggctcaacaccatcatggactacacaagggtgatcgtcttggacaaaggagaaatccaggagtacggcgccccatcggacctcctgcagcagagaggtcttttctacagcatggccaaagacgccggcttggtgtgagccccagagctggcatatctggtcagaactgcagggcctatatgccagcgcccagggaggagtcagtacccctggtaaaccaagcctcccacactgaaaccaaaacataaaaaccaaacccagacaaccaaaacatattcaaagcagcagccaccgccatccggtcccctgcctggaactggctgtgaagacccaggagagacagagatgcgaaccacccaaaacacgcacaccctgcccctggtgccctgagacagacacacagcctcacgcccccaggaatgcaagtggtttcctggtgcttcccacggaggagttttggcagccagacttctggaggaattggttgtatagaagatcctagtgaccaaattcagcctactgcctcggatctctccagccgaagtctgtggactgcaagtctttgagatgcttctggctcccatcacctctaacatccttgtctgggtctaccaggaacgcttcatttccttggggctgcagttttgtggttgaggggcctggagaaaatcattttctccccttggcagtgtcccagggccctggatggtcctcttaccaacatctggtcttccaggcactcaaaagctgggaaccagcatctcagcgccagctctaccagttctcgttttgggccagaggcagcctctgcactcccacgcctgtcctcctggaagggacctggttggactaacggctaacctggacctggaactgtagggccaggggattgtctcagggccgacgttccacctggggcttccctccccacccaccccgactccaggctttcccttttttcttttgttcaacattgtaagaacaatcaatgctgttattactgttcccaccatgattgatgtggggtaaatattaaggagatggcctcatgggaatttgaccttgactagaaatagagactgagagtgagcaaccagctggaaggtactatgccagtcctagcagaaaaatgtgttaggggcctggcccaaagcagtgttggttgcttacagtgttgattgattttgttcttttttcttaccacctcttttctttccctctcatggtacctgctcatggttatgaagctttcaaagtaaagaacacgaaatacctcccaagtattaccagtgggtaccaaaaaaatgtccccttgagtcttttccttgtttttagatgttaattctctcccttggcatccggttagccccccagggggggcagcattgtggagaacttgatatttagttactgatgctcttccaggacacgaaaagaacccatctttgaatatcaatgattttttttttttaagtactgttccggggagaaaaacagtctcaaaacttgaacttcttgggaatagaagtgttgggctgagaagtaacattcccaggaaatagtgagaagctcgccctgtgtttgaaaccgtgttggtctctgtgttcctggaagaaaacagggaagcagcatcttttaaagcctgttctttaaggtgtctcgttagagcccaaagtggaatccggaaggcagccagagctgaggctgccccaagactcagacttgctaagaattacgccgccgacttcaaacccagagagcatctttcttttaggcgaaaacgcatatatttattttttgtaagttataccattctttcacattagataaactaagttttgggggatccttttgtaatgacttacactggaaatgcgaacatttgcagtaaaaaaatatatatatatctatatattttatttctttctaaa

SEQ ID NO: 151752 - DNA, 6219 bp, Artificial Sequence
  derived and/or modified sequence
ccaggcggcgttgcggccccggccccggctccctgcgccgccgccgccgccgccgccagcgctagcgccagcagccgggcccgatcacccgccgcccggtgcccgccgccgcccgcgccagcaaccgggcccgatcacccgccgcccggtgcccgccgccgcccgcgccaccggcatggcgctccggggcttctgcagcgccgatggctccgacccgctctgggactggaatgtcacgtggaataccagcaaccccgacttcaccaagtgctttcagaacacggtcctcgtgtgggtgccttgtttttacctctgggcctgtttccccttctacttcctctatctctcccgacatgaccgaggctacattcagatgacacctctcaacaaaaccaaaactgccttgggatttttgctgtggatcgtctgctgggcagacctcttctactctttctgggaaagaagtcggggcatattcctggccccagtgtttctggtcagcccaactctcttgggcatcaccatgctgcttgctacctttttaattcagctggagaggaggaagggagttcagtcttcagggatcatgctcactttctggctggtagccctagtgtgtgccctagccatcctgagatccaaaattatgacagccttaaaagaggatgcccaggtggacctgtttcgtgacatcactttctacgtctacttttccctcttactcattcagctcgtcttgtcctgtttctcagatcgctcacccctgttctcggaaaccatccacgaccctaatccctgcccagagtccagcgcttccttcctgtcgaggatcaccttctggtggatcacagggttgattgtccggggctaccgccagcccctggagggcagtgacctctggtccttaaacaaggaggacacgtcggaacaagtcgtgcctgttttggtaaagaactggaagaaggaatgcgccaagactaggaagcagccggtgaaggttgtgtactcctccaaggatcctgcccagccgaaagagagttccaaggtggatgcgaatgaggaggtggaggctttgatcgtcaagtccccacagaaggagtggaacccctctctgtttaaggtgttatacaagacctttgggccctacttcctcatgagcttcttcttcaaggccatccacgacctgatgatgttttccgggccgcagatcttaaagttgctcatcaagttcgtgaatgacacgaaggccccagactggcagggctacttctacaccgtgctgctgtttgtcactgcctgcctgcagaccctcgtgctgcaccagtacttccacatctgcttcgtcagtggcatgaggatcaagaccgctgtcattggggctgtctatcggaaggccctggtgatcaccaattcagccagaaaatcctccacggtcggggagattgtcaacctcatgtctgtggacgctcagaggttcatggacttggccacgtacattaacatgatctggtcagcccccctgcaagtcatccttgctctctacctcctgtggctgaatctgggcccttccgtcctggctggagtggcggtgatggtcctcatggtgcccgtcaatgctgtgatggcgatgaagaccaagacgtatcaggtggcccacatgaagagcaaagacaatcggatcaagctgatgaacgaaattctcaatgggatcaaagtgctaaagctttatgcctgggagctggcattcaaggacaaggtgctggccatcaggcaggaggagctgaaggtgctgaagaagtctgcctacctgtcagccgtgggcaccttcacctgggtctgcacgccctttctggtggccttgtgcacatttgccgtctacgtgaccattgacgagaacaacatcctggatgcccagacagccttcgtgtctttggccttgttcaacatcctccggtttcccctgaacattctccccatggtcatcagcagcatcgtgcaggcgagtgtctccctcaaacgcctgaggatctttctctcccatgaggagctggaacctgacagcatcgagcgacggcctgtcaaagacggcgggggcacgaacagcatcaccgtgaggaatgccacattcacctgggccaggagcgaccctcccacactgaatggcatcaccttctccatccccgaaggtgctttggtggccgtggtgggccaggtgggctgcggaaagtcgtccctgctctcagccctcttggctgagatggacaaagtggaggggcacgtggctatcaagacgcggatcttggtcacgcacagcatgagctacttgccgcaggtggacgtcatcatcgtcatgagtggcggcaagatctctgagatgggctcctaccaggagctgctggctcgagacggcgccttcgctgagttcctgcgtacctatgccagcacagagcaggagcaggatgcagaggagaacggggtcacgggcgtcagcggtccagggaaggaagcaaagcaaatggagaatggcatgctggtgacggacagtgcagggaagcaactgcagagacagctcagcagctcctcctcctatagtggggacatcagcaggcaccacaacagcaccgcagaactgcagaaagctgaggccaagaaggaggagacctggaagctgatggaggctgacaaggcgcagacagggcaggtcaagctttccgtgtactgggactacatgaaggccatcggactcttcatctccttcctcagcatcttccttttcatgtgtaaccatgtgtccgcgctggcttccaactattggctcagcctctggactgatgaccccatcgtcaacgggactcaggagcacacgaaagtccggctgagcgtctatggagccctgggcatttcacaagggatcgccgtgtttggctactccatggccgtgtccatcggggggatcttggcttcccgctgtctgcacgtggacctgctgcacagcatcctgcggtcacccatgagcttctttgagcggacccccagtgggaacctggtgaaccgcttctccaaggagctggacacagtggactccatgatcccggaggtcatcaagatgttcatgggctccctgttcaacgtcattggtgcctgcatcgttatcctgctggccacgcccatcgccgccatcatcatcccgccccttggcctcatctacttcttcgtccagaggttctacgtggcttcctcccggcagctgaagcgcctcgagtcggtcagccgctccccggtctattcccatttcaacgagaccttgctgggggtcagcgtcattcgagccttcgaggagcaggagcgcttcatccaccagagtgacctgaaggtggacgagaaccagaaggcctattaccccagcatcgtggccaacaggtggctggccgtgcggctggagtgtgtgggcaactgcatcgttctgtttgctgccctgtttgcggtgatctccaggcacagcctcagtgctggcttggtgggcctctcagtgtcttactcattgcaggtcaccacgtacttgaactggctggttcggatgtcatctgaaatggaaaccaacatcgtggccgtggagaggctcaaggagtattcagagactgagaaggaggcgccctggcaaatccaggagacagctccgcccagcagctggccccaggtgggccgagtggaattccggaactactgcctgcgctaccgagaggacctggacttcgttctcaggcacatcaatgtcacgatcaatgggggagaaaaggtcggcatcgtggggcggacgggagctgggaagtcgtccctgaccctgggcttatttcggatcaacgagtctgccgaaggagagatcatcatcgatggcatcaacatcgccaagatcggcctgcacgacctccgcttcaagatcaccatcatcccccaggaccctgttttgttttcgggttccctccgaatgaacctggacccattcagccagtactcggatgaagaagtctggacgtccctggagctggcccacctgaaggacttcgtgtcagcccttcctgacaagctagaccatgaatgtgcagaaggcggggagaacctcagtgtcgggcagcgccagcttgtgtgcctagcccgggccctgctgaggaagacgaagatccttgtgttggatgaggccacggcagccgtggacctggaaacggacgacctcatccagtccaccatccggacacagttcgaggactgcaccgtcctcaccatcgcccaccggctcaacaccatcatggactacacaagggtgatcgtcttggacaaaggagaaatccaggagtacggcgccccatcggacctcctgcagcagagaggtcttttctacagcatggccaaagacgccggcttggtgtgagccccagagctggcatatctggtcagaactgcagggcctatatgccagcgcccagggaggagtcagtacccctggtaaaccaagcctcccacactgaaaccaaaacataaaaaccaaacccagacaaccaaaacatattcaaagcagcagccaccgccatccggtcccctgcctggaactggctgtgaagacccaggagagacagagatgcgaaccacccaaaacacgcacaccctgcccctggtgccctgagacagacacacagcctcacgcccccaggaatgcaagtggtttcctggtgcttcccacggaggagttttggcagccagacttctggaggaattggttgtatagaagatcctagtgaccaaattcagcctactgcctcggatctctccagccgaagtctgtggactgcaagtctttgagatgcttctggctcccatcacctctaacatccttgtctgggtctaccaggaacgcttcatttccttggggctgcagttttgtggttgaggggcctggagaaaatcattttctccccttggcagtgtcccagggccctggatggtcctcttaccaacatctggtcttccaggcactcaaaagctgggaaccagcatctcagcgccagctctaccagttctcgttttgggccagaggcagcctctgcactcccacgcctgtcctcctggaagggacctggttggactaacggctaacctggacctggaactgtagggccaggggattgtctcagggccgacgttccacctggggcttccctccccacccaccccgactccaggctttcccttttttcttttgttcaacattgtaagaacaatcaatgctgttattactgttcccaccatgattgatgtggggtaaatattaaggagatggcctcatgggaatttgaccttgactagaaatagagactgagagtgagcaaccagctggaaggtactatgccagtcctagcagaaaaatgtgttaggggcctggcccaaagcagtgttggttgcttacagtgttgattgattttgttcttttttcttaccacctcttttctttccctctcatggtacctgctcatggttatgaagctttcaaagtaaagaacacgaaatacctcccaagtattaccagtgggtaccaaaaaaatgtccccttgagtcttttccttgtttttagatgttaattctctcccttggcatccggttagccccccagggggggcagcattgtggagaacttgatatttagttactgatgctcttccaggacacgaaaagaacccatctttgaatatcaatgattttttttttttaagtactgttccggggagaaaaacagtctcaaaacttgaacttcttgggaatagaagtgttgggctgagaagtaacattcccaggaaatagtgagaagctcgccctgtgtttgaaaccgtgttggtctctgtgttcctggaagaaaacagggaagcagcatcttttaaagcctgttctttaaggtgtctcgttagagcccaaagtggaatccggaaggcagccagagctgaggctgccccaagactcagacttgctaagaattacgccgccgacttcaaacccagagagcatctttcttttaggcgaaaacgcatatatttattttttgtaagttataccattctttcacattagataaactaagttttgggggatccttttgtaatgacttacactggaaatgcgaacatttgcagtaaaaaaatatatatatatctatatattttatttctttctaaa

SEQ ID NO: 151753 - DNA, 6387 bp, Artificial Sequence
  derived and/or modified sequence
ccaggcggcgttgcggccccggccccggctccctgcgccgccgccgccgccgccgccagcgctagcgccagcagccgggcccgatcacccgccgcccggtgcccgccgccgcccgcgccagcaaccgggcccgatcacccgccgcccggtgcccgccgccgcccgcgccaccggcatggcgctccggggcttctgcagcgccgatggctccgacccgctctgggactggaatgtcacgtggaataccagcaaccccgacttcaccaagtgctttcagaacacggtcctcgtgtgggtgccttgtttttacctctgggcctgtttccccttctacttcctctatctctcccgacatgaccgaggctacattcagatgacacctctcaacaaaaccaaaactgccttgggatttttgctgtggatcgtctgctgggcagacctcttctactctttctgggaaagaagtcggggcatattcctggccccagtgtttctggtcagcccaactctcttgggcatcaccatgctgcttgctacctttttaattcagctggagaggaggaagggagttcagtcttcagggatcatgctcactttctggctggtagccctagtgtgtgccctagccatcctgagatccaaaattatgacagccttaaaagaggatgcccaggtggacctgtttcgtgacatcactttctacgtctacttttccctcttactcattcagctcgtcttgtcctgtttctcagatcgctcacccctgttctcggaaaccatccacgaccctaatccctgcccagagtccagcgcttccttcctgtcgaggatcaccttctggtggatcacagggttgattgtccggggctaccgccagcccctggagggcagtgacctctggtccttaaacaaggaggacacgtcggaacaagtcgtgcctgttttggtaaagaactggaagaaggaatgcgccaagactaggaagcagccggtgaaggttgtgtactcctccaaggatcctgcccagccgaaagagagttccaaggtggatgcgaatgaggaggtggaggctttgatcgtcaagtccccacagaaggagtggaacccctctctgtttaaggtgttatacaagacctttgggccctacttcctcatgagcttcttcttcaaggccatccacgacctgatgatgttttccgggccgcagatcttaaagttgctcatcaagttcgtgaatgacacgaaggccccagactggcagggctacttctacaccgtgctgctgtttgtcactgcctgcctgcagaccctcgtgctgcaccagtacttccacatctgcttcgtcagtggcatgaggatcaagaccgctgtcattggggctgtctatcggaaggccctggtgatcaccaattcagccagaaaatcctccacggtcggggagattgtcaacctcatgtctgtggacgctcagaggttcatggacttggccacgtacattaacatgatctggtcagcccccctgcaagtcatccttgctctctacctcctgtggctgaatctgggcccttccgtcctggctggagtggcggtgatggtcctcatggtgcccgtcaatgctgtgatggcgatgaagaccaagacgtatcaggtggcccacatgaagagcaaagacaatcggatcaagctgatgaacgaaattctcaatgggatcaaagtgctaaagctttatgcctgggagctggcattcaaggacaaggtgctggccatcaggcaggaggagctgaaggtgctgaagaagtctgcctacctgtcagccgtgggcaccttcacctgggtctgcacgccctttctggtggccttgtgcacatttgccgtctacgtgaccattgacgagaacaacatcctggatgcccagacagccttcgtgtctttggccttgttcaacatcctccggtttcccctgaacattctccccatggtcatcagcagcatcgtgcaggcgagtgtctccctcaaacgcctgaggatctttctctcccatgaggagctggaacctgacagcatcgagcgacggcctgtcaaagacggcgggggcacgaacagcatcaccgtgaggaatgccacattcacctgggccaggagcgaccctcccacactgaatggcatcaccttctccatccccgaaggtgctttggtggccgtggtgggccaggtgggctgcggaaagtcgtccctgctctcagccctcttggctgagatggacaaagtggaggggcacgtggctatcaagggcgtgaacctgtctgggggccagaagcagcgcgtgagcctggcccgggccgtgtactccaacgctgacatttacctcttcgatgatcccctctcagcagtggatgcccatgtgggaaaacacatctttgaaaatgtgattggccccaaggggatgctgaagaacaagacgcggatcttggtcacgcacagcatgagctacttgccgcaggtggacgtcatcatcgtcatgagtggcggcaagatctctgagatgggctcctaccaggagctgctggctcgagacggcgccttcgctgagttcctgcgtacctatgccagcacagagcaggagcaggatgcagaggagaacggggtcacgggcgtcagcggtccagggaaggaagcaaagcaaatggagaatggcatgctggtgacggacagtgcagggaagcaactgcagagacagctcagcagctcctcctcctatagtggggacatcagcaggcaccacaacagcaccgcagaactgcagaaagctgaggccaagaaggaggagacctggaagctgatggaggctgacaaggcgcagacagggcaggtcaagctttccgtgtactgggactacatgaaggccatcggactcttcatctccttcctcagcatcttccttttcatgtgtaaccatgtgtccgcgctggcttccaactattggctcagcctctggactgatgaccccatcgtcaacgggactcaggagcacacgaaagtccggctgagcgtctatggagccctgggcatttcacaagggatcgccgtgtttggctactccatggccgtgtccatcggggggatcttggcttcccgctgtctgcacgtggacctgctgcacagcatcctgcggtcacccatgagcttctttgagcggacccccagtgggaacctggtgaaccgcttctccaaggagctggacacagtggactccatgatcccggaggtcatcaagatgttcatgggctccctgttcaacgtcattggtgcctgcatcgttatcctgctggccacgcccatcgccgccatcatcatcccgccccttggcctcatctacttcttcgtccagaggttctacgtggcttcctcccggcagctgaagcgcctcgagtcggtcagccgctccccggtctattcccatttcaacgagaccttgctgggggtcagcgtcattcgagccttcgaggagcaggagcgcttcatccaccagagtgacctgaaggtggacgagaaccagaaggcctattaccccagcatcgtggccaacaggtggctggccgtgcggctggagtgtgtgggcaactgcatcgttctgtttgctgccctgtttgcggtgatctccaggcacagcctcagtgctggcttggtgggcctctcagtgtcttactcattgcaggtcaccacgtacttgaactggctggttcggatgtcatctgaaatggaaaccaacatcgtggccgtggagaggctcaaggagtattcagagactgagaaggaggcgccctggcaaatccaggagacagctccgcccagcagctggccccaggtgggccgagtggaattccggaactactgcctgcgctaccgagaggacctggacttcgttctcaggcacatcaatgtcacgatcaatgggggagaaaaggtcggcatcgtggggcggacgggagctgggaagtcgtccctgaccctgggcttatttcggatcaacgagtctgccgaaggagagatcatcatcgatggcatcaacatcgccaagatcggcctgcacgacctccgcttcaagatcaccatcatcccccaggaccctgttttgttttcgggttccctccgaatgaacctggacccattcagccagtactcggatgaagaagtctggacgtccctggagctggcccacctgaaggacttcgtgtcagcccttcctgacaagctagaccatgaatgtgcagaaggcggggagaacctcagtgtcgggcagcgccagcttgtgtgcctagcccgggccctgctgaggaagacgaagatccttgtgttggatgaggccacggcagccgtggacctggaaacggacgacctcatccagtccaccatccggacacagttcgaggactgcaccgtcctcaccatcgcccaccggctcaacaccatcatggactacacaagggtgatcgtcttggacaaaggagaaatccaggagtacggcgccccatcggacctcctgcagcagagaggtcttttctacagcatggccaaagacgccggcttggtgtgagccccagagctggcatatctggtcagaactgcagggcctatatgccagcgcccagggaggagtcagtacccctggtaaaccaagcctcccacactgaaaccaaaacataaaaaccaaacccagacaaccaaaacatattcaaagcagcagccaccgccatccggtcccctgcctggaactggctgtgaagacccaggagagacagagatgcgaaccacccaaaacacgcacaccctgcccctggtgccctgagacagacacacagcctcacgcccccaggaatgcaagtggtttcctggtgcttcccacggaggagttttggcagccagacttctggaggaattggttgtatagaagatcctagtgaccaaattcagcctactgcctcggatctctccagccgaagtctgtggactgcaagtctttgagatgcttctggctcccatcacctctaacatccttgtctgggtctaccaggaacgcttcatttccttggggctgcagttttgtggttgaggggcctggagaaaatcattttctccccttggcagtgtcccagggccctggatggtcctcttaccaacatctggtcttccaggcactcaaaagctgggaaccagcatctcagcgccagctctaccagttctcgttttgggccagaggcagcctctgcactcccacgcctgtcctcctggaagggacctggttggactaacggctaacctggacctggaactgtagggccaggggattgtctcagggccgacgttccacctggggcttccctccccacccaccccgactccaggctttcccttttttcttttgttcaacattgtaagaacaatcaatgctgttattactgttcccaccatgattgatgtggggtaaatattaaggagatggcctcatgggaatttgaccttgactagaaatagagactgagagtgagcaaccagctggaaggtactatgccagtcctagcagaaaaatgtgttaggggcctggcccaaagcagtgttggttgcttacagtgttgattgattttgttcttttttcttaccacctcttttctttccctctcatggtacctgctcatggttatgaagctttcaaagtaaagaacacgaaatacctcccaagtattaccagtgggtaccaaaaaaatgtccccttgagtcttttccttgtttttagatgttaattctctcccttggcatccggttagccccccagggggggcagcattgtggagaacttgatatttagttactgatgctcttccaggacacgaaaagaacccatctttgaatatcaatgattttttttttttaagtactgttccggggagaaaaacagtctcaaaacttgaacttcttgggaatagaagtgttgggctgagaagtaacattcccaggaaatagtgagaagctcgccctgtgtttgaaaccgtgttggtctctgtgttcctggaagaaaacagggaagcagcatcttttaaagcctgttctttaaggtgtctcgttagagcccaaagtggaatccggaaggcagccagagctgaggctgccccaagactcagacttgctaagaattacgccgccgacttcaaacccagagagcatctttcttttaggcgaaaacgcatatatttattttttgtaagttataccattctttcacattagataaactaagttttgggggatccttttgtaatgacttacactggaaatgcgaacatttgcagtaaaaaaatatatatatatctatatattttatttctttctaaa

SEQ ID NO: 151754 - DNA, 6594 bp, Artificial Sequence
  derived and/or modified sequence
ccaggcggcgttgcggccccggccccggctccctgcgccgccgccgccgccgccgccagcgctagcgccagcagccgggcccgatcacccgccgcccggtgcccgccgccgcccgcgccagcaaccgggcccgatcacccgccgcccggtgcccgccgccgcccgcgccaccggcatggcgctccggggcttctgcagcgccgatggctccgacccgctctgggactggaatgtcacgtggaataccagcaaccccgacttcaccaagtgctttcagaacacggtcctcgtgtgggtgccttgtttttacctctgggcctgtttccccttctacttcctctatctctcccgacatgaccgaggctacattcagatgacacctctcaacaaaaccaaaactgccttgggatttttgctgtggatcgtctgctgggcagacctcttctactctttctgggaaagaagtcggggcatattcctggccccagtgtttctggtcagcccaactctcttgggcatcaccatgctgcttgctacctttttaattcagctggagaggaggaagggagttcagtcttcagggatcatgctcactttctggctggtagccctagtgtgtgccctagccatcctgagatccaaaattatgacagccttaaaagaggatgcccaggtggacctgtttcgtgacatcactttctacgtctacttttccctcttactcattcagctcgtcttgtcctgtttctcagatcgctcacccctgttctcggaaaccatccacgaccctaatccctgcccagagtccagcgcttccttcctgtcgaggatcaccttctggtggatcacagggttgattgtccggggctaccgccagcccctggagggcagtgacctctggtccttaaacaaggaggacacgtcggaacaagtcgtgcctgttttggtaaagaactggaagaaggaatgcgccaagactaggaagcagccggtgaaggttgtgtactcctccaaggatcctgcccagccgaaagagagttccaaggtggatgcgaatgaggaggtggaggctttgatcgtcaagtccccacagaaggagtggaacccctctctgtttaaggtgttatacaagacctttgggccctacttcctcatgagcttcttcttcaaggccatccacgacctgatgatgttttccgggccgcagatcttaaagttgctcatcaagttcgtgaatgacacgaaggccccagactggcagggctacttctacaccgtgctgctgtttgtcactgcctgcctgcagaccctcgtgctgcaccagtacttccacatctgcttcgtcagtggcatgaggatcaagaccgctgtcattggggctgtctatcggaaggccctggtgatcaccaattcagccagaaaatcctccacggtcggggagattgtcaacctcatgtctgtggacgctcagaggttcatggacttggccacgtacattaacatgatctggtcagcccccctgcaagtcatccttgctctctacctcctgtggctgaatctgggcccttccgtcctggctggagtggcggtgatggtcctcatggtgcccgtcaatgctgtgatggcgatgaagaccaagacgtatcaggtggcccacatgaagagcaaagacaatcggatcaagctgatgaacgaaattctcaatgggatcaaagtgctaaagctttatgcctgggagctggcattcaaggacaaggtgctggccatcaggcaggaggagctgaaggtgctgaagaagtctgcctacctgtcagccgtgggcaccttcacctgggtctgcacgccctttctggtggccttgtgcacatttgccgtctacgtgaccattgacgagaacaacatcctggatgcccagacagccttcgtgtctttggccttgttcaacatcctccggtttcccctgaacattctccccatggtcatcagcagcatcgtgcaggcgagtgtctccctcaaacgcctgaggatctttctctcccatgaggagctggaacctgacagcatcgagcgacggcctgtcaaagacggcgggggcacgaacagcatcaccgtgaggaatgccacattcacctgggccaggagcgaccctcccacactgaatggcatcaccttctccatccccgaaggtgctttggtggccgtggtgggccaggtgggctgcggaaagtcgtccctgctctcagccctcttggctgagatggacaaagtggaggggcacgtggctatcaagggctccgtggcctatgtgccacagcaggcctggattcagaatgattctctccgagaaaacatcctttttggatgtcagctggaggaaccatattacaggtccgtgatacaggcctgtgccctcctcccagacctggaaatcctgcccagtggggatcggacagagattggcgagaagggcgtgaacctgtctgggggccagaagcagcgcgtgagcctggcccgggccgtgtactccaacgctgacatttacctcttcgatgatcccctctcagcagtggatgcccatgtgggaaaacacatctttgaaaatgtgattggccccaaggggatgctgaagaacaagacgcggatcttggtcacgcacagcatgagctacttgccgcaggtggacgtcatcatcgtcatgagtggcggcaagatctctgagatgggctcctaccaggagctgctggctcgagacggcgccttcgctgagttcctgcgtacctatgccagcacagagcaggagcaggatgcagaggagaacggcagcacagtgatggacgaggaggaagcaggggtcacgggcgtcagcggtccagggaaggaagcaaagcaaatggagaatggcatgctggtgacggacagtgcagggaagcaactgcagagacagctcagcagctcctcctcctatagtggggacatcagcaggcaccacaacagcaccgcagaactgcagaaagctgaggccaagaaggaggagacctggaagctgatggaggctgacaaggcgcagacagggcaggtcaagctttccgtgtactgggactacatgaaggccatcggactcttcatctccttcctcagcatcttccttttcatgtgtaaccatgtgtccgcgctggcttccaactattggctcagcctctggactgatgaccccatcgtcaacgggactcaggagcacacgaaagtccggctgagcgtctatggagccctgggcatttcacaagggatcgccgtgtttggctactccatggccgtgtccatcggggggatcttggcttcccgctgtctgcacgtggacctgctgcacagcatcctgcggtcacccatgagcttctttgagcggacccccagtgggaacctggtgaaccgcttctccaaggagctggacacagtggactccatgatcccggaggtcatcaagatgttcatgggctccctgttcaacgtcattggtgcctgcatcgttatcctgctggccacgcccatcgccgccatcatcatcccgccccttggcctcatctacttcttcgtccagaggttctacgtggcttcctcccggcagctgaagcgcctcgagtcggtcagccgctccccggtctattcccatttcaacgagaccttgctgggggtcagcgtcattcgagccttcgaggagcaggagcgcttcatccaccagagtgacctgaaggtggacgagaaccagaaggcctattaccccagcatcgtggccaacaggtggctggccgtgcggctggagtgtgtgggcaactgcatcgttctgtttgctgccctgtttgcggtgatctccaggcacagcctcagtgctggcttggtgggcctctcagtgtcttactcattgcaggtcaccacgtacttgaactggctggttcggatgtcatctgaaatggaaaccaacatcgtggccgtggagaggctcaaggagtattcagagactgagaaggaggcgccctggcaaatccaggagacagctccgcccagcagctggccccaggtgggccgagtggaattccggaactactgcctgcgctaccgagaggacctggacttcgttctcaggcacatcaatgtcacgatcaatgggggagaaaaggtcggcatcgtggggcggacgggagctgggaagtcgtccctgaccctgggcttatttcggatcaacgagtctgccgaaggagagatcatcatcgatggcatcaacatcgccaagatcggcctgcacgacctccgcttcaagatcaccatcatcccccaggaccctgttttgttttcgggttccctccgaatgaacctggacccattcagccagtactcggatgaagaagtctggacgtccctggagctggcccacctgaaggacttcgtgtcagcccttcctgacaagctagaccatgaatgtgcagaaggcggggagaacctcagtgtcgggcagcgccagcttgtgtgcctagcccgggccctgctgaggaagacgaagatccttgtgttggatgaggccacggcagccgtggacctggaaacggacgacctcatccagtccaccatccggacacagttcgaggactgcaccgtcctcaccatcgcccaccggctcaacaccatcatggactacacaagggtgatcgtcttggacaaaggagaaatccaggagtacggcgccccatcggacctcctgcagcagagaggtcttttctacagcatggccaaagacgccggcttggtgtgagccccagagctggcatatctggtcagaactgcagggcctatatgccagcgcccagggaggagtcagtacccctggtaaaccaagcctcccacactgaaaccaaaacataaaaaccaaacccagacaaccaaaacatattcaaagcagcagccaccgccatccggtcccctgcctggaactggctgtgaagacccaggagagacagagatgcgaaccacccaaaacacgcacaccctgcccctggtgccctgagacagacacacagcctcacgcccccaggaatgcaagtggtttcctggtgcttcccacggaggagttttggcagccagacttctggaggaattggttgtatagaagatcctagtgaccaaattcagcctactgcctcggatctctccagccgaagtctgtggactgcaagtctttgagatgcttctggctcccatcacctctaacatccttgtctgggtctaccaggaacgcttcatttccttggggctgcagttttgtggttgaggggcctggagaaaatcattttctccccttggcagtgtcccagggccctggatggtcctcttaccaacatctggtcttccaggcactcaaaagctgggaaccagcatctcagcgccagctctaccagttctcgttttgggccagaggcagcctctgcactcccacgcctgtcctcctggaagggacctggttggactaacggctaacctggacctggaactgtagggccaggggattgtctcagggccgacgttccacctggggcttccctccccacccaccccgactccaggctttcccttttttcttttgttcaacattgtaagaacaatcaatgctgttattactgttcccaccatgattgatgtggggtaaatattaaggagatggcctcatgggaatttgaccttgactagaaatagagactgagagtgagcaaccagctggaaggtactatgccagtcctagcagaaaaatgtgttaggggcctggcccaaagcagtgttggttgcttacagtgttgattgattttgttcttttttcttaccacctcttttctttccctctcatggtacctgctcatggttatgaagctttcaaagtaaagaacacgaaatacctcccaagtattaccagtgggtaccaaaaaaatgtccccttgagtcttttccttgtttttagatgttaattctctcccttggcatccggttagccccccagggggggcagcattgtggagaacttgatatttagttactgatgctcttccaggacacgaaaagaacccatctttgaatatcaatgattttttttttttaagtactgttccggggagaaaaacagtctcaaaacttgaacttcttgggaatagaagtgttgggctgagaagtaacattcccaggaaatagtgagaagctcgccctgtgtttgaaaccgtgttggtctctgtgttcctggaagaaaacagggaagcagcatcttttaaagcctgttctttaaggtgtctcgttagagcccaaagtggaatccggaaggcagccagagctgaggctgccccaagactcagacttgctaagaattacgccgccgacttcaaacccagagagcatctttcttttaggcgaaaacgcatatatttattttttgtaagttataccattctttcacattagataaactaagttttgggggatccttttgtaatgacttacactggaaatgcgaacatttgcagtaaaaaaatatatatatatctatatattttatttctttctaaa

SEQ ID NO: 151755 - DNA, 6552 bp, Artificial Sequence
  derived and/or modified sequence
ccaggcggcgttgcggccccggccccggctccctgcgccgccgccgccgccgccgccagcgctagcgccagcagccgggcccgatcacccgccgcccggtgcccgccgccgcccgcgccagcaaccgggcccgatcacccgccgcccggtgcccgccgccgcccgcgccaccggcatggcgctccggggcttctgcagcgccgatggctccgacccgctctgggactggaatgtcacgtggaataccagcaaccccgacttcaccaagtgctttcagaacacggtcctcgtgtgggtgccttgtttttacctctgggcctgtttccccttctacttcctctatctctcccgacatgaccgaggctacattcagatgacacctctcaacaaaaccaaaactgccttgggatttttgctgtggatcgtctgctgggcagacctcttctactctttctgggaaagaagtcggggcatattcctggccccagtgtttctggtcagcccaactctcttgggcatcaccatgctgcttgctacctttttaattcagctggagaggaggaagggagttcagtcttcagggatcatgctcactttctggctggtagccctagtgtgtgccctagccatcctgagatccaaaattatgacagccttaaaagaggatgcccaggtggacctgtttcgtgacatcactttctacgtctacttttccctcttactcattcagctcgtcttgtcctgtttctcagatcgctcacccctgttctcggaaaccatccacgaccctaatccctgcccagagtccagcgcttccttcctgtcgaggatcaccttctggtggatcacagggttgattgtccggggctaccgccagcccctggagggcagtgacctctggtccttaaacaaggaggacacgtcggaacaagtcgtgcctgttttggtaaagaactggaagaaggaatgcgccaagactaggaagcagccggtgaaggttgtgtactcctccaaggatcctgcccagccgaaagagagttccaaggtggatgcgaatgaggaggtggaggctttgatcgtcaagtccccacagaaggagtggaacccctctctgtttaaggtgttatacaagacctttgggccctacttcctcatgagcttcttcttcaaggccatccacgacctgatgatgttttccgggccgcagatcttaaagttgctcatcaagttcgtgaatgacacgaaggccccagactggcagggctacttctacaccgtgctgctgtttgtcactgcctgcctgcagaccctcgtgctgcaccagtacttccacatctgcttcgtcagtggcatgaggatcaagaccgctgtcattggggctgtctatcggaaggccctggtgatcaccaattcagccagaaaatcctccacggtcggggagattgtcaacctcatgtctgtggacgctcagaggttcatggacttggccacgtacattaacatgatctggtcagcccccctgcaagtcatccttgctctctacctcctgtggctgaatctgggcccttccgtcctggctggagtggcggtgatggtcctcatggtgcccgtcaatgctgtgatggcgatgaagaccaagacgtatcaggtggcccacatgaagagcaaagacaatcggatcaagctgatgaacgaaattctcaatgggatcaaagtgctaaagctttatgcctgggagctggcattcaaggacaaggtgctggccatcaggcaggaggagctgaaggtgctgaagaagtctgcctacctgtcagccgtgggcaccttcacctgggtctgcacgccctttctggtggccttgtgcacatttgccgtctacgtgaccattgacgagaacaacatcctggatgcccagacagccttcgtgtctttggccttgttcaacatcctccggtttcccctgaacattctccccatggtcatcagcagcatcgtgcaggcgagtgtctccctcaaacgcctgaggatctttctctcccatgaggagctggaacctgacagcatcgagcgacggcctgtcaaagacggcgggggcacgaacagcatcaccgtgaggaatgccacattcacctgggccaggagcgaccctcccacactgaatggcatcaccttctccatccccgaaggtgctttggtggccgtggtgggccaggtgggctgcggaaagtcgtccctgctctcagccctcttggctgagatggacaaagtggaggggcacgtggctatcaagggctccgtggcctatgtgccacagcaggcctggattcagaatgattctctccgagaaaacatcctttttggatgtcagctggaggaaccatattacaggtccgtgatacaggcctgtgccctcctcccagacctggaaatcctgcccagtggggatcggacagagattggcgagaagggcgtgaacctgtctgggggccagaagcagcgcgtgagcctggcccgggccgtgtactccaacgctgacatttacctcttcgatgatcccctctcagcagtggatgcccatgtgggaaaacacatctttgaaaatgtgattggccccaaggggatgctgaagaacaagacgcggatcttggtcacgcacagcatgagctacttgccgcaggtggacgtcatcatcgtcatgagtggcggcaagatctctgagatgggctcctaccaggagctgctggctcgagacggcgccttcgctgagttcctgcgtacctatgccagcacagagcaggagcaggatgcagaggagaacggggtcacgggcgtcagcggtccagggaaggaagcaaagcaaatggagaatggcatgctggtgacggacagtgcagggaagcaactgcagagacagctcagcagctcctcctcctatagtggggacatcagcaggcaccacaacagcaccgcagaactgcagaaagctgaggccaagaaggaggagacctggaagctgatggaggctgacaaggcgcagacagggcaggtcaagctttccgtgtactgggactacatgaaggccatcggactcttcatctccttcctcagcatcttccttttcatgtgtaaccatgtgtccgcgctggcttccaactattggctcagcctctggactgatgaccccatcgtcaacgggactcaggagcacacgaaagtccggctgagcgtctatggagccctgggcatttcacaagggatcgccgtgtttggctactccatggccgtgtccatcggggggatcttggcttcccgctgtctgcacgtggacctgctgcacagcatcctgcggtcacccatgagcttctttgagcggacccccagtgggaacctggtgaaccgcttctccaaggagctggacacagtggactccatgatcccggaggtcatcaagatgttcatgggctccctgttcaacgtcattggtgcctgcatcgttatcctgctggccacgcccatcgccgccatcatcatcccgccccttggcctcatctacttcttcgtccagaggttctacgtggcttcctcccggcagctgaagcgcctcgagtcggtcagccgctccccggtctattcccatttcaacgagaccttgctgggggtcagcgtcattcgagccttcgaggagcaggagcgcttcatccaccagagtgacctgaaggtggacgagaaccagaaggcctattaccccagcatcgtggccaacaggtggctggccgtgcggctggagtgtgtgggcaactgcatcgttctgtttgctgccctgtttgcggtgatctccaggcacagcctcagtgctggcttggtgggcctctcagtgtcttactcattgcaggtcaccacgtacttgaactggctggttcggatgtcatctgaaatggaaaccaacatcgtggccgtggagaggctcaaggagtattcagagactgagaaggaggcgccctggcaaatccaggagacagctccgcccagcagctggccccaggtgggccgagtggaattccggaactactgcctgcgctaccgagaggacctggacttcgttctcaggcacatcaatgtcacgatcaatgggggagaaaaggtcggcatcgtggggcggacgggagctgggaagtcgtccctgaccctgggcttatttcggatcaacgagtctgccgaaggagagatcatcatcgatggcatcaacatcgccaagatcggcctgcacgacctccgcttcaagatcaccatcatcccccaggaccctgttttgttttcgggttccctccgaatgaacctggacccattcagccagtactcggatgaagaagtctggacgtccctggagctggcccacctgaaggacttcgtgtcagcccttcctgacaagctagaccatgaatgtgcagaaggcggggagaacctcagtgtcgggcagcgccagcttgtgtgcctagcccgggccctgctgaggaagacgaagatccttgtgttggatgaggccacggcagccgtggacctggaaacggacgacctcatccagtccaccatccggacacagttcgaggactgcaccgtcctcaccatcgcccaccggctcaacaccatcatggactacacaagggtgatcgtcttggacaaaggagaaatccaggagtacggcgccccatcggacctcctgcagcagagaggtcttttctacagcatggccaaagacgccggcttggtgtgagccccagagctggcatatctggtcagaactgcagggcctatatgccagcgcccagggaggagtcagtacccctggtaaaccaagcctcccacactgaaaccaaaacataaaaaccaaacccagacaaccaaaacatattcaaagcagcagccaccgccatccggtcccctgcctggaactggctgtgaagacccaggagagacagagatgcgaaccacccaaaacacgcacaccctgcccctggtgccctgagacagacacacagcctcacgcccccaggaatgcaagtggtttcctggtgcttcccacggaggagttttggcagccagacttctggaggaattggttgtatagaagatcctagtgaccaaattcagcctactgcctcggatctctccagccgaagtctgtggactgcaagtctttgagatgcttctggctcccatcacctctaacatccttgtctgggtctaccaggaacgcttcatttccttggggctgcagttttgtggttgaggggcctggagaaaatcattttctccccttggcagtgtcccagggccctggatggtcctcttaccaacatctggtcttccaggcactcaaaagctgggaaccagcatctcagcgccagctctaccagttctcgttttgggccagaggcagcctctgcactcccacgcctgtcctcctggaagggacctggttggactaacggctaacctggacctggaactgtagggccaggggattgtctcagggccgacgttccacctggggcttccctccccacccaccccgactccaggctttcccttttttcttttgttcaacattgtaagaacaatcaatgctgttattactgttcccaccatgattgatgtggggtaaatattaaggagatggcctcatgggaatttgaccttgactagaaatagagactgagagtgagcaaccagctggaaggtactatgccagtcctagcagaaaaatgtgttaggggcctggcccaaagcagtgttggttgcttacagtgttgattgattttgttcttttttcttaccacctcttttctttccctctcatggtacctgctcatggttatgaagctttcaaagtaaagaacacgaaatacctcccaagtattaccagtgggtaccaaaaaaatgtccccttgagtcttttccttgtttttagatgttaattctctcccttggcatccggttagccccccagggggggcagcattgtggagaacttgatatttagttactgatgctcttccaggacacgaaaagaacccatctttgaatatcaatgattttttttttttaagtactgttccggggagaaaaacagtctcaaaacttgaacttcttgggaatagaagtgttgggctgagaagtaacattcccaggaaatagtgagaagctcgccctgtgtttgaaaccgtgttggtctctgtgttcctggaagaaaacagggaagcagcatcttttaaagcctgttctttaaggtgtctcgttagagcccaaagtggaatccggaaggcagccagagctgaggctgccccaagactcagacttgctaagaattacgccgccgacttcaaacccagagagcatctttcttttaggcgaaaacgcatatatttattttttgtaagttataccattctttcacattagataaactaagttttgggggatccttttgtaatgacttacactggaaatgcgaacatttgcagtaaaaaaatatatatatatctatatatttta

SEQ ID NO: 151756 - DNA, 5869 bp, Artificial Sequence
  derived and/or modified sequence
tgctttcagaacacggtcctcgtgtgggtgccttgtttttacctctgggcctgtttccccttctacttcctctatctctcccgacatgaccgaggctacattcagatgacacctctcaacaaaaccaaaactgccttgggatttttgctgtggatcgtctgctgggcagtgacctctggtccttaaacaaggaggacacgtcggaacaagtcgtgcctgttttggtaaagaactggaagaaggaatgcgccaagactaggaagcagccggtgaaggttgtgtactcctccaaggatcctgcccagccgaaagagagttccaaggtggatgcgaatgaggaggtggaggctttgatcgtcaagtccccacagaaggagtggaacccctctctgtttaaggtgttatacaagacctttgggccctacttcctcatgagcttcttcttcaaggccatccacgacctgatgatgttttccgggccgcagatcttaaagttgctcatcaagttcgtgaatgacacgaaggccccagactggcagggctacttctacaccgtgctgctgtttgtcactgcctgcctgcagaccctcgtgctgcaccagtacttccacatctgcttcgtcagtggcatgaggatcaagaccgctgtcattggggctgtctatcggaaggccctggtgatcaccaattcagccagaaaatcctccacggtcggggagattgtcaacctcatgtctgtggacgctcagaggttcatggacttggccacgtacattaacatgatctggtcagcccccctgcaagtcatccttgctctctacctcctgtggctgaatctgggcccttccgtcctggctggagtggcggtgatggtcctcatggtgcccgtcaatgctgtgatggcgatgaagaccaagacgtatcaggtggcccacatgaagagcaaagacaatcggatcaagctgatgaacgaaattctcaatgggatcaaagtgctaaagctttatgcctgggagctggcattcaaggacaaggtgctggccatcaggcaggaggagctgaaggtgctgaagaagtctgcctacctgtcagccgtgggcaccttcacctgggtctgcacgccctttctggtggccttgtgcacatttgccgtctacgtgaccattgacgagaacaacatcctggatgcccagacagccttcgtgtctttggccttgttcaacatcctccggtttcccctgaacattctccccatggtcatcagcagcatcgtgcaggcgagtgtctccctcaaacgcctgaggatctttctctcccatgaggagctggaacctgacagcatcgagcgacggcctgtcaaagacggcgggggcacgaacagcatcaccgtgaggaatgccacattcacctgggccaggagcgaccctcccacactgaatggcatcaccttctccatccccgaaggtgctttggtggccgtggtgggccaggtgggctgcggaaagtcgtccctgctctcagccctcttggctgagatggacaaagtggaggggcacgtggctatcaagggctccgtggcctatgtgccacagcaggcctggattcagaatgattctctccgagaaaacatcctttttggatgtcagctggaggaaccatattacaggtccgtgatacaggcctgtgccctcctcccagacctggaaatcctgcccagtggggatcggacagagattggcgagaagggcgtgaacctgtctgggggccagaagcagcgcgtgagcctggcccgggccgtgtactccaacgctgacatttacctcttcgatgatcccctctcagcagtggatgcccatgtgggaaaacacatctttgaaaatgtgattggccccaaggggatgctgaagaacaagacgcggatcttggtcacgcacagcatgagctacttgccgcaggtggacgtcatcatcgtcatgagtggcggcaagatctctgagatgggctcctaccaggagctgctggctcgagacggcgccttcgctgagttcctgcgtacctatgccagcacagagcaggagcaggatgcagaggagaacggcagcacagtgatggacgaggaggaagcaggggtcacgggcgtcagcggtccagggaaggaagcaaagcaaatggagaatggcatgctggtgacggacagtgcagggaagcaactgcagagacagctcagcagctcctcctcctatagtggggacatcagcaggcaccacaacagcaccgcagaactgcagaaagctgaggccaagaaggaggagacctggaagctgatggaggctgacaaggcgcagacagggcaggtcaagctttccgtgtactgggactacatgaaggccatcggactcttcatctccttcctcagcatcttccttttcatgtgtaaccatgtgtccgcgctggcttccaactattggctcagcctctggactgatgaccccatcgtcaacgggactcaggagcacacgaaagtccggctgagcgtctatggagccctgggcatttcacaagggatcgccgtgtttggctactccatggccgtgtccatcggggggatcttggcttcccgctgtctgcacgtggacctgctgcacagcatcctgcggtcacccatgagcttctttgagcggacccccagtgggaacctggtgaaccgcttctccaaggagctggacacagtggactccatgatcccggaggtcatcaagatgttcatgggctccctgttcaacgtcattggtgcctgcatcgttatcctgctggccacgcccatcgccgccatcatcatcccgccccttggcctcatctacttcttcgtccagaggttctacgtggcttcctcccggcagctgaagcgcctcgagtcggtcagccgctccccggtctattcccatttcaacgagaccttgctgggggtcagcgtcattcgagccttcgaggagcaggagcgcttcatccaccagagtgacctgaaggtggacgagaaccagaaggcctattaccccagcatcgtggccaacaggtggctggccgtgcggctggagtgtgtgggcaactgcatcgttctgtttgctgccctgtttgcggtgatctccaggcacagcctcagtgctggcttggtgggcctctcagtgtcttactcattgcaggtcaccacgtacttgaactggctggttcggatgtcatctgaaatggaaaccaacatcgtggccgtggagaggctcaaggagtattcagagactgagaaggaggcgccctggcaaatccaggagacagctccgcccagcagctggccccaggtgggccgagtggaattccggaactactgcctgcgctaccgagaggacctggacttcgttctcaggcacatcaatgtcacgatcaatgggggagaaaaggtcggcatcgtggggcggacgggagctgggaagtcgtccctgaccctgggcttatttcggatcaacgagtctgccgaaggagagatcatcatcgatggcatcaacatcgccaagatcggcctgcacgacctccgcttcaagatcaccatcatcccccaggaccctgttttgttttcgggttccctccgaatgaacctggacccattcagccagtactcggatgaagaagtctggacgtccctggagctggcccacctgaaggacttcgtgtcagcccttcctgacaagctagaccatgaatgtgcagaaggcggggagaacctcagtgtcgggcagcgccagcttgtgtgcctagcccgggccctgctgaggaagacgaagatccttgtgttggatgaggccacggcagccgtggacctggaaacggacgacctcatccagtccaccatccggacacagttcgaggactgcaccgtcctcaccatcgcccaccggctcaacaccatcatggactacacaagggtgatcgtcttggacaaaggagaaatccaggagtacggcgccccatcggacctcctgcagcagagaggtcttttctacagcatggccaaagacgccggcttggtgtgagccccagagctggcatatctggtcagaactgcagggcctatatgccagcgcccagggaggagtcagtacccctggtaaaccaagcctcccacactgaaaccaaaacataaaaaccaaacccagacaaccaaaacatattcaaagcagcagccaccgccatccggtcccctgcctggaactggctgtgaagacccaggagagacagagatgcgaaccacccaaaacacgcacaccctgcccctggtgccctgagacagacacacagcctcacgcccccaggaatgcaagtggtttcctggtgcttcccacggaggagttttggcagccagacttctggaggaattggttgtatagaagatcctagtgaccaaattcagcctactgcctcggatctctccagccgaagtctgtggactgcaagtctttgagatgcttctggctcccatcacctctaacatccttgtctgggtctaccaggaacgcttcatttccttggggctgcagttttgtggttgaggggcctggagaaaatcattttctccccttggcagtgtcccagggccctggatggtcctcttaccaacatctggtcttccaggcactcaaaagctgggaaccagcatctcagcgccagctctaccagttctcgttttgggccagaggcagcctctgcactcccacgcctgtcctcctggaagggacctggttggactaacggctaacctggacctggaactgtagggccaggggattgtctcagggccgacgttccacctggggcttccctccccacccaccccgactccaggctttcccttttttcttttgttcaacattgtaagaacaatcaatgctgttattactgttcccaccatgattgatgtggggtaaatattaaggagatggcctcatgggaatttgaccttgactagaaatagagactgagagtgagcaaccagctggaaggtactatgccagtcctagcagaaaaatgtgttaggggcctggcccaaagcagtgttggttgcttacagtgttgattgattttgttcttttttcttaccacctcttttctttccctctcatggtacctgctcatggttatgaagctttcaaagtaaagaacacgaaatacctcccaagtattaccagtgggtaccaaaaaaatgtccccttgagtcttttccttgtttttagatgttaattctctcccttggcatccggttagccccccagggggggcagcattgtggagaacttgatatttagttactgatgctcttccaggacacgaaaagaacccatctttgaatatcaatgattttttttttttaagtactgttccggggagaaaaacagtctcaaaacttgaacttcttgggaatagaagtgttgggctgagaagtaacattcccaggaaatagtgagaagctcgccctgtgtttgaaaccgtgttggtctctgtgttcctggaagaaaacagggaagcagcatcttttaaagcctgttctttaaggtgtctcgttagagcccaaagtggaatccggaaggcagccagagctgaggctgccccaagactcagacttgctaagaattacgccgccgacttcaaacccagagagcatctttcttttaggcgaaaacgcatatatttattttttgtaagttataccattctttcacattagataaactaagttttgggggatccttttgtaatgacttacactggaaatgcgaacatttgcagtaaaaaaatatatatatatctatatattttatttctttct

SEQ ID NO: 151757 - DNA, 4401 bp, Artificial Sequence
  derived and/or modified sequence
atggccctgagaggcttctgcagcgccgacggcagcgaccccctgtgggactggaacgtgacctggaacaccagcaaccccgacttcaccaagtgcttccagaacaccgtgctggtgtgggtgccctgcttctacctgtgggcctgcttccccttctacttcctgtacctgagcagacacgacagaggctacatccagatgacccccctgaacaagaccaagaccgccctgggcttcctgctgtggatcgtgtgctgggccgacctgttctacagcttctgggagagaagcagaggcatcttcctggcccccgtgttcctggtgagccccaccctgctgggcatcaccatgctgctggccaccttcctgatccagctggagagaagaaagggcgtgcagagcagcggcatcatgctgaccttctggctggtggccctggtgtgcgccctggccatcctgagaagcaagatcatgaccgccctgaaggaggacgcccaggtggacctgttcagagacatcaccttctacgtgtacttcagcctgctgctgatccagctggtgctgagctgcttcagcgacagaagccccctgttcagcgagaccatccacgaccccaacccctgccccgagagcagcgccagcttcctgagcagaatcaccttctggtggatcaccggcctgatcgtgagaggctacagacagcccctggagggcagcgacctgtggagcctgaacaaggaggacaccagcgagcaggtggtgcccgtgctggtgaagaactggaagaaggagtgcgccaagaccagaaagcagcccgtgaaggtggtgtacagcagcaaggaccccgcccagcccaaggagagcagcaaggtggacgccaacgaggaggtggaggccctgatcgtgaagagcccccagaaggagtggaaccccagcctgttcaaggtgctgtacaagaccttcggcccctacttcctgatgagcttcttcttcaaggccatccacgacctgatgatgttcagcggcccccagatcctgaagctgctgatcaagttcgtgaacgacaccaaggcccccgactggcagggctacttctacaccgtgctgctgttcgtgaccgcctgcctgcagaccctggtgctgcaccagtacttccacatctgcttcgtgagcggcatgagaatcaagaccgccgtgatcggcgccgtgtacagaaaggccctggtgatcaccaacagcgccagaaagagcagcaccgtgggcgagatcgtgaacctgatgagcgtggacgcccagagattcatggacctggccacctacatcaacatgatctggagcgcccccctgcaggtgatcctggccctgtacctgctgtggctgaacctgggccccagcgtgctggccggcgtggccgtgatggtgctgatggtgcccgtgaacgccgtgatggccatgaagaccaagacctaccaggtggcccacatgaagagcaaggacaacagaatcaagctgatgaacgagatcctgaacggcatcaaggtgctgaagctgtacgcctgggagctggccttcaaggacaaggtgctggccatcagacaggaggagctgaaggtgctgaagaagagcgcctacctgagcgccgtgggcaccttcacctgggtgtgcacccccttcctggtggccctgtgcaccttcgccgtgtacgtgaccatcgacgagaacaacatcctggacgcccagaccgccttcgtgagcctggccctgttcaacatcctgagattccccctgaacatcctgcccatggtgatcagcagcatcgtgcaggccagcgtgagcctgaagagactgagaatcttcctgagccacgaggagctggagcccgacagcatcgagagaagacccgtgaaggacggcggcggcaccaacagcatcaccgtgagaaacgccaccttcacctgggccagaagcgacccccccaccctgaacggcatcaccttcagcatccccgagggcgccctggtggccgtggtgggccaggtgggctgcggcaagagcagcctgctgagcgccctgctggccgagatggacaaggtggagggccacgtggccatcaagggcagcgtggcctacgtgccccagcaggcctggatccagaacgacagcctgagagagaacatcctgttcggctgccagctggaggagccctactacagaagcgtgatccaggcctgcgccctgctgcccgacctggagatcctgcccagcggcgacagaaccgagatcggcgagaagggcgtgaacctgagcggcggccagaagcagagagtgagcctggccagagccgtgtacagcaacgccgacatctacctgttcgacgaccccctgagcgccgtggacgcccacgtgggcaagcacatcttcgagaacgtgatcggccccaagggcatgctgaagaacaagaccagaatcctggtgacccacagcatgagctacctgccccaggtggacgtgatcatcgtgatgagcggcggcaagatcagcgagatgggcagctaccaggagctgctggccagagacggcgccttcgccgagttcctgagaacctacgccagcaccgagcaggagcaggacgccgaggagaacggcgtgaccggcgtgagcggccccggcaaggaggccaagcagatggagaacggcatgctggtgaccgacagcgccggcaagcagctgcagagacagctgagcagcagcagcagctacagcggcgacatcagcagacaccacaacagcaccgccgagctgcagaaggccgaggccaagaaggaggagacctggaagctgatggaggccgacaaggcccagaccggccaggtgaagctgagcgtgtactgggactacatgaaggccatcggcctgttcatcagcttcctgagcatcttcctgttcatgtgcaaccacgtgagcgccctggccagcaactactggctgagcctgtggaccgacgaccccatcgtgaacggcacccaggagcacaccaaggtgagactgagcgtgtacggcgccctgggcatcagccagggcatcgccgtgttcggctacagcatggccgtgagcatcggcggcatcctggccagcagatgcctgcacgtggacctgctgcacagcatcctgagaagccccatgagcttcttcgagagaacccccagcggcaacctggtgaacagattcagcaaggagctggacaccgtggacagcatgatccccgaggtgatcaagatgttcatgggcagcctgttcaacgtgatcggcgcctgcatcgtgatcctgctggccacccccatcgccgccatcatcatcccccccctgggcctgatctacttcttcgtgcagagattctacgtggccagcagcagacagctgaagagactggagagcgtgagcagaagccccgtgtacagccacttcaacgagaccctgctgggcgtgagcgtgatcagagccttcgaggagcaggagagattcatccaccagagcgacctgaaggtggacgagaaccagaaggcctactaccccagcatcgtggccaacagatggctggccgtgagactggagtgcgtgggcaactgcatcgtgctgttcgccgccctgttcgccgtgatcagcagacacagcctgagcgccggcctggtgggcctgagcgtgagctacagcctgcaggtgaccacctacctgaactggctggtgagaatgagcagcgagatggagaccaacatcgtggccgtggagagactgaaggagtacagcgagaccgagaaggaggccccctggcagatccaggagaccgccccccccagcagctggccccaggtgggcagagtggagttcagaaactactgcctgagatacagagaggacctggacttcgtgctgagacacatcaacgtgaccatcaacggcggcgagaaggtgggcatcgtgggcagaaccggcgccggcaagagcagcctgaccctgggcctgttcagaatcaacgagagcgccgagggcgagatcatcatcgacggcatcaacatcgccaagatcggcctgcacgacctgagattcaagatcaccatcatcccccaggaccccgtgctgttcagcggcagcctgagaatgaacctggaccccttcagccagtacagcgacgaggaggtgtggaccagcctggagctggcccacctgaaggacttcgtgagcgccctgcccgacaagctggaccacgagtgcgccgagggcggcgagaacctgagagtgatcgtgctggacaagggcgagatccaggagtacggcgcccccagcgacctgctgcagcagagaggcctgttctacagcatggccaaggacgccggcctggtgtag

SEQ ID NO: 151758 - DNA, 4428 bp, Artificial Sequence
  derived and/or modified sequence
atggccctgagaggcttctgcagcgccgacggcagcgaccccctgtgggactggaacgtgacctggaacaccagcaaccccgacttcaccaagtgcttccagaacaccgtgctggtgtgggtgccctgcttctacctgtgggcctgcttccccttctacttcctgtacctgagcagacacgacagaggctacatccagatgacccccctgaacaagaccaagaccgccctgggcttcctgctgtggatcgtgtgctgggccgacctgttctacagcttctgggagagaagcagaggcatcttcctggcccccgtgttcctggtgagccccaccctgctgggcatcaccatgctgctggccaccttcctgatccagctggagagaagaaagggcgtgcagagcagcggcatcatgctgaccttctggctggtggccctggtgtgcgccctggccatcctgagaagcaagatcatgaccgccctgaaggaggacgcccaggtggacctgttcagagacatcaccttctacgtgtacttcagcctgctgctgatccagctggtgctgagctgcttcagcgacagaagccccctgttcagcgagaccatccacgaccccaacccctgccccgagagcagcgccagcttcctgagcagaatcaccttctggtggatcaccggcctgatcgtgagaggctacagacagcccctggagggcagcgacctgtggagcctgaacaaggaggacaccagcgagcaggtggtgcccgtgctggtgaagaactggaagaaggagtgcgccaagaccagaaagcagcccgtgaaggtggtgtacagcagcaaggaccccgcccagcccaaggagagcagcaaggtggacgccaacgaggaggtggaggccctgatcgtgaagagcccccagaaggagtggaaccccagcctgttcaaggtgctgtacaagaccttcggcccctacttcctgatgagcttcttcttcaaggccatccacgacctgatgatgttcagcggcccccagatcctgaagctgctgatcaagttcgtgaacgacaccaaggcccccgactggcagggctacttctacaccgtgctgctgttcgtgaccgcctgcctgcagaccctggtgctgcaccagtacttccacatctgcttcgtgagcggcatgagaatcaagaccgccgtgatcggcgccgtgtacagaaaggccctggtgatcaccaacagcgccagaaagagcagcaccgtgggcgagatcgtgaacctgatgagcgtggacgcccagagattcatggacctggccacctacatcaacatgatctggagcgcccccctgcaggtgatcctggccctgtacctgctgtggctgaacctgggccccagcgtgctggccggcgtggccgtgatggtgctgatggtgcccgtgaacgccgtgatggccatgaagaccaagacctaccaggtggcccacatgaagagcaaggacaacagaatcaagctgatgaacgagatcctgaacggcatcaaggtgctgaagctgtacgcctgggagctggccttcaaggacaaggtgctggccatcagacaggaggagctgaaggtgctgaagaagagcgcctacctgagcgccgtgggcaccttcacctgggtgtgcacccccttcctggtggccctgtgcaccttcgccgtgtacgtgaccatcgacgagaacaacatcctggacgcccagaccgccttcgtgagcctggccctgttcaacatcctgagattccccctgaacatcctgcccatggtgatcagcagcatcgtgcaggccagcgtgagcctgaagagactgagaatcttcctgagccacgaggagctggagcccgacagcatcgagagaagacccgtgaaggacggcggcggcaccaacagcatcaccgtgagaaacgccaccttcacctgggccagaagcgacccccccaccctgaacggcatcaccttcagcatccccgagggcgccctggtggccgtggtgggccaggtgggctgcggcaagagcagcctgctgagcgccctgctggccgagatggacaaggtggagggccacgtggccatcaagggcagcgtggcctacgtgccccagcaggcctggatccagaacgacagcctgagagagaacatcctgttcggctgccagctggaggagccctactacagaagcgtgatccaggcctgcgccctgctgcccgacctggagatcctgcccagcggcgacagaaccgagatcggcgagaagaccagaatcctggtgacccacagcatgagctacctgccccaggtggacgtgatcatcgtgatgagcggcggcaagatcagcgagatgggcagctaccaggagctgctggccagagacggcgccttcgccgagttcctgagaacctacgccagcaccgagcaggagcaggacgccgaggagaacggcgtgaccggcgtgagcggccccggcaaggaggccaagcagatggagaacggcatgctggtgaccgacagcgccggcaagcagctgcagagacagctgagcagcagcagcagctacagcggcgacatcagcagacaccacaacagcaccgccgagctgcagaaggccgaggccaagaaggaggagacctggaagctgatggaggccgacaaggcccagaccggccaggtgaagctgagcgtgtactgggactacatgaaggccatcggcctgttcatcagcttcctgagcatcttcctgttcatgtgcaaccacgtgagcgccctggccagcaactactggctgagcctgtggaccgacgaccccatcgtgaacggcacccaggagcacaccaaggtgagactgagcgtgtacggcgccctgggcatcagccagggcatcgccgtgttcggctacagcatggccgtgagcatcggcggcatcctggccagcagatgcctgcacgtggacctgctgcacagcatcctgagaagccccatgagcttcttcgagagaacccccagcggcaacctggtgaacagattcagcaaggagctggacaccgtggacagcatgatccccgaggtgatcaagatgttcatgggcagcctgttcaacgtgatcggcgcctgcatcgtgatcctgctggccacccccatcgccgccatcatcatcccccccctgggcctgatctacttcttcgtgcagagattctacgtggccagcagcagacagctgaagagactggagagcgtgagcagaagccccgtgtacagccacttcaacgagaccctgctgggcgtgagcgtgatcagagccttcgaggagcaggagagattcatccaccagagcgacctgaaggtggacgagaaccagaaggcctactaccccagcatcgtggccaacagatggctggccgtgagactggagtgcgtgggcaactgcatcgtgctgttcgccgccctgttcgccgtgatcagcagacacagcctgagcgccggcctggtgggcctgagcgtgagctacagcctgcaggtgaccacctacctgaactggctggtgagaatgagcagcgagatggagaccaacatcgtggccgtggagagactgaaggagtacagcgagaccgagaaggaggccccctggcagatccaggagaccgccccccccagcagctggccccaggtgggcagagtggagttcagaaactactgcctgagatacagagaggacctggacttcgtgctgagacacatcaacgtgaccatcaacggcggcgagaaggtgggcatcgtgggcagaaccggcgccggcaagagcagcctgaccctgggcctgttcagaatcaacgagagcgccgagggcgagatcatcatcgacggcatcaacatcgccaagatcggcctgcacgacctgagattcaagatcaccatcatcccccaggaccccgtgctgttcagcggcagcctgagaatgaacctggaccccttcagccagtacagcgacgaggaggtgtggaccagcctggagctggcccacctgaaggacttcgtgagcgccctgcccgacaagctggaccacgagtgcgccgagggcggcgagaacctgagcgtgggccagagacagctggtgtgcctggccagagccctgctgagaaagaccaagatcctggtgctggacgaggccaccgccgccgtggacctggagaccgacgacctgatccagagcaccatcagaacccagttcgaggactgcaccgtgctgaccatcgcccacagactgaacaccatcatggactacaccagagtgatcgtgctggacaagggcgagatccaggagtacggcgcccccagcgacctgctgcagcagagaggcctgttctacagcatggccaaggacgccggcctggtgtag

SEQ ID NO: 151759 - DNA, 4251 bp, Artificial Sequence
  derived and/or modified sequence
atggccctgagaggcttctgcagcgccgacggcagcgaccccctgtgggactggaacgtgacctggaacaccagcaaccccgacttcaccaagtgcttccagaacaccgtgctggtgtgggtgccctgcttctacctgtgggcctgcttccccttctacttcctgtacctgagcagacacgacagaggctacatccagatgacccccctgaacaagaccaagaccgccctgggcttcctgctgtggatcgtgtgctgggccgacctgttctacagcttctgggagagaagcagaggcatcttcctggcccccgtgttcctggtgagccccaccctgctgggcatcaccatgctgctggccaccttcctgatccagctggagagaagaaagggcgtgcagagcagcggcatcatgctgaccttctggctggtggccctggtgtgcgccctggccatcctgagaagcaagatcatgaccgccctgaaggaggacgcccaggtggacctgttcagagacatcaccttctacgtgtacttcagcctgctgctgatccagctggtgctgagctgcttcagcgacagaagccccctgttcagcgagaccatccacgaccccaacccctgccccgagagcagcgccagcttcctgagcagaatcaccttctggtggatcaccggcctgatcgtgagaggctacagacagcccctggagggcagcgacctgtggagcctgaacaaggaggacaccagcgagcaggtggtgcccgtgctggtgaagaactggaagaaggagtgcgccaagaccagaaagcagcccgtgaaggtggtgtacagcagcaaggaccccgcccagcccaaggagagcagcaaggtggacgccaacgaggaggtggaggccctgatcgtgaagagcccccagaaggagtggaaccccagcctgttcaaggtgctgtacaagaccttcggcccctacttcctgatgagcttcttcttcaaggccatccacgacctgatgatgttcagcggcccccagatcctgaagctgctgatcaagttcgtgaacgacaccaaggcccccgactggcagggctacttctacaccgtgctgctgttcgtgaccgcctgcctgcagaccctggtgctgcaccagtacttccacatctgcttcgtgagcggcatgagaatcaagaccgccgtgatcggcgccgtgtacagaaaggccctggtgatcaccaacagcgccagaaagagcagcaccgtgggcgagatcgtgaacctgatgagcgtggacgcccagagattcatggacctggccacctacatcaacatgatctggagcgcccccctgcaggtgatcctggccctgtacctgctgtggctgaacctgggccccagcgtgctggccggcgtggccgtgatggtgctgatggtgcccgtgaacgccgtgatggccatgaagaccaagacctaccaggtggcccacatgaagagcaaggacaacagaatcaagctgatgaacgagatcctgaacggcatcaaggtgctgaagctgtacgcctgggagctggccttcaaggacaaggtgctggccatcagacaggaggagctgaaggtgctgaagaagagcgcctacctgagcgccgtgggcaccttcacctgggtgtgcacccccttcctggtggccctgtgcaccttcgccgtgtacgtgaccatcgacgagaacaacatcctggacgcccagaccgccttcgtgagcctggccctgttcaacatcctgagattccccctgaacatcctgcccatggtgatcagcagcatcgtgcaggccagcgtgagcctgaagagactgagaatcttcctgagccacgaggagctggagcccgacagcatcgagagaagacccgtgaaggacggcggcggcaccaacagcatcaccgtgagaaacgccaccttcacctgggccagaagcgacccccccaccctgaacggcatcaccttcagcatccccgagggcgccctggtggccgtggtgggccaggtgggctgcggcaagagcagcctgctgagcgccctgctggccgagatggacaaggtggagggccacgtggccatcaagaccagaatcctggtgacccacagcatgagctacctgccccaggtggacgtgatcatcgtgatgagcggcggcaagatcagcgagatgggcagctaccaggagctgctggccagagacggcgccttcgccgagttcctgagaacctacgccagcaccgagcaggagcaggacgccgaggagaacggcgtgaccggcgtgagcggccccggcaaggaggccaagcagatggagaacggcatgctggtgaccgacagcgccggcaagcagctgcagagacagctgagcagcagcagcagctacagcggcgacatcagcagacaccacaacagcaccgccgagctgcagaaggccgaggccaagaaggaggagacctggaagctgatggaggccgacaaggcccagaccggccaggtgaagctgagcgtgtactgggactacatgaaggccatcggcctgttcatcagcttcctgagcatcttcctgttcatgtgcaaccacgtgagcgccctggccagcaactactggctgagcctgtggaccgacgaccccatcgtgaacggcacccaggagcacaccaaggtgagactgagcgtgtacggcgccctgggcatcagccagggcatcgccgtgttcggctacagcatggccgtgagcatcggcggcatcctggccagcagatgcctgcacgtggacctgctgcacagcatcctgagaagccccatgagcttcttcgagagaacccccagcggcaacctggtgaacagattcagcaaggagctggacaccgtggacagcatgatccccgaggtgatcaagatgttcatgggcagcctgttcaacgtgatcggcgcctgcatcgtgatcctgctggccacccccatcgccgccatcatcatcccccccctgggcctgatctacttcttcgtgcagagattctacgtggccagcagcagacagctgaagagactggagagcgtgagcagaagccccgtgtacagccacttcaacgagaccctgctgggcgtgagcgtgatcagagccttcgaggagcaggagagattcatccaccagagcgacctgaaggtggacgagaaccagaaggcctactaccccagcatcgtggccaacagatggctggccgtgagactggagtgcgtgggcaactgcatcgtgctgttcgccgccctgttcgccgtgatcagcagacacagcctgagcgccggcctggtgggcctgagcgtgagctacagcctgcaggtgaccacctacctgaactggctggtgagaatgagcagcgagatggagaccaacatcgtggccgtggagagactgaaggagtacagcgagaccgagaaggaggccccctggcagatccaggagaccgccccccccagcagctggccccaggtgggcagagtggagttcagaaactactgcctgagatacagagaggacctggacttcgtgctgagacacatcaacgtgaccatcaacggcggcgagaaggtgggcatcgtgggcagaaccggcgccggcaagagcagcctgaccctgggcctgttcagaatcaacgagagcgccgagggcgagatcatcatcgacggcatcaacatcgccaagatcggcctgcacgacctgagattcaagatcaccatcatcccccaggaccccgtgctgttcagcggcagcctgagaatgaacctggaccccttcagccagtacagcgacgaggaggtgtggaccagcctggagctggcccacctgaaggacttcgtgagcgccctgcccgacaagctggaccacgagtgcgccgagggcggcgagaacctgagcgtgggccagagacagctggtgtgcctggccagagccctgctgagaaagaccaagatcctggtgctggacgaggccaccgccgccgtggacctggagaccgacgacctgatccagagcaccatcagaacccagttcgaggactgcaccgtgctgaccatcgcccacagactgaacaccatcatggactacaccagagtgatcgtgctggacaagggcgagatccaggagtacggcgcccccagcgacctgctgcagcagagaggcctgttctacagcatggccaaggacgccggcctggtgtag

SEQ ID NO: 151760 - DNA, 4419 bp, Artificial Sequence
  derived and/or modified sequence
atggccctgagaggcttctgcagcgccgacggcagcgaccccctgtgggactggaacgtgacctggaacaccagcaaccccgacttcaccaagtgcttccagaacaccgtgctggtgtgggtgccctgcttctacctgtgggcctgcttccccttctacttcctgtacctgagcagacacgacagaggctacatccagatgacccccctgaacaagaccaagaccgccctgggcttcctgctgtggatcgtgtgctgggccgacctgttctacagcttctgggagagaagcagaggcatcttcctggcccccgtgttcctggtgagccccaccctgctgggcatcaccatgctgctggccaccttcctgatccagctggagagaagaaagggcgtgcagagcagcggcatcatgctgaccttctggctggtggccctggtgtgcgccctggccatcctgagaagcaagatcatgaccgccctgaaggaggacgcccaggtggacctgttcagagacatcaccttctacgtgtacttcagcctgctgctgatccagctggtgctgagctgcttcagcgacagaagccccctgttcagcgagaccatccacgaccccaacccctgccccgagagcagcgccagcttcctgagcagaatcaccttctggtggatcaccggcctgatcgtgagaggctacagacagcccctggagggcagcgacctgtggagcctgaacaaggaggacaccagcgagcaggtggtgcccgtgctggtgaagaactggaagaaggagtgcgccaagaccagaaagcagcccgtgaaggtggtgtacagcagcaaggaccccgcccagcccaaggagagcagcaaggtggacgccaacgaggaggtggaggccctgatcgtgaagagcccccagaaggagtggaaccccagcctgttcaaggtgctgtacaagaccttcggcccctacttcctgatgagcttcttcttcaaggccatccacgacctgatgatgttcagcggcccccagatcctgaagctgctgatcaagttcgtgaacgacaccaaggcccccgactggcagggctacttctacaccgtgctgctgttcgtgaccgcctgcctgcagaccctggtgctgcaccagtacttccacatctgcttcgtgagcggcatgagaatcaagaccgccgtgatcggcgccgtgtacagaaaggccctggtgatcaccaacagcgccagaaagagcagcaccgtgggcgagatcgtgaacctgatgagcgtggacgcccagagattcatggacctggccacctacatcaacatgatctggagcgcccccctgcaggtgatcctggccctgtacctgctgtggctgaacctgggccccagcgtgctggccggcgtggccgtgatggtgctgatggtgcccgtgaacgccgtgatggccatgaagaccaagacctaccaggtggcccacatgaagagcaaggacaacagaatcaagctgatgaacgagatcctgaacggcatcaaggtgctgaagctgtacgcctgggagctggccttcaaggacaaggtgctggccatcagacaggaggagctgaaggtgctgaagaagagcgcctacctgagcgccgtgggcaccttcacctgggtgtgcacccccttcctggtggccctgtgcaccttcgccgtgtacgtgaccatcgacgagaacaacatcctggacgcccagaccgccttcgtgagcctggccctgttcaacatcctgagattccccctgaacatcctgcccatggtgatcagcagcatcgtgcaggccagcgtgagcctgaagagactgagaatcttcctgagccacgaggagctggagcccgacagcatcgagagaagacccgtgaaggacggcggcggcaccaacagcatcaccgtgagaaacgccaccttcacctgggccagaagcgacccccccaccctgaacggcatcaccttcagcatccccgagggcgccctggtggccgtggtgggccaggtgggctgcggcaagagcagcctgctgagcgccctgctggccgagatggacaaggtggagggccacgtggccatcaagggcgtgaacctgagcggcggccagaagcagagagtgagcctggccagagccgtgtacagcaacgccgacatctacctgttcgacgaccccctgagcgccgtggacgcccacgtgggcaagcacatcttcgagaacgtgatcggccccaagggcatgctgaagaacaagaccagaatcctggtgacccacagcatgagctacctgccccaggtggacgtgatcatcgtgatgagcggcggcaagatcagcgagatgggcagctaccaggagctgctggccagagacggcgccttcgccgagttcctgagaacctacgccagcaccgagcaggagcaggacgccgaggagaacggcgtgaccggcgtgagcggccccggcaaggaggccaagcagatggagaacggcatgctggtgaccgacagcgccggcaagcagctgcagagacagctgagcagcagcagcagctacagcggcgacatcagcagacaccacaacagcaccgccgagctgcagaaggccgaggccaagaaggaggagacctggaagctgatggaggccgacaaggcccagaccggccaggtgaagctgagcgtgtactgggactacatgaaggccatcggcctgttcatcagcttcctgagcatcttcctgttcatgtgcaaccacgtgagcgccctggccagcaactactggctgagcctgtggaccgacgaccccatcgtgaacggcacccaggagcacaccaaggtgagactgagcgtgtacggcgccctgggcatcagccagggcatcgccgtgttcggctacagcatggccgtgagcatcggcggcatcctggccagcagatgcctgcacgtggacctgctgcacagcatcctgagaagccccatgagcttcttcgagagaacccccagcggcaacctggtgaacagattcagcaaggagctggacaccgtggacagcatgatccccgaggtgatcaagatgttcatgggcagcctgttcaacgtgatcggcgcctgcatcgtgatcctgctggccacccccatcgccgccatcatcatcccccccctgggcctgatctacttcttcgtgcagagattctacgtggccagcagcagacagctgaagagactggagagcgtgagcagaagccccgtgtacagccacttcaacgagaccctgctgggcgtgagcgtgatcagagccttcgaggagcaggagagattcatccaccagagcgacctgaaggtggacgagaaccagaaggcctactaccccagcatcgtggccaacagatggctggccgtgagactggagtgcgtgggcaactgcatcgtgctgttcgccgccctgttcgccgtgatcagcagacacagcctgagcgccggcctggtgggcctgagcgtgagctacagcctgcaggtgaccacctacctgaactggctggtgagaatgagcagcgagatggagaccaacatcgtggccgtggagagactgaaggagtacagcgagaccgagaaggaggccccctggcagatccaggagaccgccccccccagcagctggccccaggtgggcagagtggagttcagaaactactgcctgagatacagagaggacctggacttcgtgctgagacacatcaacgtgaccatcaacggcggcgagaaggtgggcatcgtgggcagaaccggcgccggcaagagcagcctgaccctgggcctgttcagaatcaacgagagcgccgagggcgagatcatcatcgacggcatcaacatcgccaagatcggcctgcacgacctgagattcaagatcaccatcatcccccaggaccccgtgctgttcagcggcagcctgagaatgaacctggaccccttcagccagtacagcgacgaggaggtgtggaccagcctggagctggcccacctgaaggacttcgtgagcgccctgcccgacaagctggaccacgagtgcgccgagggcggcgagaacctgagcgtgggccagagacagctggtgtgcctggccagagccctgctgagaaagaccaagatcctggtgctggacgaggccaccgccgccgtggacctggagaccgacgacctgatccagagcaccatcagaacccagttcgaggactgcaccgtgctgaccatcgcccacagactgaacaccatcatggactacaccagagtgatcgtgctggacaagggcgagatccaggagtacggcgcccccagcgacctgctgcagcagagaggcctgttctacagcatggccaaggacgccggcctggtgtag

SEQ ID NO: 151761 - DNA, 4626 bp, Artificial Sequence
  derived and/or modified sequence
atggccctgagaggcttctgcagcgccgacggcagcgaccccctgtgggactggaacgtgacctggaacaccagcaaccccgacttcaccaagtgcttccagaacaccgtgctggtgtgggtgccctgcttctacctgtgggcctgcttccccttctacttcctgtacctgagcagacacgacagaggctacatccagatgacccccctgaacaagaccaagaccgccctgggcttcctgctgtggatcgtgtgctgggccgacctgttctacagcttctgggagagaagcagaggcatcttcctggcccccgtgttcctggtgagccccaccctgctgggcatcaccatgctgctggccaccttcctgatccagctggagagaagaaagggcgtgcagagcagcggcatcatgctgaccttctggctggtggccctggtgtgcgccctggccatcctgagaagcaagatcatgaccgccctgaaggaggacgcccaggtggacctgttcagagacatcaccttctacgtgtacttcagcctgctgctgatccagctggtgctgagctgcttcagcgacagaagccccctgttcagcgagaccatccacgaccccaacccctgccccgagagcagcgccagcttcctgagcagaatcaccttctggtggatcaccggcctgatcgtgagaggctacagacagcccctggagggcagcgacctgtggagcctgaacaaggaggacaccagcgagcaggtggtgcccgtgctggtgaagaactggaagaaggagtgcgccaagaccagaaagcagcccgtgaaggtggtgtacagcagcaaggaccccgcccagcccaaggagagcagcaaggtggacgccaacgaggaggtggaggccctgatcgtgaagagcccccagaaggagtggaaccccagcctgttcaaggtgctgtacaagaccttcggcccctacttcctgatgagcttcttcttcaaggccatccacgacctgatgatgttcagcggcccccagatcctgaagctgctgatcaagttcgtgaacgacaccaaggcccccgactggcagggctacttctacaccgtgctgctgttcgtgaccgcctgcctgcagaccctggtgctgcaccagtacttccacatctgcttcgtgagcggcatgagaatcaagaccgccgtgatcggcgccgtgtacagaaaggccctggtgatcaccaacagcgccagaaagagcagcaccgtgggcgagatcgtgaacctgatgagcgtggacgcccagagattcatggacctggccacctacatcaacatgatctggagcgcccccctgcaggtgatcctggccctgtacctgctgtggctgaacctgggccccagcgtgctggccggcgtggccgtgatggtgctgatggtgcccgtgaacgccgtgatggccatgaagaccaagacctaccaggtggcccacatgaagagcaaggacaacagaatcaagctgatgaacgagatcctgaacggcatcaaggtgctgaagctgtacgcctgggagctggccttcaaggacaaggtgctggccatcagacaggaggagctgaaggtgctgaagaagagcgcctacctgagcgccgtgggcaccttcacctgggtgtgcacccccttcctggtggccctgtgcaccttcgccgtgtacgtgaccatcgacgagaacaacatcctggacgcccagaccgccttcgtgagcctggccctgttcaacatcctgagattccccctgaacatcctgcccatggtgatcagcagcatcgtgcaggccagcgtgagcctgaagagactgagaatcttcctgagccacgaggagctggagcccgacagcatcgagagaagacccgtgaaggacggcggcggcaccaacagcatcaccgtgagaaacgccaccttcacctgggccagaagcgacccccccaccctgaacggcatcaccttcagcatccccgagggcgccctggtggccgtggtgggccaggtgggctgcggcaagagcagcctgctgagcgccctgctggccgagatggacaaggtggagggccacgtggccatcaagggcagcgtggcctacgtgccccagcaggcctggatccagaacgacagcctgagagagaacatcctgttcggctgccagctggaggagccctactacagaagcgtgatccaggcctgcgccctgctgcccgacctggagatcctgcccagcggcgacagaaccgagatcggcgagaagggcgtgaacctgagcggcggccagaagcagagagtgagcctggccagagccgtgtacagcaacgccgacatctacctgttcgacgaccccctgagcgccgtggacgcccacgtgggcaagcacatcttcgagaacgtgatcggccccaagggcatgctgaagaacaagaccagaatcctggtgacccacagcatgagctacctgccccaggtggacgtgatcatcgtgatgagcggcggcaagatcagcgagatgggcagctaccaggagctgctggccagagacggcgccttcgccgagttcctgagaacctacgccagcaccgagcaggagcaggacgccgaggagaacggcagcaccgtgatggacgaggaggaggccggcgtgaccggcgtgagcggccccggcaaggaggccaagcagatggagaacggcatgctggtgaccgacagcgccggcaagcagctgcagagacagctgagcagcagcagcagctacagcggcgacatcagcagacaccacaacagcaccgccgagctgcagaaggccgaggccaagaaggaggagacctggaagctgatggaggccgacaaggcccagaccggccaggtgaagctgagcgtgtactgggactacatgaaggccatcggcctgttcatcagcttcctgagcatcttcctgttcatgtgcaaccacgtgagcgccctggccagcaactactggctgagcctgtggaccgacgaccccatcgtgaacggcacccaggagcacaccaaggtgagactgagcgtgtacggcgccctgggcatcagccagggcatcgccgtgttcggctacagcatggccgtgagcatcggcggcatcctggccagcagatgcctgcacgtggacctgctgcacagcatcctgagaagccccatgagcttcttcgagagaacccccagcggcaacctggtgaacagattcagcaaggagctggacaccgtggacagcatgatccccgaggtgatcaagatgttcatgggcagcctgttcaacgtgatcggcgcctgcatcgtgatcctgctggccacccccatcgccgccatcatcatcccccccctgggcctgatctacttcttcgtgcagagattctacgtggccagcagcagacagctgaagagactggagagcgtgagcagaagccccgtgtacagccacttcaacgagaccctgctgggcgtgagcgtgatcagagccttcgaggagcaggagagattcatccaccagagcgacctgaaggtggacgagaaccagaaggcctactaccccagcatcgtggccaacagatggctggccgtgagactggagtgcgtgggcaactgcatcgtgctgttcgccgccctgttcgccgtgatcagcagacacagcctgagcgccggcctggtgggcctgagcgtgagctacagcctgcaggtgaccacctacctgaactggctggtgagaatgagcagcgagatggagaccaacatcgtggccgtggagagactgaaggagtacagcgagaccgagaaggaggccccctggcagatccaggagaccgccccccccagcagctggccccaggtgggcagagtggagttcagaaactactgcctgagatacagagaggacctggacttcgtgctgagacacatcaacgtgaccatcaacggcggcgagaaggtgggcatcgtgggcagaaccggcgccggcaagagcagcctgaccctgggcctgttcagaatcaacgagagcgccgagggcgagatcatcatcgacggcatcaacatcgccaagatcggcctgcacgacctgagattcaagatcaccatcatcccccaggaccccgtgctgttcagcggcagcctgagaatgaacctggaccccttcagccagtacagcgacgaggaggtgtggaccagcctggagctggcccacctgaaggacttcgtgagcgccctgcccgacaagctggaccacgagtgcgccgagggcggcgagaacctgagcgtgggccagagacagctggtgtgcctggccagagccctgctgagaaagaccaagatcctggtgctggacgaggccaccgccgccgtggacctggagaccgacgacctgatccagagcaccatcagaacccagttcgaggactgcaccgtgctgaccatcgcccacagactgaacaccatcatggactacaccagagtgatcgtgctggacaagggcgagatccaggagtacggcgcccccagcgacctgctgcagcagagaggcctgttctacagcatggccaaggacgccggcctggtgtag

SEQ ID NO: 151762 - DNA, 4596 bp, Artificial Sequence
  derived and/or modified sequence
atggccctgagaggcttctgcagcgccgacggcagcgaccccctgtgggactggaacgtgacctggaacaccagcaaccccgacttcaccaagtgcttccagaacaccgtgctggtgtgggtgccctgcttctacctgtgggcctgcttccccttctacttcctgtacctgagcagacacgacagaggctacatccagatgacccccctgaacaagaccaagaccgccctgggcttcctgctgtggatcgtgtgctgggccgacctgttctacagcttctgggagagaagcagaggcatcttcctggcccccgtgttcctggtgagccccaccctgctgggcatcaccatgctgctggccaccttcctgatccagctggagagaagaaagggcgtgcagagcagcggcatcatgctgaccttctggctggtggccctggtgtgcgccctggccatcctgagaagcaagatcatgaccgccctgaaggaggacgcccaggtggacctgttcagagacatcaccttctacgtgtacttcagcctgctgctgatccagctggtgctgagctgcttcagcgacagaagccccctgttcagcgagaccatccacgaccccaacccctgccccgagagcagcgccagcttcctgagcagaatcaccttctggtggatcaccggcctgatcgtgagaggctacagacagcccctggagggcagcgacctgtggagcctgaacaaggaggacaccagcgagcaggtggtgcccgtgctggtgaagaactggaagaaggagtgcgccaagaccagaaagcagcccgtgaaggtggtgtacagcagcaaggaccccgcccagcccaaggagagcagcaaggtggacgccaacgaggaggtggaggccctgatcgtgaagagcccccagaaggagtggaaccccagcctgttcaaggtgctgtacaagaccttcggcccctacttcctgatgagcttcttcttcaaggccatccacgacctgatgatgttcagcggcccccagatcctgaagctgctgatcaagttcgtgaacgacaccaaggcccccgactggcagggctacttctacaccgtgctgctgttcgtgaccgcctgcctgcagaccctggtgctgcaccagtacttccacatctgcttcgtgagcggcatgagaatcaagaccgccgtgatcggcgccgtgtacagaaaggccctggtgatcaccaacagcgccagaaagagcagcaccgtgggcgagatcgtgaacctgatgagcgtggacgcccagagattcatggacctggccacctacatcaacatgatctggagcgcccccctgcaggtgatcctggccctgtacctgctgtggctgaacctgggccccagcgtgctggccggcgtggccgtgatggtgctgatggtgcccgtgaacgccgtgatggccatgaagaccaagacctaccaggtggcccacatgaagagcaaggacaacagaatcaagctgatgaacgagatcctgaacggcatcaaggtgctgaagctgtacgcctgggagctggccttcaaggacaaggtgctggccatcagacaggaggagctgaaggtgctgaagaagagcgcctacctgagcgccgtgggcaccttcacctgggtgtgcacccccttcctggtggccctgtgcaccttcgccgtgtacgtgaccatcgacgagaacaacatcctggacgcccagaccgccttcgtgagcctggccctgttcaacatcctgagattccccctgaacatcctgcccatggtgatcagcagcatcgtgcaggccagcgtgagcctgaagagactgagaatcttcctgagccacgaggagctggagcccgacagcatcgagagaagacccgtgaaggacggcggcggcaccaacagcatcaccgtgagaaacgccaccttcacctgggccagaagcgacccccccaccctgaacggcatcaccttcagcatccccgagggcgccctggtggccgtggtgggccaggtgggctgcggcaagagcagcctgctgagcgccctgctggccgagatggacaaggtggagggccacgtggccatcaagggcagcgtggcctacgtgccccagcaggcctggatccagaacgacagcctgagagagaacatcctgttcggctgccagctggaggagccctactacagaagcgtgatccaggcctgcgccctgctgcccgacctggagatcctgcccagcggcgacagaaccgagatcggcgagaagggcgtgaacctgagcggcggccagaagcagagagtgagcctggccagagccgtgtacagcaacgccgacatctacctgttcgacgaccccctgagcgccgtggacgcccacgtgggcaagcacatcttcgagaacgtgatcggccccaagggcatgctgaagaacaagaccagaatcctggtgacccacagcatgagctacctgccccaggtggacgtgatcatcgtgatgagcggcggcaagatcagcgagatgggcagctaccaggagctgctggccagagacggcgccttcgccgagttcctgagaacctacgccagcaccgagcaggagcaggacgccgaggagaacggcgtgaccggcgtgagcggccccggcaaggaggccaagcagatggagaacggcatgctggtgaccgacagcgccggcaagcagctgcagagacagctgagcagcagcagcagctacagcggcgacatcagcagacaccacaacagcaccgccgagctgcagaaggccgaggccaagaaggaggagacctggaagctgatggaggccgacaaggcccagaccggccaggtgaagctgagcgtgtactgggactacatgaaggccatcggcctgttcatcagcttcctgagcatcttcctgttcatgtgcaaccacgtgagcgccctggccagcaactactggctgagcctgtggaccgacgaccccatcgtgaacggcacccaggagcacaccaaggtgagactgagcgtgtacggcgccctgggcatcagccagggcatcgccgtgttcggctacagcatggccgtgagcatcggcggcatcctggccagcagatgcctgcacgtggacctgctgcacagcatcctgagaagccccatgagcttcttcgagagaacccccagcggcaacctggtgaacagattcagcaaggagctggacaccgtggacagcatgatccccgaggtgatcaagatgttcatgggcagcctgttcaacgtgatcggcgcctgcatcgtgatcctgctggccacccccatcgccgccatcatcatcccccccctgggcctgatctacttcttcgtgcagagattctacgtggccagcagcagacagctgaagagactggagagcgtgagcagaagccccgtgtacagccacttcaacgagaccctgctgggcgtgagcgtgatcagagccttcgaggagcaggagagattcatccaccagagcgacctgaaggtggacgagaaccagaaggcctactaccccagcatcgtggccaacagatggctggccgtgagactggagtgcgtgggcaactgcatcgtgctgttcgccgccctgttcgccgtgatcagcagacacagcctgagcgccggcctggtgggcctgagcgtgagctacagcctgcaggtgaccacctacctgaactggctggtgagaatgagcagcgagatggagaccaacatcgtggccgtggagagactgaaggagtacagcgagaccgagaaggaggccccctggcagatccaggagaccgccccccccagcagctggccccaggtgggcagagtggagttcagaaactactgcctgagatacagagaggacctggacttcgtgctgagacacatcaacgtgaccatcaacggcggcgagaaggtgggcatcgtgggcagaaccggcgccggcaagagcagcctgaccctgggcctgttcagaatcaacgagagcgccgagggcgagatcatcatcgacggcatcaacatcgccaagatcggcctgcacgacctgagattcaagatcaccatcatcccccaggaccccgtgctgttcagcggcagcctgagaatgaacctggaccccttcagccagtacagcgacgaggaggtgtggaccagcctggagctggcccacctgaaggacttcgtgagcgccctgcccgacaagctggaccacgagtgcgccgagggcggcgagaacctgagcgtgggccagagacagctggtgtgcctggccagagccctgctgagaaagaccaagatcctggtgctggacgaggccaccgccgccgtggacctggagaccgacgacctgatccagagcaccatcagaacccagttcgaggactgcaccgtgctgaccatcgcccacagactgaacaccatcatggactacaccagagtgatcgtgctggacaagggcgagatccaggagtacggcgcccccagcgacctgctgcagcagagaggcctgttctacagcatggccaaggacgccggcctggtgtag

SEQ ID NO: 151763 - DNA, 3648 bp, Artificial Sequence
  derived and/or modified sequence
atgagcttcttcttcaaggccatccacgacctgatgatgttcagcggcccccagatcctgaagctgctgatcaagttcgtgaacgacaccaaggcccccgactggcagggctacttctacaccgtgctgctgttcgtgaccgcctgcctgcagaccctggtgctgcaccagtacttccacatctgcttcgtgagcggcatgagaatcaagaccgccgtgatcggcgccgtgtacagaaaggccctggtgatcaccaacagcgccagaaagagcagcaccgtgggcgagatcgtgaacctgatgagcgtggacgcccagagattcatggacctggccacctacatcaacatgatctggagcgcccccctgcaggtgatcctggccctgtacctgctgtggctgaacctgggccccagcgtgctggccggcgtggccgtgatggtgctgatggtgcccgtgaacgccgtgatggccatgaagaccaagacctaccaggtggcccacatgaagagcaaggacaacagaatcaagctgatgaacgagatcctgaacggcatcaaggtgctgaagctgtacgcctgggagctggccttcaaggacaaggtgctggccatcagacaggaggagctgaaggtgctgaagaagagcgcctacctgagcgccgtgggcaccttcacctgggtgtgcacccccttcctggtggccctgtgcaccttcgccgtgtacgtgaccatcgacgagaacaacatcctggacgcccagaccgccttcgtgagcctggccctgttcaacatcctgagattccccctgaacatcctgcccatggtgatcagcagcatcgtgcaggccagcgtgagcctgaagagactgagaatcttcctgagccacgaggagctggagcccgacagcatcgagagaagacccgtgaaggacggcggcggcaccaacagcatcaccgtgagaaacgccaccttcacctgggccagaagcgacccccccaccctgaacggcatcaccttcagcatccccgagggcgccctggtggccgtggtgggccaggtgggctgcggcaagagcagcctgctgagcgccctgctggccgagatggacaaggtggagggccacgtggccatcaagggcagcgtggcctacgtgccccagcaggcctggatccagaacgacagcctgagagagaacatcctgttcggctgccagctggaggagccctactacagaagcgtgatccaggcctgcgccctgctgcccgacctggagatcctgcccagcggcgacagaaccgagatcggcgagaagggcgtgaacctgagcggcggccagaagcagagagtgagcctggccagagccgtgtacagcaacgccgacatctacctgttcgacgaccccctgagcgccgtggacgcccacgtgggcaagcacatcttcgagaacgtgatcggccccaagggcatgctgaagaacaagaccagaatcctggtgacccacagcatgagctacctgccccaggtggacgtgatcatcgtgatgagcggcggcaagatcagcgagatgggcagctaccaggagctgctggccagagacggcgccttcgccgagttcctgagaacctacgccagcaccgagcaggagcaggacgccgaggagaacggcagcaccgtgatggacgaggaggaggccggcgtgaccggcgtgagcggccccggcaaggaggccaagcagatggagaacggcatgctggtgaccgacagcgccggcaagcagctgcagagacagctgagcagcagcagcagctacagcggcgacatcagcagacaccacaacagcaccgccgagctgcagaaggccgaggccaagaaggaggagacctggaagctgatggaggccgacaaggcccagaccggccaggtgaagctgagcgtgtactgggactacatgaaggccatcggcctgttcatcagcttcctgagcatcttcctgttcatgtgcaaccacgtgagcgccctggccagcaactactggctgagcctgtggaccgacgaccccatcgtgaacggcacccaggagcacaccaaggtgagactgagcgtgtacggcgccctgggcatcagccagggcatcgccgtgttcggctacagcatggccgtgagcatcggcggcatcctggccagcagatgcctgcacgtggacctgctgcacagcatcctgagaagccccatgagcttcttcgagagaacccccagcggcaacctggtgaacagattcagcaaggagctggacaccgtggacagcatgatccccgaggtgatcaagatgttcatgggcagcctgttcaacgtgatcggcgcctgcatcgtgatcctgctggccacccccatcgccgccatcatcatcccccccctgggcctgatctacttcttcgtgcagagattctacgtggccagcagcagacagctgaagagactggagagcgtgagcagaagccccgtgtacagccacttcaacgagaccctgctgggcgtgagcgtgatcagagccttcgaggagcaggagagattcatccaccagagcgacctgaaggtggacgagaaccagaaggcctactaccccagcatcgtggccaacagatggctggccgtgagactggagtgcgtgggcaactgcatcgtgctgttcgccgccctgttcgccgtgatcagcagacacagcctgagcgccggcctggtgggcctgagcgtgagctacagcctgcaggtgaccacctacctgaactggctggtgagaatgagcagcgagatggagaccaacatcgtggccgtggagagactgaaggagtacagcgagaccgagaaggaggccccctggcagatccaggagaccgccccccccagcagctggccccaggtgggcagagtggagttcagaaactactgcctgagatacagagaggacctggacttcgtgctgagacacatcaacgtgaccatcaacggcggcgagaaggtgggcatcgtgggcagaaccggcgccggcaagagcagcctgaccctgggcctgttcagaatcaacgagagcgccgagggcgagatcatcatcgacggcatcaacatcgccaagatcggcctgcacgacctgagattcaagatcaccatcatcccccaggaccccgtgctgttcagcggcagcctgagaatgaacctggaccccttcagccagtacagcgacgaggaggtgtggaccagcctggagctggcccacctgaaggacttcgtgagcgccctgcccgacaagctggaccacgagtgcgccgagggcggcgagaacctgagcgtgggccagagacagctggtgtgcctggccagagccctgctgagaaagaccaagatcctggtgctggacgaggccaccgccgccgtggacctggagaccgacgacctgatccagagcaccatcagaacccagttcgaggactgcaccgtgctgaccatcgcccacagactgaacaccatcatggactacaccagagtgatcgtgctggacaagggcgagatccaggagtacggcgcccccagcgacctgctgcagcagagaggcctgttctacagcatggccaaggacgccggcctggtgtag

SEQ ID NO: 151764 - DNA, 100 bp, Artificial Sequence
  derived and/or modified sequence
aacaaaattgaacaacatgcaaagaaacataaacgaagcaatgaaagtgtgcagatccactgaaatgaaagtgctgtccagagtgggagccagctcgaga

SEQ ID NO: 151765 - protein, 477 aa, Artificial Sequence
  derived and/or modified sequence
MMEKNTSEGPACSPEETASESAKVPTAEPPGEVAVSESTREEQVPKPQAPAPQAPTASTATKPAPPSEDVPSAPLLLTLDDVSSSSVTVSWEPPERLGRLGLQGYVLELCREGASEWVPVSARPMMVTQQTVRNLALGDKFLLRVSAVSSAGAGPPAMLDQPIHIRENIEAPKIRVPRHLRQTYIRQVGETVNLQIPFQGKPKPQATWTHNGHALDSQRVSMRTGDQDSILFIRSAQRSDSGRYELTVRVEDLEAKAVIDILVIEKPGPPSSIRLLDVWGCNAALQWTPPQDTGNTELLGYMVQKADKKTGQWFTVLERYHPTTCTISDLIIGNSYSFRVFSENLCGLSTSATVTKELAHIQKADIAAKPKGFIERDFSEAPSFTQPLADHTSTPGYSTQLFCSVRASPKPKIIWMKNKMEIQGNPKYRALSEQGVCTLEIRKPSPFDSGVYTCKAINVLGEASVDCRLEVKASAAH

SEQ ID NO: 151766 - DNA, 1434 bp, Artificial Sequence
  derived and/or modified sequence
atgatggaaaaaaacacctctgagggtcccgcttgctcgcctgaggaaactgcaagcgagtcggccaaggtgccgactgcagagcctccaggcgaggtcgccgtgtctgagagcacacgcgaggaacaggtaccaaagcctcaggcacccgcccctcaggctcccacagcatctactgcaactaaaccggctccaccatcagaggatgttccctcagccccacttctgctcaccctggatgacgtatccagttccagcgttacggtgagttgggagcctcctgagagactcgggcgcttgggacttcaggggtacgtattggagttatgtagagaaggggccagcgagtgggtccccgtttcagccagacccatgatggtgacgcagcagaccgtgcggaatctcgctctgggcgacaagtttctcctgcgagtgagtgctgtgtcttccgccggtgccggaccacctgccatgctggaccagcccattcatatccgcgagaatatcgaggcacctaaaatcagagtcccacgacaccttaggcaaacctacatccgccaggtcggggagaccgtaaatctgcagatacctttccaaggcaagccgaaaccacaggcgacctggacacacaatgggcacgctctcgacagccaacgagtgtcaatgcgtaccggagatcaggacagcattctgtttattcgcagcgcccagaggtccgactccggacgctatgaactgacagtgagggtggaagatttggaagctaaagccgtgatcgacatactggtgatcgaaaaacccggaccaccttcttccattcgcttgctagatgtctggggctgcaacgccgcattacagtggacccctccccaggacaccgggaataccgagctgcttggctatatggtacagaaagcggacaagaaaaccgggcaatggtttactgtgctggagaggtatcatccgactacgtgtactatttccgatctgatcattggcaactcgtattcctttcgggttttctcagagaatctgtgcggtctctcaacatccgctacagtgacgaaggaactggctcacattcaaaaggcagacatcgcagctaaacctaagggcttcatcgaacgggatttctcagaggcaccctcctttacccagcccttagccgatcacacctctacacctgggtactcaacccagctgttctgctcagtccgagcctccccaaaaccgaaaatcatctggatgaagaacaagatggagatccagggcaaccctaaatatcgggcattgtccgaacagggagtatgtacactagaaatccgtaagcctagccctttcgattccggcgtgtacacctgtaaggctataaacgtcttgggcgaagcgtccgtagattgtcggctggaggtgaaggcctccgctgcacattag

SEQ ID NO: 151767 - DNA, 1434 bp, Artificial Sequence
  derived and/or modified sequence
atgatggagaagaacaccagcgagggccctgcctgcagccctgaggagacagccagcgagagcgccaaggtgcccacagctgagcccccaggagaggtggccgtgtctgagagcacccgggaggagcaggtgcccaagccccaggccccagccccccaggcccccacagccagcacagccaccaagccagcccctccttctgaagatgtgcccagcgcccccctgctgctgaccctggatgatgtgagcagcagctctgtgacagtgtcctgggagcccccagagcggctgggccgcctgggcctgcagggctacgtgctggagctgtgccgggagggcgccagcgagtgggtgcctgtgtctgcccggcccatgatggtgacccagcagacagtgaggaacctggccctgggggacaagttcctgctgcgggtgtctgctgtgagcagcgctggagctggccccccagccatgctggaccagcccatccacatcagagaaaatattgaggcccccaagatccgggtgcccaggcacctgcggcagacctacatccggcaggtgggggagaccgtgaacctgcagatccccttccagggcaagcccaagccccaggccacctggacccacaatggacatgccctggacagccagagggtgtccatgaggactggagaccaggacagcatcctcttcatccgcagcgcccagaggagtgacagcggccgctatgagctgactgtgcgggtggaggacctggaggccaaggctgtgattgacatcctggtgattgagaagccaggcccccccagcagcatccggctgctggatgtgtggggctgcaatgctgccctgcagtggaccccaccccaggacaccggcaacacagagctgctgggctacatggtgcagaaggctgacaagaagacaggccagtggttcaccgtgctggagcgctaccaccccaccacctgcaccatcagtgacctgatcatcggcaacagctacagcttccgggtcttcagcgagaacctgtgtggcctgagcaccagcgccaccgtgaccaaggagctggcccacatccagaaggctgacattgctgccaagcccaagggcttcatcgagcgggacttcagcgaggcccccagcttcacccagcccctggccgaccacaccagcaccccaggctacagcacccagctgttctgcagcgtgcgggccagccccaagcccaagatcatctggatgaagaacaagatggagatccagggcaaccccaagtaccgggccctgtctgagcagggcgtgtgcaccctggagatcaggaagcccagcccctttgattctggagtgtacacctgcaaggccatcaacgtgctgggggaggcctctgtggactgccgcctggaggtgaaggccagcgctgcccactag

SEQ ID NO: 151768 - DNA, 1805 bp, Artificial Sequence
  derived and/or modified sequence
aggccccccaacggctgacccctgcacactccaccctggccccccagccagtccagcaatgatggaaaaaaacacctccgagggccctgcctgcagtccagaggagaccgcatctgaatctgccaaggtgcccacagcagagcctcccggagaagtggcagtatcagagtccaccagagaagagcaggtgcccaagccgcaggcccctgccccacaggcccctacagcctccacagccactaagcctgcacccccaagtgaagatgtccccagtgccccactgctgctgaccctggatgatgtgagcagcagctctgtgactgtgagctgggagcccccagagaggctggggaggctgggcctccagggctatgtgctggagctctgcagagagggagcctcggagtgggtgcctgtgagtgcccggcccatgatggtgacccagcagactgtgcggaacctggctctgggagacaagttcctcctgcgcgtgtctgcagtgagttctgcaggggctggcccgccggccatgctggaccagcccatccacatccgagagaacattgaggcccccaagatccgtgtcccccgccacctccgtcagacctacatccgccaggtgggagagacggtcaacctgcaaatccccttccaggggaagcctaagcctcaggccacatggacccacaacggccatgccctggacagccagcgggtgagcatgcgcaccggggaccaggactccatcctcttcattcgctcggcccagcgctccgactctggccgctacgagctcactgtgcgcgtggaagacctggaggccaaggcagtcattgacatcctggtgattgagaaacctggaccccccagcagcatcaggctcctggacgtctggggctgcaatgctgctcttcagtggacgccaccccaggacacaggcaacacagagctcctgggctacatggtgcagaaggcagacaaaaagacagggcaatggttcacagtgctggagcgctaccacccaaccacctgcaccatctctgacctcatcatcggcaactcgtactccttccgggtcttctcagaaaacctgtgtggactcagcacctcggccaccgtcaccaaggagctcgcccacatccagaaggcagatattgctgccaaacctaaagggtttattgagcgagacttctcagaagccccctcattcacccagcccctggctgaccacacctccacccctggctacagcacccagttgttctgcagtgtccgagcttcacccaagcccaagatcatctggatgaaaaacaagatggagatccagggcaaccccaaataccgcgccctctctgagcaaggcgtctgcaccctagagatccggaaacccagcccctttgattctggggtctacacctgcaaggccataaatgtgctgggggaggcatctgtggactgccggctggaggtcaaagcctcagccgcacactgaagtcacgggaggaggctgtgatgaggagccaggtgctgcaggcctgaggggccaggtccaccaggcctacagtcaaactccagagatgcccaagacccccgcttccatagcgacggctgatggaaccgcccctggtacctgctggcctcccttccccagaggctggtgtccagaactcaggaatgggcctggtaggccccaggccagactaactgggctcaaggggtgctggaaggcgcagagattggagtgccctgcggagttgcactctgggtgggaagcactcaaataaagatgcgtggtgttaacagtg

SEQ ID NO: 151769 - DNA, 1434 bp, Artificial Sequence
  derived and/or modified sequence
atgatggagaagaacaccagcgagggccccgcctgcagccccgaggagacagcttctgagagtgcgaaagtgcctacagctgaaccccccggagaagtggccgtgagcgagagcacaagggaggaacaagtacctaaaccccaggcccccgcgccccaggccccaacagccagcacagccaccaagccagcgcctcccagcgaggatgtgccctccgccccgctcctgctgacactcgacgatgtgtcatccagttctgtcactgttagttgggagccgcccgagcggctggggaggcttggtctgcaggggtacgtgcttgaactatgtcgtgagggcgcctccgaatgggtaccagtgtccgcccggccaatgatggttacacagcagacggtgcgtaatctagctctcggcgataaattccttctgcgggtctctgccgtgtcttctgccggagcaggaccgcctgccatgctggaccagcccatacacataagggaaaacatcgaagctcccaaaattcgcgtgccgcgacacttgcgccagacttacatccgccaggtgggggagaccgtaaacctccagattcctttccagggcaagcctaagccacaggcgacatggacccacaatggacacgcactcgacagccagcgagtgagtatgagaaccggagatcaggacagcatactttttatccggtcggcgcagagatcagatagcgggcgctacgagctgacggtgcgggtcgaagatctagaggctaaggccgtgattgatatcctggtcatcgaaaagcctgggcctccgtcttccattcgcctgctggatgtgtgggggtgtaatgccgccttgcagtggacccccccacaggacaccggcaacaccgaactgctcggttatatggtacagaaagctgacaagaaaaccgggcagtggttcaccgttctggaacgttatcatcctactacttgcacgatctctgatctcattatcggcaactcctactcgttccgggtgttcagtgagaacctctgcgggttatcgacttccgccacagtgactaaggagctggcccacatccagaaggctgacattgctgctaaaccaaagggctttatagaacgggatttctctgaagcgccgtctttcactcagcctctggcagaccacaccagcacaccgggctactctacccagcttttttgtagtgtgcgcgccagccctaagcctaagatcatttggatgaaaaacaaaatggaaatccagggaaatcccaaataccgcgcactgtcagagcagggtgtctgtacactggagatccgaaaaccatcaccattcgatagcggcgtctatacctgtaaggctatcaatgtgttgggggaggcctccgtcgactgtaggctggaagtaaaagccagcgcggcccattag

SEQ ID NO: 151770 - DNA, 1434 bp, Artificial Sequence
  derived and/or modified sequence
atgatggaaaagaatacctctgagggtccagcctgcagtccagaagaaactgctagtgagtcagccaaggtgcccaccgcagagcccccaggggaagtggcggtctctgaatcaacacgagaagaacaggtccccaagccccaggctccggctccccaagcaccaactgcctcaaccgccactaagccagcaccaccatccgaagatgttccaagcgctccccttctgctcaccctggacgacgtgtcctcatcctcagtcactgtgagctgggaaccgcctgagcggcttggaaggctagggctgcagggctacgtgctcgaactgtgcagagagggcgcatccgaatgggtacccgtaagtgcgcgaccaatgatggtcacccagcagacagtaaggaacctcgccctcggcgacaaatttttgctccgcgtgagtgcagtgtcatccgccggtgccggtcctcctgctatgctcgatcaacccattcacatccgcgagaatatagaagccccaaagataagggtccctcgccatctgagacaaacgtatatcagacaggtgggagaaacggtcaatctgcagatcccgttccaaggtaagcccaagccccaggccacctggacccataacgggcatgctctcgactcacagcgcgtcagtatgagaacaggcgatcaagacagcattttatttatcaggagcgcccagaggagtgactccggcaggtacgagttaacggtcagggtcgaggaccttgaagcgaaggcagtaattgacatattagtaatcgaaaaacccggaccgccttcctctatcagactgctggacgtgtggggctgtaacgccgctctacagtggacacctccccaggatacaggaaacaccgaattgctgggatacatggtccagaaagccgataaaaagaccggccagtggtttaccgtactggaacggtaccatcccacaacctgtaccatcagcgatttaattatcggcaattcctactcattccgtgttttctcagagaacttatgcggcctaagtacatccgccaccgtcacaaaagagcttgcgcacattcagaaggctgacattgccgcaaaacctaagggttttatcgagcgggatttctccgaggcgccttctttcacacaaccactggccgaccacacatctacgcccggatactccactcagctgttttgctctgtacgcgcatctcccaaaccaaaaattatctggatgaagaataagatggaaatccagggaaatcccaagtaccgggctcttagtgagcagggcgtgtgcaccctggaaatccggaaacctagcccctttgacagcggcgtgtatacctgtaaggccattaatgtgctgggggaggcctcagttgattgcagactggaagtgaaggcctccgctgcccactag

SEQ ID NO: 151771 - DNA, 1434 bp, Artificial Sequence
  derived and/or modified sequence
atgatggagaagaacaccagcgagggccccgcctgcagccccgaggagaccgccagcgagagcgccaaggtgcccaccgccgagccccccggcgaggtggccgtgagcgagagcaccagagaggagcaggtgcccaagccccaggcccccgccccccaggcccccaccgccagcaccgccaccaagcccgccccccccagcgaggacgtgcccagcgcccccctgctgctgaccctggacgacgtgagcagcagcagcgtgaccgtgagctgggagccccccgagagactgggcagactgggcctgcagggctacgtgctggagctgtgcagagagggcgccagcgagtgggtgcccgtgagcgccagacccatgatggtgacccagcagaccgtgagaaacctggccctgggcgacaagttcctgctgagagtgagcgccgtgagcagcgccggcgccggcccccccgccatgctggaccagcccatccacatcagagagaacatcgaggcccccaagatcagagtgcccagacacctgagacagacctacatcagacaggtgggcgagaccgtgaacctgcagatccccttccagggcaagcccaagccccaggccacctggacccacaacggccacgccctggacagccagagagtgagcatgagaaccggcgaccaggacagcatcctgttcatcagaagcgcccagagaagcgacagcggcagatacgagctgaccgtgagagtggaggacctggaggccaaggccgtgatcgacatcctggtgatcgagaagcccggcccccccagcagcatcagactgctggacgtgtggggctgcaacgccgccctgcagtggacccccccccaggacaccggcaacaccgagctgctgggctacatggtgcagaaggccgacaagaagaccggccagtggttcaccgtgctggagagataccaccccaccacctgcaccatcagcgacctgatcatcggcaacagctacagcttcagagtgttcagcgagaacctgtgcggcctgagcaccagcgccaccgtgaccaaggagctggcccacatccagaaggccgacatcgccgccaagcccaagggcttcatcgagagagacttcagcgaggcccccagcttcacccagcccctggccgaccacaccagcacccccggctacagcacccagctgttctgcagcgtgagagccagccccaagcccaagatcatctggatgaagaacaagatggagatccagggcaaccccaagtacagagccctgagcgagcagggcgtgtgcaccctggagatcagaaagcccagccccttcgacagcggcgtgtacacctgcaaggccatcaacgtgctgggcgaggccagcgtggactgcagactggaggtgaaggccagcgccgcccactag

SEQ ID NO: 151772 - protein, 1108 aa, Artificial Sequence
  derived and/or modified sequence
MGSKGVYQYHWQSHNVKHSGVDDMVLLSKITENSIVENLKKRYMDDYIFTYIGSVLISVNPFKQMPYFGEKEIEMYQGAAQYENPPHIYALADNMYRNMIIDRENQCVIISGESGAGKTVAAKYIMSYISRVSGGGTKVQHVKDIILQSNPLLEAFGNAKTVRNNNSSRFGKYFEIQFSPGGEPDGGKISNFLLEKSRVVMRNPGERSFHIFYQLIEGASAEQKHSLGITSMDYYYYLSLSGSYKVDDIDDRREFQETLHAMNVIGIFAEEQTLVLQIVAGILHLGNISFKEVGNYAAVESEEFLAFPAYLLGINQDRLKEKLTSRQMDSKWGGKSESIHVTLNVEQACYTRDALAKALHARVFDFLVDSINKAMEKDHEEYNIGVLDIYGFEIFQKNGFEQFCINFVNEKLQQIFIELTLKAEQEEYVQEGIRWTPIEYFNNKIVCDLIENKVNPPGIMSILDDVCATMHAVGEGADQTLLQKLQMQIGSHEHFNSWNQGFIIHHYAGKVSYDMDGFCERNRDVLFMDLIELMQSSELPFIKSLFPENLQADKKGRPTTAGSKIKKQANDLVSTLMKCTPHYIRCIKPNETKKPRDWEESRVKHQVEYLGLKENIRVRRAGYAYRRIFQKFLQRYAILTKATWPSWQGEEKQGVLHLLQSVNMDSDQFQLGRSKVFIKAPESLFLLEEMRERKYDGYARVIQKSWRKFVARKKYVQMREEASDLLLNKKERRRNSINRNFIGDYIGMEEHPELQQFVGKREKIDFADTVTKYDRRFKGVKRDLLLTPKCLYLIGREKVKQGPDKGLVKEVLKRKIEIERILSVSLSTMQDDIFILHEQEYDSLLESVFKTEFLSLLAKRYEEKTQKQLPLKFSNTLELKLKKENWGPWSAGGSRQVQFHQGFGDLAVLKPSNKVLQVSIGPGLPKNSRPTRRNTTQNTGYSSGTQNANYPVRAAPPPPGYHQNGVIRNQYVPYPHAPGSQRSNQKSLYTSMARPPLPRQQSTSSDRVSQTPESLDFLKVPDQGAAGVRRQTTSRPPPAGGRPKPQPKPKPQVPQCKALYAYDAQDTDELSFNANDIIDIIKEDPSGWWTGRLRGKQGLFPNNYVTKI

SEQ ID NO: 151773 - DNA, 3327 bp, Artificial Sequence
  derived and/or modified sequence
atgggctctaagggcgtgtaccagtatcactggcagagccacaacgtgaagcactctggagtggacgacatggtgttgctgagtaagattacagagaatagcatcgtggagaacctgaagaagcgctacatggacgactacatttttacatatatcggtagcgtcctgattagcgtgaatcctttcaaacagatgccatatttcggggaaaaggagatagaaatgtaccagggcgctgcgcagtatgaaaatcctccacacatttacgccttagcagacaacatgtatcggaatatgatcatagatagagagaatcagtgcgtgatcatctctggcgagtctggcgcaggcaagacggtggctgcaaaatatattatgagctacatttcccgcgtgagcggcggcggaaccaaggtccagcatgtgaaggacattatcttgcagtctaaccctcttctcgaggccttcgggaatgctaagacggttcggaacaacaacagctccagattcggcaaatatttcgagatccagtttagccctggcggcgagcctgatggcggaaagatttcaaacttcctgctggagaagtcccgagtggtcatgagaaaccccggtgagagatcttttcacatattctatcagcttattgagggggccagcgccgagcaaaagcactccctgggaatcacctcaatggactattactattacctcagcctatccgggtcttacaaagttgatgacattgacgaccgccgcgaattccaggagacccttcatgcaatgaacgtaattggcatcttcgccgaagagcagactttggtgctgcaaatcgttgctggaatactacacctggggaacatcagcttcaaggaggtgggtaactacgctgcagtagagagcgaggaatttctcgccttcccggcctacctcctcggtataaatcaggataggttgaaagagaaattaaccagtcgacagatggactccaaatggggaggcaaatccgaatccattcacgtgactctgaatgtcgaacaggcctgttatactcgggacgcccttgccaaagctttgcatgcgcgcgtgttcgatttcctcgtggacagcatcaataaggccatggagaaagatcatgaagagtacaatatcggtgtgctagatatttatggctttgagatattccaaaaaaatggatttgaacagttctgtatcaacttcgttaatgaaaaattgcagcagatctttatcgaactgaccctcaaggccgagcaagaggagtacgtgcaagaaggaatacgctggacccccatcgaatatttcaataataagattgtctgcgacctgattgagaataaggtgaatcccccaggaattatgtccatcctggatgacgtgtgtgctaccatgcacgccgtaggggagggcgcagaccaaacactactgcaaaaactgcaaatgcaaatcggaagccacgaacacttcaactcatggaatcagggcttcatcatccaccactatgccggaaaagtgagctacgacatggatggtttttgcgagaggaatagggatgtgttgtttatggacttgatcgagctcatgcaatcttccgagttacccttcatcaagtcattgtttcccgagaacctacaggccgacaaaaagggcagaccaacaactgccgggtctaaaatcaaaaaacaagctaacgacctcgtctccacactaatgaagtgcaccccacactacattagatgtatcaagcccaacgagactaagaaacccagggattgggaggaaagtagggttaagcaccaagtggagtacttggggctgaaggaaaatatacgggtgcggcgggcaggctatgcctatcgccgaatttttcagaaatttttgcagagatacgccatcctcaccaaggcaacctggccctcctggcaaggcgaagaaaagcagggtgtcctgcacttgttacagtccgtcaatatggactctgatcagtttcagttaggccgctctaaggtctttataaaggcccccgaatcactgtttctactggaagaaatgcgcgaaaggaaatatgacgggtatgcccgcgttatccagaaaagctggaggaagtttgtggctcggaagaagtacgttcagatgcgcgaagaggcatccgatctcctcttgaataaaaaggagcgccggcgaaattcgatcaatcgcaactttatcggggactacattggcatggaggagcacccagagctccagcaattcgtgggcaagcgcgaaaagatcgatttcgcagatactgtgactaagtacgaccgcagatttaaaggggtcaagcgggatctgctgttgacaccgaaatgtctttatctaataggccgtgaaaaggtcaagcaggggccggacaaaggactggtgaaagaggtgctgaagcgcaaaatagagatcgagcgcattctctccgtctccctaagcacaatgcaggacgatatattcatactgcacgagcaagaatacgatagccttctcgagagtgtcttcaaaactgaatttctttctcttctagccaagcgctatgaagaaaagacccagaagcagctgccactgaagttcagtaacactctcgagttgaagctgaaaaaggaaaactggggcccatggtcggccggaggatcccgacaggtgcagttccatcaggggtttggggacctggccgtgttgaagccgtcgaataaggtcttacaagtatctataggacccggcctgccaaagaatagccgcccgaccaggaggaacaccacccaaaacactggctactcatcgggaacacagaatgctaattatcctgtacgggctgcgcctccgccccccgggtaccaccagaatggcgtgattagaaatcaatatgtcccctatccccacgctccgggcagtcagcggagcaatcaaaagagcttgtacacttccatggcccgcccacctctgcctcgacagcagtctacgtctagtgacagagtttctcagacccccgaatctttggactttctcaaggtccccgaccaaggtgccgcaggcgtgagacgccagaccacctcacggcctcccccggcaggaggacggcctaagccacagcccaagccgaagcctcaggtacctcagtgtaaagctctctacgcctacgacgcccaggacaccgacgagctctcctttaacgctaacgacattatcgatataatcaaggaggatcccagcgggtggtggacagggcggttacgtgggaagcagggcctgttccctaataattacgtgactaagatatag

SEQ ID NO: 151774 - DNA, 3327 bp, Artificial Sequence
  derived and/or modified sequence
atgggcagcaagggcgtgtaccagtaccactggcagagccacaacgtgaagcacagcggcgtggatgacatggtgctgctgagcaagatcacagagaacagcatcgtggagaacctgaagaagcgctacatggatgactacatcttcacctacatcggctctgtgctgatctctgtgaaccccttcaagcagatgccctactttggagagaaggagattgagatgtaccagggcgccgcccagtatgaaaatccaccccacatctatgccctggccgacaacatgtacagaaacatgatcatcgaccgggagaaccagtgtgtgatcatctctggagagagcggggccggcaagacagtggccgccaagtacatcatgagctacatcagccgggtgtctgggggcggcaccaaggtgcagcacgtgaaggacatcatcctgcagagcaaccccctgctggaggcctttggaaatgccaagacagtgaggaacaacaacagcagcagatttgggaagtactttgagatccagttcagccctggaggagagccagatggcggcaagatcagcaacttcctgctggagaagagccgggtggtgatgaggaaccctggagagaggagcttccacatcttctaccagctgattgagggcgccagcgctgagcagaagcacagcctgggcatcacctccatggactactactactacctgagcctgagcggcagctacaaggtggatgacattgatgaccggcgggagttccaggagaccctgcacgccatgaatgtgattggcatctttgctgaggagcagaccctggtgctgcagatcgtggccggcatcctgcacctgggcaacatctccttcaaggaggtgggcaactatgctgctgtggagagcgaggagttcctggccttccctgcctacctgctgggcatcaaccaggaccggctgaaggagaagctgaccagccggcagatggacagcaagtggggcggcaagtctgagagcatccacgtgaccctgaatgtggagcaggcctgctacaccagagatgccctggccaaggccctgcacgcccgggtgtttgacttcctggtggacagcatcaacaaggccatggagaaggaccacgaggagtacaacatcggcgtgctggacatctacggctttgagatcttccagaagaatggatttgagcagttctgcatcaactttgtgaatgagaagctgcagcagatcttcatcgagctgaccctgaaggccgagcaggaggagtatgtgcaggagggcatccgctggacccccatcgagtacttcaacaacaagatcgtgtgtgacctgattgagaacaaggtgaaccccccaggcatcatgagcatcctggatgatgtgtgtgccaccatgcatgctgtgggggagggcgctgaccagaccctgctgcagaagctgcagatgcagatcggcagccatgagcacttcaacagctggaaccagggcttcatcatccaccactacgccggcaaggtgtcctatgacatggatggcttctgtgaaagaaacagagatgtgctcttcatggacctgattgagctgatgcagagcagcgagctgcccttcatcaagagcctcttccctgagaacctgcaggccgacaagaagggccggcccaccacagctggcagcaagatcaagaagcaggccaatgacctggtgtccaccctgatgaagtgcaccccccactacatccgctgcatcaagcccaatgagaccaagaagccccgggactgggaggagagccgggtgaagcaccaggtggagtacctgggcctgaaggagaacatccgggtgagaagagctggctacgcctaccgccgcatcttccagaagttcctgcagagatatgccatcctgaccaaggccacctggcccagctggcagggcgaggagaagcagggcgtgctgcacctgctgcagagcgtgaacatggacagcgaccagttccagctgggccgcagcaaggtgttcatcaaggcccctgagagcctcttcctgctggaggagatgagggagaggaaatatgatggctacgcccgggtcatccagaagtcctggaggaagtttgtggccaggaagaagtatgtgcagatgagggaggaggccagtgacctgctgctgaacaagaaggagaggagaagaaacagcatcaacagaaacttcatcggggactacatcggcatggaggagcaccctgagctgcagcagtttgtgggcaagcgggagaagattgactttgctgacacagtgaccaagtatgaccggcgcttcaagggcgtgaagagggacctgctgctgacccccaagtgcctgtacctgattggccgggagaaggtgaagcagggccctgacaagggcctggtgaaggaggtgctgaagaggaagattgaaattgaaagaatcctgtctgtgtccctgagcaccatgcaggatgacatcttcatcctgcacgagcaggagtatgacagcctgctggagagcgtcttcaagacagagttcctgagcctgctggccaagagatatgaggagaagacccagaagcagctgcccctgaagttcagcaacaccctggagctgaagctgaagaaggagaactggggcccctggagcgctgggggcagccggcaggtgcagttccaccagggctttggagacctggccgtgctgaagcccagcaacaaggtgctgcaggtgtccatcggccctggcctgcccaagaacagccggcccaccaggaggaacaccacccagaacacaggctacagcagcggcacccagaatgccaactaccctgtgcgggccgcccctcctcctcctggctaccaccagaatggagtcatccggaaccagtatgtgccctacccccacgcccctggcagccagaggagcaaccagaagagcctgtacacctccatggcccggccccccctgccccggcagcagagcaccagcagtgacagagtgtcccagaccccagagagcctggacttcctgaaggtgcctgaccagggcgccgccggcgtgcggcggcagaccaccagccggcccccacctgctgggggccggcccaagccccagcccaagcccaagccccaggtgccccagtgcaaggccctgtatgcctatgatgcccaggacacagatgagctgtccttcaatgccaatgacatcatcgacatcatcaaggaggaccccagcggctggtggacaggccgcctgcggggcaagcagggcctcttccccaacaactacgtgaccaagatctag

SEQ ID NO: 151775 - DNA, 6193 bp, Artificial Sequence
  derived and/or modified sequence
atttatggacagattgcccggcccgagccgagactcagccagaggagtacggattaagtggccgaagaaagaggagtgaggcaggggagcgaggcggacgctccgagcgcatcggactcacctgggccggcggcgaccggcgagtacgagtggactcttgccctccgcagcatgcgccccgcctgctaagtcgccgccgtctcgccctcacctagcaccgccaatcccgcctggatggagtcccctctgggttcccattggctcctgtgagtgcttgggtgtcgggagcctgtttttggcgaggggaaccaacttttgaagttcgcccagaagactgcgttccagccccagttccccggcagcgggacccggcgaagacgcgaccgcggcgcgagtcaccatgggaagcaaaggtgtctaccagtaccactggcaaagccacaatgtcaagcacagtggtgtggacgacatggtgctactgtccaagatcacagagaactccatcgtggagaatctgaagaagagatacatggatgactacatttttacatatataggatctgtattaatctcagtcaaccctttcaagcagatgccatattttggggaaaaggaaattgaaatgtaccaaggagcggcacagtatgaaaacccaccacatatctatgcccttgcagataatatgtacagaaacatgatcattgacagagagaaccagtgcgtcattatcagtggtgaaagtggtgctggaaaaacagtggctgccaaatatatcatgagctacatctccagagtgtctggaggagggaccaaagtccagcacgtgaaggacattatcctgcagtccaacccgctgctggaggccttcgggaacgccaagaccgtccggaacaacaactccagccgatttggaaaatactttgaaatccagttcagtccaggtggggaaccagatggtggaaagatctccaacttccttctggaaaaatctagggtggtgatgaggaacccaggagagcggagttttcacatattttaccagctcatcgagggcgcctctgcagagcagaaacacagccttggcatcaccagcatggactattattactacctgagcctctcgggctcatacaaggttgatgacattgacgacaggcgggagtttcaggaaactctgcacgccatgaatgtgattgggatctttgcagaagagcaaacgctggtgttgcagatagtggcgggtattctccacctgggaaacatcagcttcaaagaagttggcaactacgcggctgtggagagtgaagagtttttagcttttcctgcatatctgctagggataaaccaggaccggttgaaagaaaagctaacaagccggcagatggatagcaagtggggaggcaaatccgaatccatccacgtgaccctcaacgtagagcaggcctgttacacccgggatgcgctcgccaaggccctgcacgcccgggtctttgatttcttggtagattccatcaataaagccatggagaaagaccatgaagaatacaacattggcgtcctagacatctatggctttgaaatattccagaaaaatggctttgaacagttttgtatcaattttgttaatgaaaaactgcagcagatttttattgaactgacattaaaggcagaacaggaagaatatgttcaagagggaataagatggacacccattgagtactttaataataaaatcgtatgtgacctcatagagaacaaagtgaaccctcctggcatcatgagcatcctggatgacgtgtgcgccacgatgcatgcggtgggtgagggggcagatcagacgctgctccagaaacttcagatgcagattgggagtcatgagcacttcaacagttggaaccaaggcttcatcattcatcattatgctgggaaggtatcctatgacatggatggcttttgtgaaaggaaccgggatgtgctttttatggatctcatcgagcttatgcagagcagcgagctgcctttcataaagtctttatttccggaaaatctgcaggctgacaagaaagggcgcccaactactgccggaagcaaaataaagaaacaagccaatgaccttgtgagcaccctgatgaaatgtacgccccactacattcgctgcatcaagccaaacgaaaccaagaagcccagagactgggaggaaagcagggtaaagcatcaagtcgaatatttgggtctgaaagagaacattcgagtgagaagagctggctatgcctatcggcgcatcttccaaaaattcctacagaggtatgccattctgaccaaagccacctggccttcttggcagggagaggagaagcaaggcgtcctgcacctgctgcagtcggtcaacatggacagcgaccagttccagctggggaggagtaaagtgttcatcaaagcccccgagtctctatttcttttagaagagatgagagagagaaagtatgatgggtatgctcgagtgatacagaaatcatggaggaaattcgtggcccggaagaaatacgttcaaatgagagaagaagcctcagacctcttattgaacaagaaggagagaaggagaaacagtattaacaggaactttataggggattatattgggatggaagagcacccagaactccagcagttcgtgggcaagagggagaagattgatttcgcagacacagtcaccaagtatgacaggaggttcaagggtgtaaagcgagacctgctccttaccccaaagtgcttgtacttaatcggacgagaaaaagtcaaacagggcccagacaagggcctggtgaaagaagtcctgaagcggaaaatcgagatagaacggatcttgtctgtgtccctcagtactatgcaggatgacatttttattctccatgagcaagagtatgacagtttgcttgaatctgtcttcaaaactgaattcctaagcctcttagcaaagcgttacgaggagaagacccagaagcaactacctctgaaattcagcaatacgcttgaactgaagttgaaaaaggaaaactggggcccctggagtgcagggggctcccggcaagtgcagttccaccaagggtttggggacctggctgtcctcaagcccagtaacaaagtgctgcaggtcagcatcggacctggactgcccaagaactcccgtcctaccagaaggaacactacccaaaatacaggttattccagtgggactcaaaatgccaactacccagtgagagctgcccctcctcccccaggataccatcagaacggagtcatcagaaaccagtatgtgccatatccccatgctcctggaagccagaggtccaatcagaaaagcctgtacacctccatggcccgcccgcccttgcctcggcagcagtctaccagttcagaccgagtgtcacagacgccagagagcctggatttcctcaaggtcccggaccagggagctgcaggggtcaggagacaaacaaccagtcggcctcccccagcagggggcagacccaagccccagcccaagcccaagcctcaggtgccacagtgcaaggctttgtatgcctatgacgctcaggacacagacgaactcagctttaatgccaatgacattattgatattatcaaagaagatccttctggctggtggacgggtcgactacgaggcaagcagggcctgttccccaacaactatgtgaccaagatctgaggtgcccgtgactctgacacatggggcagaggagctccaggcacagaccaggggaggggatatttaggggctccccttacaatccacaatgagcaattgcttctccaaggcctggagctattctggtaccttccccatggaggacactgaaaaggctgggttggggacagggagtatcactccataagtgatcctaaaaggtagcctcttcataggaacccaggaggacaaaaccaccatgcattaagatttatttattgtatttaaacctggtgagaggacaagtgaggtctgctcagaccttgtaggcttctatcaaaacagcaccctgcttgctcaccaggcctagagaatggctgtaggtggccgctgacaagtgcctttagttgaagagcacatttctttcatctctcttgtccatacctgatagacacattcctctctgccaccttccttcagggaggacccgccctctgcagactgggcttagcgtgagcaggcacttcccatgtacgtgccaagggtaagctggcctgctgagcccagggcgacagaggggcactggtttacactttgccgggaccatcagggccgccaagcaggtcaggggctgggggctgggggctgggctgctggctttgctttctctgggtcttcaattagaatgtggctggcccatattggtttgtgtttaaatgctgtacttactacaagaaggatcttttttcaagctgtacatttataaaaacagatcatatactgtatatataaaaatcttgagatggtagaaacatgtatgaatgtactaagtagtattccactgtactcattcataaggtaggttttcttacaaaactcacaccaggtacttaaagatgtgctctgcttttttccaactacggagtgtcactgctttctaggtcagtccctgcagactcttctcaactctttccctataggaaacttactccgcgtcctgcccccacctcctaaataaataaaggaatcggcgaacaccttcttcttttatgacatttgttatgggttgaattgtgtgcctccaaagaagatgttggagtcccagccaccagtacctcacaatatgaccttatttggaaatagagtctttatggagcaaacaaacaaaactaattaaaatgaagtcattagagtgggtcttaatccaatataatggtgtcctgatgaaaaggggaaatttggacacagagaccaacatgccagaggaaagaccatgtgaaaaggcagggagaagacagccattcacaagccctggacagaggcctggaacagattctccctcacaccctcacaaggaaccagccctgcccaccttggtcttggacttccaacctccagaactgtgaggcaatacatttcgctgtttaagccactcggtttgtggtagtttgttacggcagccctaacaaactaaaacaatgttttcttgccataatagtgaaaagctggaatcagtgtaatgcccatcaataatggaatggttgtaagtagagactgccatttctctacctttcctcctctgggtgccatagccattcttaagctactggtaacttagagtttgagcagcatacacctttgaggctttcaggatcctcaagtccatgggaaaaaattatcagggcttacgtataagggaaaaaaattgatctagatttgaaacgaagatacatttaattctgctgtgttttacttcaagaacagggagcaaactccattctgtaacagtaacgaataatgttaaaaggctacttcagttccatgttgcgaccagagaggaaagtagagccatgatgcggtgagttgaggaaaggtaatcctgttgacactagtggtctctaaagtactttcacattcatggactccccgcagtgggaggaagataccaccagaactgggacagaggagcatgctggagtccccacagccaccagcactcaggctgcgttctcagggcaggaacaccaggaccatcttcccttgttatcataagcccctggctggctgggacaagcctttgtttttcctcctgattgattgattggcattttacacttgtgtgtaactgggaaccatcgggctctaggtcacaaaacagggactgagttaaacccccacgagtaacaccctcatccatggaaatcacagaccaagcccttagcacctgcatcgtgtgcccagccagtgccaggctcaaggagatgcccaacaaatggtgctgaaataggtaagtgacccacaggggaaggagacttagatctgcgtagagatgctgaaatgctgacactattaagaaaagtttggagaaatagtggtttatcttaaacttatttgtatatatttagaaattcaacatggggactaccagaaaaatctgggataaataacatttccctttttttcctaattaaaaagtcttcagaaaaa

SEQ ID NO: 151776 - DNA, 3327 bp, Artificial Sequence
  derived and/or modified sequence
atgggcagcaagggcgtgtaccagtaccactggcagagccacaacgtgaaacactccggggtcgacgacatggtattactttctaagattacagagaactctatcgtggagaacctgaagaagagatacatggacgactatatctttacttatatcgggtcagtgctgatttccgtgaatcctttcaaacagatgccctatttcggggaaaaagagatcgaaatgtatcagggagccgcccagtatgagaaccctcctcacatctacgccctggcggacaacatgtataggaatatgattattgaccgcgaaaatcagtgcgtaattatctccggggagtctggtgccggcaagacggttgcagctaaatacatcatgagctacatctctcgggtatcaggcggtgggacaaaggtgcagcacgtcaaagacataattctgcaaagcaaccccttgcttgaagctttcggaaacgcaaaaaccgtgaggaacaataactccagtcggtttggtaaatattttgagatccagtttagtcccggaggcgagcccgatggcgggaaaatctcgaactttctgttagagaagagtagggtggtcatgcggaatcccggggagagatcgttccacatattttatcagttgatcgagggagcctcagctgagcagaagcattccctgggaatcactagcatggactactattactacctctcactctctgggagctacaaagtggacgacatcgacgaccggcgagagttccaggagaccctgcacgcaatgaacgtgatcgggatctttgcagaagaacagacgctggttctgcagatcgtagccggcatactgcacctgggaaacataagctttaaggaggttggtaactatgccgcagtggaatctgaggaatttctcgctttcccagcctatttattgggcatcaatcaggacagattaaaggagaaactgaccagtcggcagatggactctaagtggggcgggaaatctgagagtatccatgtgaccctgaacgtcgagcaggcctgctacacccgagatgctctggccaaagccttgcacgcacgcgtattcgattttctggtcgactccatcaataaggccatggagaaagatcacgaggagtacaatatcggagttttggatatatatggctttgaaatctttcaaaagaacggctttgagcaattttgtataaacttcgttaatgagaaattacaacagattttcatagaactgaccctcaaggctgaacaggaagaatacgttcaggagggcatcaggtggactccaatcgagtatttcaacaacaaaattgtatgtgacctgatcgagaacaaggttaatcccccgggcatcatgagcatacttgacgatgtctgtgccacgatgcacgcagtcggcgaaggagcagatcaaactttgcttcagaagctgcagatgcagattggaagtcacgagcacttcaactcttggaaccaaggcttcataatccaccactacgctggtaaggtgtcctacgacatggatggcttctgcgagcgcaatagggacgttctcttcatggatctgatcgaactgatgcagtcatcagaactgccctttatcaagtctctcttccctgagaacttgcaggccgataaaaaggggagaccaaccacagccggaagcaagattaaaaagcaggctaatgatctggtttctacgttaatgaagtgcacccctcattacatcagatgcatcaagcccaacgaaaccaagaagcccagggattgggaagagtctagggtgaagcatcaggttgaatatctggggctgaaagaaaacatcagagtgaggcgggccggttatgcctacagacgcattttccagaagttcctacaaagatacgccattttgacgaaggccacgtggccctcatggcaaggagaggaaaagcagggagtgctgcatctcctccaaagcgttaatatggattctgaccagtttcagctcggcaggtcaaaagtgtttattaaagctcccgaaagcctcttcctgcttgaagagatgagggagagaaaatacgacggctacgccagagttattcagaagagctggaggaaattcgttgccaggaaaaaatacgtccagatgcgagaagaggcctcggatttgctgcttaataaaaaagagcgcaggcgcaactcgataaacaggaacttcattggagactacattgggatggaagagcatccagaactccagcaattcgtcggaaagcgtgagaaaattgacttcgcagatactgtcacgaaatacgacaggcgatttaagggggtgaaaagggacttactcttgacccctaaatgcctttatcttatcggcagggaaaaagtgaaacaggggccggacaagggtctggtcaaggaagttctgaaaaggaaaatcgagatagagcgtatactctcggtctccctgagcacaatgcaggacgatatatttattctgcacgaacaggaatacgattcgctcctcgaatcggtgttcaagacggagtttttgagtctgttggccaaaaggtatgaggagaaaactcagaagcagctgcccttgaagttttccaacacattggagttgaagctaaaaaaggagaactggggcccatggtctgccgggggctctcggcaggtacaattccatcaaggttttggcgacctggccgtgctcaagcccagtaacaaagtgctacaggttagtatcggccctggcttgcctaagaactctaggccaacacgccggaatacaactcaaaacaccggatattcgtctggcactcagaatgcgaattaccccgtgcgcgcagcacccccacctcccgggtaccaccaaaatggcgtaattaggaaccagtacgtaccatatccacacgcccccggaagccagaggagcaatcaaaagtcactctatacttctatggctcgtcctcccctccccagacaacaaagtacttcgtccgaccgcgtgtcccaaactccagagtcactcgattttcttaaagtaccagaccagggggccgccggcgtgcggcgacagactacttccaggccaccacctgccggaggcagaccaaaaccacagcccaagcccaagcctcaagttccgcagtgtaaagccctctacgcttatgatgctcaggataccgacgaattatccttcaatgctaatgacatcatcgatatcattaaggaggacccttccgggtggtggacagggagattgagaggtaagcagggtctttttcctaacaattacgtgacaaaaatttag

SEQ ID NO: 151777 - DNA, 3327 bp, Artificial Sequence
  derived and/or modified sequence
atggggagtaaaggggtgtatcagtatcactggcagagtcacaacgtcaagcacagtggagtcgatgatatggttctgcttagcaagatcactgagaattctatagtggagaatctgaagaaaagatatatggatgattatattttcacctacattggaagcgtcctgatcagcgtcaatcctttcaaacagatgccatacttcggggaaaaagagatagaaatgtaccaaggcgctgcccaatatgaaaacccaccacacatctatgctctggcagataatatgtatagaaatatgatcatagatcgcgaaaatcagtgtgttattatcagcggagaatcaggcgctggcaaaacagtggccgcaaagtatatcatgagctatatttccagagtaagcggtggcggaacaaaggtgcagcatgttaaggatattattcttcagtccaaccccctcctcgaagcctttggaaacgcaaagactgtgaggaacaataactccagccgtttcgggaagtatttcgaaatccagttttctcccggaggagagccagatgggggaaaaatatcgaacttcctactggaaaagagtagagttgttatgcggaaccctggcgagcgcagcttccacatcttttatcaactgattgagggcgcatcagccgagcagaagcattcattgggcatcactagtatggactattactactacctgtctctgagcggaagctacaaggtcgacgatatcgatgaccgccgtgagttccaggaaactctccacgccatgaatgtgatcggaatattcgccgaagaacagacgttagtgcttcagatcgtggccggaattttgcacctcggaaacatctcctttaaggaggtcggcaactacgccgcagtggaatccgaggagttcctggctttccccgcttatttgctcgggattaatcaggataggttgaaagaaaagctaactagccggcaaatggattccaagtgggggggaaaatcagagtcaatccatgtgacactcaacgtggagcaggcgtgttacactcgcgacgcattggctaaagccttacacgcacgcgtctttgacttcttggttgattcaataaacaaggccatggaaaaggatcatgaggagtataatatcggtgtactggatatctatggtttcgaaatcttccagaagaatggattcgaacagttctgcatcaatttcgtgaatgagaagcttcagcagatcttcatcgagcttaccctgaaggcggagcaggaagagtatgtgcaggaaggaattaggtggacacctatagagtacttcaataacaagattgtttgcgatttaatcgagaacaaggtcaatcctcctggcatcatgtcaatcctcgacgatgtgtgcgctaccatgcacgccgtcggagagggcgctgatcaaaccctcctccagaagctgcagatgcagattgggtcccacgaacacttcaacagctggaatcagggtttcatcatacaccattacgcgggtaaggtgagctatgatatggacggcttctgtgaaagaaatcgagacgtgctttttatggatctaatcgaacttatgcagtctagtgaactgcctttcataaaaagcctgtttcctgaaaatctgcaggcagacaaaaaagggcgtccgacaaccgcgggaagcaaaatcaagaaacaggcaaacgacctggtgtccacacttatgaagtgtaccccccattacatccggtgcattaagcctaacgaaactaagaagccaagggattgggaagagtcgagagtgaaacaccaggtggaatatctggggctgaaagaaaacatacgcgtgagacgggcaggatatgcctacagacgtattttccagaagttccttcagcgatatgccattctcaccaaagcaacctggccaagctggcaaggggaggaaaaacaaggggtgctacacctcttgcaatccgtgaacatggatagcgaccaatttcagttgggcagatccaaggtgttcatcaaggcacctgagtctctcttcctgttggaagaaatgagggaacgcaagtatgacggctacgcaagggtgattcagaagagttggcgcaagttcgtggctcgtaaaaagtacgtgcagatgcgtgaggaagcctccgacttactgcttaacaaaaaagagcgtcggcgaaattctatcaaccgcaatttcatcggtgactacattggcatggaagagcaccctgagctgcagcaattcgtaggaaagcgcgagaagatcgactttgccgacactgtgacgaagtacgaccgacgcttcaagggagtgaagagggatcttttattgacccccaagtgcctgtacctgatcgggagagagaaagtcaagcagggccctgataaagggctggtcaaagaggtgttgaagaggaagattgagattgaacgaatcctgagtgtctccctttcaaccatgcaggacgatatctttatcctccacgaacaggagtatgacagcctgctggaatctgtattcaaaaccgagttcttatccctgctcgctaagcgctatgaagaaaagacgcagaaacagcttcccctaaaattctccaacactctagaactgaaattgaagaaggaaaattggggtccgtggtctgcaggaggttcacgtcaggtccagtttcaccaaggctttggagatcttgcagttctgaagcccagcaataaggtgcttcaggtctcgataggccctggactgcccaaaaactccagaccaacacggagaaatacgacccagaacaccgggtacagcagtggcactcagaacgcaaattatccagtcagagccgctcctcccccacctggatatcatcagaacggagtgatcagaaatcagtacgtgccgtacccccacgccccaggcagccagcgtagcaatcagaagagcttgtacacctcaatggccaggccccctctgcccaggcagcagtcgacttcctctgaccgcgtttcccaaacacctgaaagtctcgattttctcaaggttcctgatcaaggggcagctggggtcagaagacaaaccacatctcgccctccaccagcaggaggtaggcccaaaccccagcctaagcctaaaccccaggtcccccaatgcaaagctctgtacgcttatgatgcccaagatactgacgagctgtcattcaacgccaacgacattatcgatataatcaaagaggatccaagcggatggtggactggacggcttcgagggaagcagggcctctttcctaataactatgtcacgaagatctag

SEQ ID NO: 151778 - DNA, 3327 bp, Artificial Sequence
  derived and/or modified sequence
atgggcagcaagggcgtgtaccagtaccactggcagagccacaacgtgaagcacagcggcgtggacgacatggtgctgctgagcaagatcaccgagaacagcatcgtggagaacctgaagaagagatacatggacgactacatcttcacctacatcggcagcgtgctgatcagcgtgaaccccttcaagcagatgccctacttcggcgagaaggagatcgagatgtaccagggcgccgcccagtacgagaaccccccccacatctacgccctggccgacaacatgtacagaaacatgatcatcgacagagagaaccagtgcgtgatcatcagcggcgagagcggcgccggcaagaccgtggccgccaagtacatcatgagctacatcagcagagtgagcggcggcggcaccaaggtgcagcacgtgaaggacatcatcctgcagagcaaccccctgctggaggccttcggcaacgccaagaccgtgagaaacaacaacagcagcagattcggcaagtacttcgagatccagttcagccccggcggcgagcccgacggcggcaagatcagcaacttcctgctggagaagagcagagtggtgatgagaaaccccggcgagagaagcttccacatcttctaccagctgatcgagggcgccagcgccgagcagaagcacagcctgggcatcaccagcatggactactactactacctgagcctgagcggcagctacaaggtggacgacatcgacgacagaagagagttccaggagaccctgcacgccatgaacgtgatcggcatcttcgccgaggagcagaccctggtgctgcagatcgtggccggcatcctgcacctgggcaacatcagcttcaaggaggtgggcaactacgccgccgtggagagcgaggagttcctggccttccccgcctacctgctgggcatcaaccaggacagactgaaggagaagctgaccagcagacagatggacagcaagtggggcggcaagagcgagagcatccacgtgaccctgaacgtggagcaggcctgctacaccagagacgccctggccaaggccctgcacgccagagtgttcgacttcctggtggacagcatcaacaaggccatggagaaggaccacgaggagtacaacatcggcgtgctggacatctacggcttcgagatcttccagaagaacggcttcgagcagttctgcatcaacttcgtgaacgagaagctgcagcagatcttcatcgagctgaccctgaaggccgagcaggaggagtacgtgcaggagggcatcagatggacccccatcgagtacttcaacaacaagatcgtgtgcgacctgatcgagaacaaggtgaacccccccggcatcatgagcatcctggacgacgtgtgcgccaccatgcacgccgtgggcgagggcgccgaccagaccctgctgcagaagctgcagatgcagatcggcagccacgagcacttcaacagctggaaccagggcttcatcatccaccactacgccggcaaggtgagctacgacatggacggcttctgcgagagaaacagagacgtgctgttcatggacctgatcgagctgatgcagagcagcgagctgcccttcatcaagagcctgttccccgagaacctgcaggccgacaagaagggcagacccaccaccgccggcagcaagatcaagaagcaggccaacgacctggtgagcaccctgatgaagtgcaccccccactacatcagatgcatcaagcccaacgagaccaagaagcccagagactgggaggagagcagagtgaagcaccaggtggagtacctgggcctgaaggagaacatcagagtgagaagagccggctacgcctacagaagaatcttccagaagttcctgcagagatacgccatcctgaccaaggccacctggcccagctggcagggcgaggagaagcagggcgtgctgcacctgctgcagagcgtgaacatggacagcgaccagttccagctgggcagaagcaaggtgttcatcaaggcccccgagagcctgttcctgctggaggagatgagagagagaaagtacgacggctacgccagagtgatccagaagagctggagaaagttcgtggccagaaagaagtacgtgcagatgagagaggaggccagcgacctgctgctgaacaagaaggagagaagaagaaacagcatcaacagaaacttcatcggcgactacatcggcatggaggagcaccccgagctgcagcagttcgtgggcaagagagagaagatcgacttcgccgacaccgtgaccaagtacgacagaagattcaagggcgtgaagagagacctgctgctgacccccaagtgcctgtacctgatcggcagagagaaggtgaagcagggccccgacaagggcctggtgaaggaggtgctgaagagaaagatcgagatcgagagaatcctgagcgtgagcctgagcaccatgcaggacgacatcttcatcctgcacgagcaggagtacgacagcctgctggagagcgtgttcaagaccgagttcctgagcctgctggccaagagatacgaggagaagacccagaagcagctgcccctgaagttcagcaacaccctggagctgaagctgaagaaggagaactggggcccctggagcgccggcggcagcagacaggtgcagttccaccagggcttcggcgacctggccgtgctgaagcccagcaacaaggtgctgcaggtgagcatcggccccggcctgcccaagaacagcagacccaccagaagaaacaccacccagaacaccggctacagcagcggcacccagaacgccaactaccccgtgagagccgccccccccccccccggctaccaccagaacggcgtgatcagaaaccagtacgtgccctacccccacgcccccggcagccagagaagcaaccagaagagcctgtacaccagcatggccagaccccccctgcccagacagcagagcaccagcagcgacagagtgagccagacccccgagagcctggacttcctgaaggtgcccgaccagggcgccgccggcgtgagaagacagaccaccagcagacccccccccgccggcggcagacccaagccccagcccaagcccaagccccaggtgccccagtgcaaggccctgtacgcctacgacgcccaggacaccgacgagctgagcttcaacgccaacgacatcatcgacatcatcaaggaggaccccagcggctggtggaccggcagactgagaggcaagcagggcctgttccccaacaactacgtgaccaagatctag

SEQ ID NO: 151779 - protein, 1285 aa, Artificial Sequence
  derived and/or modified sequence
MEDGKPVWAPHPTDGFQMGNIVDIGPDSLTIEPLNQKGKTFLALINQVFPAEEDSKKDVEDNCSLMYLNEATLLHNIKVRYSKDRIYTYVANILIAVNPYFDIPKIYSSEAIKSYQGKSLGTRPPHVFAIADKAFRDMKVLKMSQSIIVSGESGAGKTENTKFVLRYLTESYGTGQDIDDRIVEANPLLEAFGNAKTVRNNNSSRFGKFVEIHFNEKSSVVGGFVSHYLLEKSRICVQGKEERNYHIFYRLCAGASEDIREKLHLSSPDNFRYLNRGCTRYFANKETDKQILQNRKSPEYLKAGSMKDPLLDDHGDFIRMCTAMKKIGLDDEEKLDLFRVVAGVLHLGNIDFEEAGSTSGGCNLKNKSAQSLEYCAELLGLDQDDLRVSLTTRVMLTTAGGTKGTVIKVPLKVEQANNARDALAKTVYSHLFDHVVNRVNQCFPFETSSYFIGVLDIAGFEYFEHNSFEQFCINYCNEKLQQFFNERILKEEQELYQKEGLGVNEVHYVDNQDCIDLIEAKLVGILDILDEENRLPQPSDQHFTSAVHQKHKDHFRLTIPRKSKLAVHRNIRDDEGFIIRHFAGAVCYETTQFVEKNNDALHMSLESLICESRDKFIRELFESSTNNNKDTKQKAGKLSFISVGNKFKTQLNLLLDKLRSTGASFIRCIKPNLKMTSHHFEGAQILSQLQCSGMVSVLDLMQGGYPSRASFHELYNMYKKYMPDKLARLDPRLFCKALFKALGLNENDYKFGLTKVFFRPGKFAEFDQIMKSDPDHLAELVKRVNHWLTCSRWKKVQWCSLSVIKLKNKIKYRAEACIKMQKTIRMWLCKRRHKPRIDGLVKVGTLKKRLDKFNEVVSVLKDGKPEMNKQIKNLEISIDTLMAKIKSTMMTQEQIQKEYDALVKSSEELLSALQKKKQQEEEAERLRRIQEEMEKERKRREEDEKRRRKEEEERRMKLEMEAKRKQEEEERKKREDDEKRIQAEVEAQLARQKEEESQQQAVLEQERRDRELALRIAQSEAELISDEAQADLALRRNDGTRPKMTPEQMAKEMSEFLSRGPAVLATKAAAGTKKYDLSKWKYAELRDTINTSCDIELLAACREEFHRRLKVYHAWKSKNKKRNTETEQRAPKSVTDYDFAPFLNNSPQQNPAAQIPARQREIEMNRQQRFFRIPFIRPADQYKDPQSKKKGWWYAHFDGPWIARQMELHPDKPPILLVAGKDDMEMCELNLEETGLTRKRGAEILPRQFEEIWERCGGIQYLQNAIESRQARPTYATAMLQSLLK

SEQ ID NO: 151780 - DNA, 3762 bp, Artificial Sequence
  derived and/or modified sequence
atggaggacggaaagccagtgtgggcccctcaccccacggatgggtttcagatggggaatatcgtggacattggacctgattcactgacaatcgagcccctgaaccagaaagggaagacttttctcgctttaatcaatcaggttttcccggcagaagaggattccaagaaggacgtagaggataattgtagcctgatgtatctgaatgaagccacactgctccataacatcaaggtgcgttattcgaaggaccgcatatatacatacgtggctaatatcctgatcgctgttaacccttatttcgatatccccaagatttattcctccgaagcaattaaatcctaccagggcaagtcgctggggaccaggccccctcacgtgttcgccatcgctgataaagcgttcagggatatgaaagtgttgaagatgagccaaagcatcatcgtgagtggggaatcaggggctggcaagactgaaaatacgaaatttgtgctgaggtatttaacggagagctacggtacaggacaggacatcgacgacagaattgtggaagcgaatcccttacttgaggcgtttgggaacgccaagaccgtcaggaacaacaacagtagcagatttggaaaattcgtggaaatccacttcaacgagaaaagtagcgtggtgggcggatttgtgagtcactacctgttggagaaaagtcgaatctgtgttcagggaaaggaagagcggaattaccacattttctaccgcctgtgtgctggcgccagcgaggacattcgtgaaaaattgcacctgagtagccccgacaacttccgttacttgaatcggggctgcacacgatactttgctaacaaggaaacagacaagcaaattctccaaaatcggaagagcccggagtatctgaaggccggctccatgaaggatccgctgttggacgaccatggcgattttatccggatgtgtactgctatgaaaaagatcggactcgatgacgaggagaagctggacctgttcagggtagtcgccggcgtgctgcatcttggcaatattgacttcgaggaagctggcagcacctctggggggtgtaacctgaaaaacaagtctgcccaatctctggagtactgtgctgaactcctgggactcgaccaggacgacctgagggtgagtctgaccactcgtgttatgttgaccactgccggagggaccaaggggacagtaattaaagttcctctcaaagtggagcaggccaacaacgcgcgagacgctttagctaagaccgtgtactcccaccttttcgaccacgtcgtcaacagagtcaatcagtgttttccgtttgagacaagtagttacttcatcggcgttctcgacatcgcaggcttcgaatatttcgaacacaattctttcgaacagttctgtataaactattgtaacgaaaaactccagcagttctttaacgaaaggatactcaaggaggaacaggaactgtatcagaaagagggcctcggcgtgaacgaagttcattacgtggataatcaggattgtattgacctgatcgaagcgaagttagtagggatcctagatatcctggatgaagagaacaggctaccccaacccagtgatcagcactttactagcgccgtgcatcagaaacataaggaccacttcagactgaccatcccacgtaagtcaaagcttgccgtgcaccgcaatataagggatgacgagggattcatcatacgccacttcgcaggcgctgtgtgttacgaaactacgcagttcgtcgagaagaacaacgatgcgcttcatatgagcttggagtctctgatctgcgaatcgcgggacaaattcatcagagagctgttcgagtcctccaccaacaacaacaaagacaccaagcagaaggcgggcaagcttagctttatctcggtggggaataagttcaaaacccagttgaaccttctcctggacaagttgcgatctactggagcatccttcatcagatgcattaagcccaacctgaaaatgacgagtcaccactttgaaggagcccagattttgtcccagctgcagtgcagtggaatggtttcagtgctggatctgatgcaaggcgggtacccatccagggcgtccttccatgagctctacaatatgtacaagaaatacatgcccgataaactcgcgcgtttagaccctaggctgttttgcaaggcgctcttcaaagccttgggcttaaatgagaacgattataagttcggccttaccaaagtttttttccggccaggcaagttcgcagaatttgaccaaattatgaagagcgacccagaccatctggcagagcttgtgaagagggtcaatcattggttgacatgtagccgatggaaaaaagtgcagtggtgcagtctgagtgtcattaaactgaagaacaagataaagtacagagcagaagcttgtataaaaatgcagaaaaccattcgtatgtggctctgcaagagaagacataagcctcgaatcgacgggctggtgaaagtgggcacgctcaagaagcggctcgacaagttcaatgaggtcgttagcgttctgaaggacggcaagcccgagatgaataagcaaattaagaatctcgagatttccatcgatacattgatggccaaaattaagtcgaccatgatgacccaggagcagattcagaaggagtatgacgcactggtgaagtcgtcggaagaattactatccgctctgcaaaagaagaaacagcaggaggaagaggccgaacgcctgcgcagaatccaagaggagatggaaaaggagaggaagcgcagggaagaggatgaaaaacgccggcggaaggaggaggaggagcggcgcatgaaactagaaatggaagctaaacgaaaacaggaagaggaagagaggaaaaaacgtgaagacgacgaaaaaaggattcaggccgaagtggaggcccagctggcacgccaaaaagaagaggaaagccaacagcaagccgttctcgagcaagagcgaagagaccgcgagcttgctcttcggatcgctcagtccgaggccgagctgatcagtgacgaggcgcaggccgacctcgcactccgtcgtggcccagcagtgctggcaaccaaggccgctgccggcactaagaagtatgacctgagcaaatggaaatacgctgagctgagagacacaataaacacctcctgtgacatcgaactgctggctgcgtgtcgggaagagttccaccggagacttaaggtgtatcacgcctggaagtccaagaacaagaagaggaacacagagaccgagcagagagccccaaagagtgtcactgattacgcccagcagaatcccgctgctcagatccctgcacggcagcgagagattgaaatgaatagacagcaacggttttttcggattcctttcattaggcctgccgaccagtacaaggacccccagagtaagaagaagggctggtggtatgcccactttgacggcccatggatagccagacagatggaactacacccagataaaccacctatcctgcttgtggcaggtaaagatgatatggagatgtgtgaactaaaccttgaggagactggcctcacacgcaagcgtggggcggagatcctcccgcgacagtttgaggaaatctgggaacggtgtggtgggatacagtatctacagaacgcgatcgagagtcgccaggctcgcccaacttacgctaccgccatgctacaaagcttgctgaaatag

SEQ ID NO: 151781 - DNA, 3858 bp, Artificial Sequence
  derived and/or modified sequence
atggaagacgggaaaccagtatgggccccccatcctactgatggatttcagatgggaaatatcgtcgacatagggccggatagcttgacaatcgaacctctcaatcagaaggggaaaaccttcctcgccctaattaaccaggttttcccggccgaagaggactccaagaaggatgtggaagacaactgttcactcatgtacttaaatgaggcgaccttgttgcataatattaaagtgaggtacagtaaggacaggatttatacctacgtggctaacattctgatcgctgtgaacccttattttgatatccccaaaatttactcctcggaggccataaagagttatcagggaaaaagtctcggaacaagaccccctcacgtcttcgccatagctgacaaagcatttcgtgatatgaaagtcctgaagatgtcccaaagcattatagtctctggggagtcaggggctggaaagacagaaaatacaaaattcgttttgcgataccttactgagtcatacgggactgggcaggatatagacgataggatcgtggaggcaaatccactactggaggccttcggaaacgccaagacggtacgcaacaacaactcgtccagattcggcaaattcgtcgaaatacactttaatgaaaaatccagcgtagtcggaggctttgtgtcacactaccttctggaaaagagtcgcatatgcgtccaaggcaaggaggaacgcaattaccacatcttttataggctgtgtgccggagcttcagaagacataagggagaagctgcatctgagttcccccgacaattttcgttatcttaatagaggatgcaccaggtacttcgccaacaaagaaactgacaagcagatcttgcagaatcgtaagagtcctgagtatctgaaagccggatctatgaaagacccgctgctagatgaccatggcgattttatccggatgtgtacggccatgaagaaaattggtttggatgacgaggagaagctagacctgtttcgggtggtggccggcgtgcttcatctggggaacatcgactttgaagaggccggatcaacttcgggcggttgcaatctcaagaataaatccgcccagtctctcgaatactgcgccgaactgttgggcttggaccaagatgatcttagggtttcactgacaaccagggtgatgcttactacggcaggaggtacgaaaggcactgtgattaaggtgcccctgaaggtggagcaggcaaacaacgccagagatgctctggcaaagactgtgtacagtcacctcttcgaccacgttgtcaatcgggtgaatcagtgctttccctttgaaacatcttcttattttataggagttctcgacattgcgggattcgagtattttgagcacaattctttcgagcagttttgtataaattactgtaatgaaaagcttcagcaatttttcaatgaaagaatactgaaagaagaacaggaactgtaccagaaagagggcctcggcgtcaatgaggtccattacgtcgataatcaggattgtattgacctcatcgaggccaaactcgtgggtattctcgacatactggacgaggaaaaccgccttccccagccctccgaccagcatttcacaagcgccgtccaccaaaaacataaggatcacttcagactgaccatcccccgcaaaagcaagctagctgtccaccggaatatccgagacgacgagggttttattatcagacattttgcaggggcagtctgttatgaaaccacacaatttgtagaaaaaaataacgacgcattacacatgtctctggaatccctgatttgcgagtctagggacaagtttatccgggaactgttcgagagcagtacaaataataacaaagacacaaagcagaaagctggcaaactatcattcatctcggtgggaaacaaattcaaaacacagcttaatctcctcctagacaaattgcgatctacgggagcttctttcattaggtgcatcaagccaaatctcaaaatgacgtcccatcactttgaaggggcccagattctaagtcagctccagtgttccggcatggtgtcagtactggatttaatgcagggaggctatccctctcgcgcgtctttccatgaactgtacaatatgtataaaaaatatatgcctgacaaattagcacgcctggatcccagacttttttgtaaagcactgtttaaggcactgggcctcaatgaaaatgactataagtttggcctgacgaaggtattctttcgcccagggaaattcgcagagtttgatcaaatcatgaaaagtgatcccgaccatctggcagagcttgtgaaaagagtaaatcattggctgacgtgctccaggtggaagaaagtacagtggtgcagtctttctgtgatcaagctcaagaataagattaagtaccgggcagaagcttgcatcaagatgcagaaaaccatccggatgtggttgtgtaaaagaaggcacaagccccgaatcgatgggctggtgaaggtggggacactgaaaaagaggttagataaatttaatgaggtggtgtctgtgcttaaagatggaaaacccgaaatgaacaaacaaataaaaaatttggaaatctcaatcgatacgttaatggcaaagatcaagtccactatgatgactcaagagcagattcagaaagaatacgacgcgctggtaaagagctccgaggaactcctgagcgcactccaaaaaaaaaaacagcaggaggaggaggcagagagactgagacgaattcaggaagagatggagaaggaaaggaagcggcgcgaggaggatgaaaagagaaggagaaaagaagaagaggagaggagaatgaagctggaaatggaggccaagaggaaacaggaggaggaggagcgtaagaagcgcgaagatgatgagaaaagaatccaggctgaggtggaagcccagctggcaagacagaaagaggaagagtctcaacagcaggccgttctggagcaagagaggagggatagagagctggccctgaggatagctcagagcgaagcagagcttatatcagacgaggcccaggctgacctagcattgaggcggaatgatgggactaggcccaaaatgactccagaacagatggcgaaggagatgtcagaatttctcagcagaggccccgccgttttagctaccaaggcggctgccggtaccaagaaatatgatctctccaaatggaaatatgccgagctaagggatacgattaatacttcctgtgatatcgaattgctagccgcctgcagagaggagtttcatcggcgcctaaaagtgtatcacgcctggaagtcaaagaacaagaagaggaatacggagactgagcagagggcccccaaatcagtcactgactatgactttgcacctttcctgaacaactctccccagcagaatcctgctgcgcagataccagctaggcaacgcgagatagaaatgaacagacagcaacgattttttcgcataccctttatcaggcctgccgaccagtacaaggatccgcagtctaagaaaaaaggctggtggtacgcgcactttgacggtccctggatcgcacgccagatggaactgcacccggataaacctccaatacttctcgtagctggaaaggatgacatggagatgtgtgagctcaatctggaggagaccggtctgacccgcaagagaggagccgaaatcttgcctcggcaattcgaggaaatctgggagagatgtggcggaatccagtacctgcagaatgctatcgagtctcgtcaagcgcggccaacttacgccacagccatgttacaatcacttctgaaatag

SEQ ID NO: 151782 - DNA, 3861 bp, Artificial Sequence
  derived and/or modified sequence
atggaggacggcaaaccagtctgggccccacacccaaccgacggatttcagatgggtaatatagtcgacatcgggccagattcactgacaatagagcccctgaaccagaaagggaaaactttcctggctctcattaaccaggtcttccccgccgaggaagatagtaaaaaagacgttgaagacaactgcagtctgatgtacttgaatgaggccactctcctccacaacataaaagtacgatacagtaaggataggatttacacctatgtggccaacatcttgatcgccgtaaatccctattttgatattccaaaaatttactcatccgaagccatcaaatcataccagggaaagtcactggggactcgacctcctcacgtgtttgccatagctgataaggcattccgcgatatgaaagtgctaaagatgtcacagtccattatcgtgtctggcgaatcgggagcaggcaagactgagaatacaaagttcgtgctaaggtacctgaccgaatcttacggcaccggccaagacatcgatgaccgtattgttgaggctaaccctctcttggaggccttcggaaatgccaaaaccgtgcgcaataataatagttcgcggttcggcaagtttgtagaaattcactttaatgagaaatcgtcagtcgtgggaggattcgttagccactatcttttagagaaaagccgaatttgtgtgcaggggaaagaggagcggaattaccacatcttttaccgactatgcgcaggggcttcagaggatatccgcgaaaagcttcatctgtctagtccagacaactttcgatatttgaacagggggtgcactcgatatttcgccaataaggaaacagataagcaaatccttcagaatcgcaaaagccccgagtacttgaaagctgggagcatgaaagatcctctactggacgaccacggtgatttcataaggatgtgcactgcgatgaagaaaataggattagacgatgaagagaaacttgaccttttccgagtggtcgctggcgttcttcacctcggaaacatagattttgaagaggctggatccacttccggcgggtgcaacctgaagaataagtcagcacaaagccttgagtactgcgccgagcttctgggactagatcaggatgacttgcgggtatcacttaccacccgggtaatgcttaccacagccggcggaactaaggggacagtgataaaagtaccactgaaggtggaacaggccaataatgctagggacgccctggctaaaactgtttacagccacttgtttgaccatgtagtgaatagggttaaccagtgcttcccatttgaaacctcatcctatttcatcggggtgctcgatatcgctggcttcgagtattttgaacacaacagtttcgagcagttttgcatcaactactgtaatgagaaactgcagcagtttttcaatgaaagaatcctaaaagaggaacaggagctatatcagaaggaaggcctgggggtgaatgaggtgcattatgtggataaccaggattgtatcgatctaatcgaagccaagctcgtaggcattcttgatatcttggatgaggagaatcgcttacctcagcccagcgatcagcatttcacaagcgccgtgcatcaaaagcataaagaccattttaggctgaccatcccccgcaaaagtaaattggctgtgcatcgcaatatccgcgacgacgaagggtttatcattagacactttgctggagccgtctgctatgagaccacgcaatttgtagagaaaaacaatgatgctctccacatgtctctggagtccctgatttgtgaaagcagagacaaattcattagggagctgtttgaatcaagtactaataataacaaggacaccaagcagaaggcagggaaactgtcctttatttcagttgggaataaatttaagactcaacttaacctcctgctggataagctacgatccacaggcgcttctttcattcggtgcattaagcctaatctcaagatgacatcccaccactttgaaggcgcccagatcctgtctcaactgcaatgtagtggcatggtatctgtgctcgatctgatgcaggggggatacccctcccgagcgtcttttcacgagctctataatatgtacaaaaagtatatgccggataagctggcgaggctggatccgcgattattctgtaaagcacttttcaaggcactcgggcttaatgaaaatgactataagttcgggcttaccaaggtctttttcagacccggcaagtttgctgaatttgaccagatcatgaagtccgaccctgaccacttggcagagctggtaaagagggtcaatcattggctgacatgtagcagatggaagaaggttcaatggtgctccctgagcgtaatcaaacttaagaacaaaataaaatatcgggcggaggcatgcatcaaaatgcagaagactatcagaatgtggctttgcaaaagacgacataagccacggattgatggcctggtcaaggtggggaccctgaagaagcgacttgacaagttcaatgaagtggtgagtgtgcttaaagacgggaagccagagatgaacaagcaaataaagaacctcgagatttctatagacaccttgatggccaagatcaagagcactatgatgacacaagagcagattcaaaaggagtatgatgctctggttaagtccagcgaagagctgctgagtgcacttcagaagaagaaacagcaagaggaagaggccgaacggctgagaaggattcaagaggagatggagaaggagcgtaaacgccgcgaagaggacgagaaacggcgccggaaagaggaggaggaaagaagaatgaagctggaaatggaagcaaagagaaaacaggaggaggaagaaaggaaaaaacgcgaggatgacgagaagcgtatacaggcggaggtagaggctcagctggcccgtcagaaggaggaagagtcccagcagcaggccgtgctggaacaggaaagaagggatcgcgagctggcgttgcgcatagcccagtccgaagccgagctcattagcgacgaagcccaagctgatttggctcttcggaggtacctcgactcttacccagtcacctctaagaacgacggcacccggccgaagatgacccccgagcaaatggccaaagagatgtcagaatttctgtcaaggggaccagctgtcttagctacaaaagcagccgctggaacaaagaagtatgacttgtccaaatggaagtatgcggaacttagagacactatcaacacctcctgcgacattgagttgttggccgcatgtcgggaagagttccatagaaggttgaaagtgtaccacgcatggaagtccaaaaacaaaaaacggaatacggaaacggagcagagggcacctaaatcagtgaccgactatgcccagcaaaacccagcagcccagattcccgcgcgccagagggaaatagaaatgaaccgacaacagcgcttcttccggattccctttatacgacctgctgatcagtataaggatccgcagtcaaagaaaaaaggatggtggtacgctcacttcgacgggccatggatcgccagacagatggagctgcaccccgataagccccccatcctcctggttgctgggaaagacgatatggaaatgtgcgagctgaacttggaggaaacaggcctgacccgaaagaggggtgccgagatcctcccccgccaattcgaggagatctgggagcgatgcggcggcatccagtacctacaaaacgctatcgaatccagacaggcaaggccaacatatgcgacagctatgttgcagtctcttctgaaatag

SEQ ID NO: 151783 - DNA, 3789 bp, Artificial Sequence
  derived and/or modified sequence
atggaagatggcaagccagtgtgggcacctcatccaacagacggctttcagatgggcaacatcgtagatattgggcccgacagcctgacaatcgaacccctgaatcagaagggcaagaccttccttgctctgattaatcaagtttttcccgccgaggaggactcaaagaaggacgtcgaggataactgcagtctgatgtatcttaatgaggcgacccttctccacaatattaaggtccgctattctaaggaccgtatttacacctacgtagctaacattttgatcgctgtcaacccttattttgatatccccaaaatctattcttctgaggccattaaatcctaccaaggaaaatctttaggaaccagacctcctcacgtttttgccattgccgataaggccttcagagacatgaaagtgctcaaaatgtcccagtccatcattgtttctggcgaatctggtgcaggcaagacagaaaacacaaagttcgtgttgaggtacctgacagagtcctatggaaccggacaggacatcgatgaccgaatagttgaagctaacccattgctcgaggcttttgggaacgcaaagacggttcgcaataacaattccagcagatttggaaaattcgtcgaaatacacttcaatgaaaagtcatccgtggtgggcggatttgtcagccactaccttttggagaaatcacgaatctgcgtccagggaaaagaggagcggaactatcacatattttaccgactctgtgccggcgcatctgaggacataagggagaaactacacctttcctccccagacaattttaggtacttaaatagaggttgcacccggtattttgccaacaaagaaaccgacaagcagatcctgcagaataggaaatctcctgagtacctcaaagctggttcaatgaaggatccattgcttgacgaccacggtgatttcattagaatgtgtactgctatgaagaagatcggcctggatgatgaggagaagctggatttatttcgcgtggtggcaggagtgctccaccttggcaatatcgatttcgaagaggccggttctaccagcggaggctgcaacctgaagaataaaagcgcgcaaagcctggaatattgtgcggaactgctcgggctagaccaagacgatctccgggtgtccttgacgacccgagttatgctgaccacagccgggggcactaagggcaccgtaatcaaggtgcccctgaaagttgagcaggccaacaacgccagagacgccctggctaagacagtgtactcacacctctttgaccacgttgtgaatcgtgttaatcaatgctttccattcgaaactagtagttacttcatcggcgtgctggatatcgctggtttcgaatatttcgagcataattcatttgagcagttctgtatcaattactgcaacgagaaattgcagcagttctttaacgagcgaatcctcaaggaagagcaggaactgtaccagaaagaaggtcttggagttaacgaggtacactacgtggacaatcaggactgcatcgacctaatcgaagcaaagctcgtgggaatcttagatattcttgatgaagaaaatcgactgcctcagccatcagatcagcatttcaccagtgccgttcatcagaaacataaggatcactttcggctcacaattccaaggaaaagtaaacttgccgtccaccgaaatattcgagacgatgagggctttatcatcagacactttgccggggccgtctgctatgagaccacccaatttgtcgaaaaaaataacgacgctcttcacatgtctctcgaatcactgatatgcgagagccgggataagtttatccgggagctgttcgagtcctccaccaacaacaacaaggatacaaagcagaaggccggaaagttgagtttcatcagtgtcggcaataagttcaaaactcaactgaatctcctgcttgacaaattgaggtctaccggggcaagctttatcaggtgtataaagcccaacttaaagatgacctctcaccatttcgagggagctcagatcctgagccagttgcagtgtagcggaatggtatctgtgctggaccttatgcagggtggatatcctagccgggcatcgttccacgaactttacaacatgtataaaaagtatatgccggataaactggccaggcttgacccacgcctcttttgcaaggctcttttcaaagcattgggtttaaacgagaatgattacaaattcggactgacaaaggtcttttttaggcccggcaagttcgccgaatttgaccagatcatgaaaagtgatccagaccacctggctgaactagtaaaacgcgtgaatcactggctgacatgtagccgctggaaaaaagtccagtggtgcagcctaagtgtgatcaaattgaagaacaaaatcaaatatagggcggaggcttgcattaagatgcagaagaccattcgcatgtggctgtgtaagagacggcacaaacctagaatagatggactggtgaaagtagggacactcaagaaacgcctagacaaatttaacgaggtggtgtccgttctgaaggacggcaaaccggaaatgaacaagcagatcaaaaatcttgagattagtatcgacaccttgatggcaaagatcaagtctaccatgatgacgcaggagcagatccagaaagaatacgacgccttagttaagtcatcagaggaactcttgagcgctctccagaagaaaaaacagcaggaggaagaggctgaaaggctacgacgaattcaagaggagatggagaaagaacggaaaagacgggaggaggacgaaaagaggaggcggaaagaagaggaagaaaggagaatgaagctagaaatggaagcaaagagaaaacaggaggaagaagaaagaaagaaacgtgaggatgacgaaaaacgaatccaggccgaagtcgaggcgcagctggctagacagaaggaggaggaatcacagcagcaggcggtcttagagcaagagcggcgcgatcgcgagctcgccctgcggatcgcccagagcgaagccgaactcatctctgacgaggcccaagccgacctggctctgcgccggggtcccgcagtgctggctactaaagccgctgcaggcacaaagaagtatgacctgagcaagtggaagtacgcagagttgagggatactattaacacctcatgcgatatcgagctgttggccgcatgcagggaggagtttcaccgacggctgaaagtctatcatgcatggaagtcaaagaacaaaaaacgtaataccgaaacggagcaacgggcacccaagtcagtgacggactatgacttcgccccctttctaaacaacagccctcagcagaatcccgcagcacaaattccagccaggcagagggaaattgaaatgaacaggcaacagagattctttaggatcccattcattagacctgccgaccagtacaaggatcctcagagcaaaaagaagggctggtggtacgcacacttcgatggaccctggattgctagacagatggaactgcaccctgacaagcctcccatccttctcgtagcaggtaaggatgacatggagatgtgcgaactgaatttggaggaaactggtctgacacgcaagcgaggtgccgagatactgccacgacagtttgaagagatctgggagagatgcggaggcattcagtatctgcagaatgcgattgagagcagacaggcaaggcctacttatgcgacggcgatgctgcaatctctgctgaagtag

SEQ ID NO: 151784 - DNA, 3888 bp, Artificial Sequence
  derived and/or modified sequence
atggaagatggaaagcctgtctgggcccctcatccgactgatggatttcagatggggaacattgtggacattggcccggattccctcacaatagagcccttaaaccaaaaaggaaagacgttcctcgcgctgataaatcaggtgttcccagctgaagaggatagcaaaaaagatgtagaggacaattgctccctcatgtatttgaacgaggcaaccctcctccacaatattaaggtgcgatactccaaagataggatttacacttatgtggcaaacatacttatcgcagtgaacccttatttcgatattccaaagatatacagctccgaagccattaagtcctaccagggcaaatcactcggcaccagaccgccacacgtattcgccatcgctgataaagccttcagggatatgaaagtgctgaaaatgagccagtcaattattgttagtggcgagtcgggagcgggcaaaaccgaaaatacgaaatttgtattgagatatctgacagaaagttatggtaccggtcaggacatcgatgatagaattgtggaggctaacccacttctggaagcattcgggaacgcgaaaactgttagaaataataatagttctcggttcggaaagtttgttgagattcactttaatgagaagagcagtgtcgtgggggggtttgtaagtcattatctcctcgagaaaagcaggatctgtgttcagggtaaagaggaaaggaactaccatatcttctatagactgtgcgctggcgcgtccgaagatataagggagaagctgcacctttcctctccggacaactttaggtacctcaaccgaggatgtacgcgctatttcgcgaataaggagacagacaagcagatcctccaaaacaggaaaagccccgagtacctgaaagctggatctatgaaagatccactgttggatgaccacggtgacttcatacggatgtgtactgccatgaaaaaaattggactcgatgatgaagagaaactggatttgttccgagtggtggcaggggtgctacacctgggaaatatcgacttcgaagaagctggcagtacaagtggggggtgtaacctcaaaaataagtctgcacagtctctggagtactgtgctgagctgttgggacttgatcaggacgaccttcgcgtatccctgaccacccgcgtgatgttaactactgcagggggtaccaaaggcacagtcatcaaagtgcctctgaaggtggagcaggccaacaatgcccgcgacgccctcgcaaagacagtgtacagtcacctcttcgatcatgtggttaatagagtgaaccaatgcttccccttcgaaaccagttcttattttatcggagttctggatatcgcaggttttgaatacttcgagcataattccttcgaacagttttgcattaactattgcaacgaaaagctgcaacaattcttcaacgaacgaattctcaaggaagagcaggaactctatcaaaaagagggccttggggtgaacgaagtgcattatgtggataaccaagactgcattgatttgatcgaggctaaactggttgggattctcgacattctggacgaggagaacagactaccacagccaagcgatcaacacttcacctccgccgtccatcagaagcataaagatcacttcaggctgaccatcccacgtaagagtaagctcgccgtgcacaggaatattcgggacgatgaagggtttattatccgccactttgccggggctgtgtgctacgaaacaacccagttcgtggaaaagaacaacgacgcacttcacatgagcctagaatccctgatatgcgaatccagggataaatttatcagagagctgttcgaatcttccacaaacaacaataaggacacgaagcagaaagccggcaaattgtctttcatcagtgtggggaataagttcaagacccaactgaacctcttactcgacaagctgagatccacaggagccagtttcattaggtgtattaaacccaatctaaagatgacttcacatcacttcgaaggagcgcaaattctgtcccagctgcaatgttctgggatggtgagtgtgcttgatctcatgcagggtggctacccttctcgggcaagcttccacgagttatacaatatgtacaagaagtatatgcccgataaactagcccgcttggacccccgcctgttttgtaaagccctttttaaggcactgggcctgaacgagaacgactacaaattcggcctaactaaagtgtttttcagaccaggcaaatttgcggagtttgatcaaattatgaagtccgaccctgatcacctcgctgaactcgtaaaacgagtgaaccactggctaacctgttcaagatggaagaaggtccagtggtgctccttatctgtcattaaattaaagaacaaaattaaatatagagccgaggcctgcatcaagatgcagaaaaccatacgcatgtggctctgcaagcggcgtcacaagccgaggatcgacggccttgtgaaggtgggcaccctgaagaaacgccttgataagttcaatgaagtggtgagtgtcctgaaggacggtaagcctgagatgaataaacagatcaaaaacttggaaatcagcattgacacactgatggcgaagataaaatcaaccatgatgacgcaggaacagattcagaaagagtatgacgccctggtgaaatcctcagaagaactgttatccgctctgcagaaaaagaagcaacaggaggaggaagcagaaagattaaggaggattcaggaggaaatggagaaggagagaaagagacgagaggaagatgagaagcgccgacggaaggaggaagaggagcggagaatgaaattggagatggaagctaaaagaaagcaagaagaagaagaaagaaaaaagcgcgaagacgacgaaaaacgcatccaagcagaagtggaagcccagctggcgagacaaaaagaggaggaaagccagcaacaggccgtgctggagcaagaaaggagagatcgggaactcgcactacgaatcgcccagagtgaagccgaactgataagcgatgaagcacaggcagatctggctctgagaaggtatctggatagttaccctgtgacctccaaaaatgacggcacccgacccaaaatgaccccagaacaaatggcgaaagagatgtctgagttcctcagtcgcgggcccgccgtgcttgcaaccaaggccgccgccgggactaagaagtacgatctgagcaaatggaagtatgccgagcttagggacactatcaacacgagctgtgacatcgagctgttggccgcttgcagggaagagttccatagacggctcaaggtgtatcacgcgtggaaatcaaagaataagaaacggaatactgagacagagcagagggcacctaagtccgtgacagattacgattttgcccctttcctgaacaattcacctcagcagaaccccgcagctcagatacctgcccgacagagagagatcgaaatgaataggcaacagcgattctttcgcattcccttcattcggcccgctgaccagtacaaggacccccagtctaagaaaaagggatggtggtacgctcacttcgacggcccgtggattgcccgacagatggagctccacccagataagcctcccatactgttggtggcaggaaaagatgacatggagatgtgcgagctgaatcttgaggaaactggcctgacccggaagcggggggcagagattctaccacgacaattcgaggagatttgggagagatgcggcgggatccagtacttgcagaacgctatcgagtcacggcaggctcgtccaacgtatgccacagccatgctgcaatcccttcttaaatag

SEQ ID NO: 151785 - DNA, 3762 bp, Artificial Sequence
  derived and/or modified sequence
atggaggatggcaagcctgtgtgggccccccaccccacagatggcttccagatgggcaacatcgtggacatcggccctgacagcctgaccatcgagcccctgaaccagaagggcaagaccttcctggccctgatcaaccaggtgtttcctgctgaggaggacagcaagaaggatgtggaggacaactgcagcctgatgtacctgaatgaggccaccctgctgcacaacatcaaggtgcgctacagcaaggaccgcatctacacctacgtggccaacatcctgattgctgtgaacccctactttgacatccccaagatctacagcagcgaggccatcaagagctaccagggcaagagcctgggcacccggcccccccacgtgtttgccatcgctgacaaggccttccgggacatgaaggtgctgaagatgagccagagcatcatcgtgtctggagagagcggggccggcaagacagagaacaccaagtttgtgctgcgctacctgacagagagctatggcaccggccaggacattgatgaccgcatcgtggaggccaaccccctgctggaggcctttggaaatgccaagacagtgaggaacaacaacagcagcagatttgggaagtttgtggagatccacttcaatgagaagagctctgtggtgggcggctttgtgagccactacctgctggagaagagccgcatctgtgtgcagggcaaggaggagaggaactaccacatcttctaccgcctgtgtgccggggccagcgaggacatccgggagaagctgcacctgagcagcccagacaacttccgctacctgaacagaggctgcacccgctactttgccaacaaggagacagacaagcagatcctgcagaacaggaagagccctgagtacctgaaggccggctccatgaaggaccccctgctggatgaccacggggacttcatccgcatgtgcacagccatgaagaagattggcctggatgatgaggagaagctggacctcttccgggtggtggccggcgtgctgcacctgggcaacatcgactttgaggaggccggcagcaccagcggcggctgcaacctgaagaacaagagcgcccagagcctggagtactgtgccgagctgctgggcctggaccaggatgacctgcgggtgtccctgaccaccagggtgatgctgaccacagctgggggcaccaagggcaccgtcatcaaggtgcccctgaaggtggagcaggccaacaatgccagagatgccctggccaagacagtgtacagccacctgtttgaccacgtggtgaacagagtgaaccagtgcttcccctttgagaccagcagctacttcatcggcgtgctggacattgctggctttgagtactttgagcacaacagctttgagcagttctgcatcaactactgcaatgagaagctgcagcagttcttcaatgaaagaatcctgaaggaggagcaggagctgtaccagaaggagggcctgggcgtgaatgaggtgcactacgtggacaaccaggactgcatcgacctgattgaggccaagctggtgggcatcctggacatcctggatgaggagaaccggctgccccagcccagcgaccagcacttcaccagcgctgtgcaccagaagcacaaggaccacttccggctgaccatccccaggaagagcaagctggccgtgcacaggaacatcagagatgatgagggcttcatcatccgccactttgctggagctgtgtgctatgagaccacccagtttgtggagaagaacaatgatgccctgcacatgagcctggagagcctcatctgtgagagccgggacaagttcatccgggagctgtttgagagcagcaccaacaacaacaaggacaccaagcagaaggccggcaagctgtccttcatctctgtgggcaacaagttcaagacccagctgaacctgctgctggacaagctgcggagcactggagccagcttcatccgctgcatcaagcccaacctgaagatgaccagccaccactttgagggcgcccagatcctgagccagctgcagtgcagcggcatggtgtctgtgctggacctgatgcagggcggctaccccagccgggccagcttccacgagctgtacaacatgtacaagaagtacatgccagacaagctggcccggctggaccccaggctcttctgcaaggccctcttcaaggccctgggcctgaatgaaaatgactacaagtttggcctgaccaaggtgttcttccggcctgggaagtttgctgagtttgaccagatcatgaagagtgaccctgaccacctggccgagctggtgaagagggtgaaccactggctgacctgcagccgctggaagaaggtgcagtggtgcagcctgagcgtcatcaagctgaagaacaagatcaagtacagagctgaggcctgcatcaagatgcagaagaccatccgcatgtggctgtgcaagagaagacacaagcccagaattgatggcctggtgaaggtgggcaccctgaagaagaggctggacaagttcaatgaggtggtgtctgtgctgaaggatggcaagccagagatgaacaagcagatcaagaacctggagatcagcattgacaccctgatggccaagatcaagagcaccatgatgacccaggagcagatccagaaggagtatgatgccctggtgaagagcagcgaggagctgctgagcgccctgcagaagaagaagcagcaggaggaggaggccgagcggctgcggcgcatccaggaggagatggagaaggagaggaagagaagagaggaggatgagaagagaagaaggaaggaggaggaggagaggaggatgaagctggagatggaggccaagaggaagcaggaggaggaggagaggaagaagagagaagatgatgagaagaggatccaggccgaggtggaggcccagctggcccggcagaaggaggaggagagccagcagcaggccgtgctggagcaggagcggcgggaccgggagctggccctgcgcatcgcccagagcgaggccgagctgatcagtgatgaggcccaggccgacctggccctgcggcggggccctgctgtgctggccaccaaggctgctgctggcaccaagaagtatgacctgagcaagtggaagtatgcagagctgcgggacaccatcaacaccagctgtgacatcgagctgctggccgcctgccgggaggagttccaccggcggctgaaggtgtaccacgcctggaagagcaagaacaagaagaggaacacagaaacagagcagagggcccccaagtctgtgacagattatgcccagcagaacccagctgcccagatcccagcccggcagcgggagattgagatgaaccggcagcagcgcttcttccgcatccccttcatccggcctgctgaccagtacaaggacccccagagcaagaagaagggctggtggtacgcccactttgatggcccctggatcgcccggcagatggagctgcacccagacaagccacccatcctgctggtggccggcaaggatgacatggagatgtgtgagctgaacctggaggagaccggcctgaccaggaagagaggagctgagatcctgccccggcagtttgaggagatctgggagcgctgtggcggcatccagtacctgcagaatgccatcgagagccggcaggcccggcccacctacgccacagccatgctgcagagcctgctgaagtag

SEQ ID NO: 151786 - DNA, 3858 bp, Artificial Sequence
  derived and/or modified sequence
atggaggatggcaagcctgtgtgggccccccaccccacagatggcttccagatgggcaacatcgtggacatcggccctgacagcctgaccatcgagcccctgaaccagaagggcaagaccttcctggccctgatcaaccaggtgtttcctgctgaggaggacagcaagaaggatgtggaggacaactgcagcctgatgtacctgaatgaggccaccctgctgcacaacatcaaggtgcgctacagcaaggaccgcatctacacctacgtggccaacatcctgattgctgtgaacccctactttgacatccccaagatctacagcagcgaggccatcaagagctaccagggcaagagcctgggcacccggcccccccacgtgtttgccatcgctgacaaggccttccgggacatgaaggtgctgaagatgagccagagcatcatcgtgtctggagagagcggggccggcaagacagagaacaccaagtttgtgctgcgctacctgacagagagctatggcaccggccaggacattgatgaccgcatcgtggaggccaaccccctgctggaggcctttggaaatgccaagacagtgaggaacaacaacagcagcagatttgggaagtttgtggagatccacttcaatgagaagagctctgtggtgggcggctttgtgagccactacctgctggagaagagccgcatctgtgtgcagggcaaggaggagaggaactaccacatcttctaccgcctgtgtgccggggccagcgaggacatccgggagaagctgcacctgagcagcccagacaacttccgctacctgaacagaggctgcacccgctactttgccaacaaggagacagacaagcagatcctgcagaacaggaagagccctgagtacctgaaggccggctccatgaaggaccccctgctggatgaccacggggacttcatccgcatgtgcacagccatgaagaagattggcctggatgatgaggagaagctggacctcttccgggtggtggccggcgtgctgcacctgggcaacatcgactttgaggaggccggcagcaccagcggcggctgcaacctgaagaacaagagcgcccagagcctggagtactgtgccgagctgctgggcctggaccaggatgacctgcgggtgtccctgaccaccagggtgatgctgaccacagctgggggcaccaagggcaccgtcatcaaggtgcccctgaaggtggagcaggccaacaatgccagagatgccctggccaagacagtgtacagccacctgtttgaccacgtggtgaacagagtgaaccagtgcttcccctttgagaccagcagctacttcatcggcgtgctggacattgctggctttgagtactttgagcacaacagctttgagcagttctgcatcaactactgcaatgagaagctgcagcagttcttcaatgaaagaatcctgaaggaggagcaggagctgtaccagaaggagggcctgggcgtgaatgaggtgcactacgtggacaaccaggactgcatcgacctgattgaggccaagctggtgggcatcctggacatcctggatgaggagaaccggctgccccagcccagcgaccagcacttcaccagcgctgtgcaccagaagcacaaggaccacttccggctgaccatccccaggaagagcaagctggccgtgcacaggaacatcagagatgatgagggcttcatcatccgccactttgctggagctgtgtgctatgagaccacccagtttgtggagaagaacaatgatgccctgcacatgagcctggagagcctcatctgtgagagccgggacaagttcatccgggagctgtttgagagcagcaccaacaacaacaaggacaccaagcagaaggccggcaagctgtccttcatctctgtgggcaacaagttcaagacccagctgaacctgctgctggacaagctgcggagcactggagccagcttcatccgctgcatcaagcccaacctgaagatgaccagccaccactttgagggcgcccagatcctgagccagctgcagtgcagcggcatggtgtctgtgctggacctgatgcagggcggctaccccagccgggccagcttccacgagctgtacaacatgtacaagaagtacatgccagacaagctggcccggctggaccccaggctcttctgcaaggccctcttcaaggccctgggcctgaatgaaaatgactacaagtttggcctgaccaaggtgttcttccggcctgggaagtttgctgagtttgaccagatcatgaagagtgaccctgaccacctggccgagctggtgaagagggtgaaccactggctgacctgcagccgctggaagaaggtgcagtggtgcagcctgagcgtcatcaagctgaagaacaagatcaagtacagagctgaggcctgcatcaagatgcagaagaccatccgcatgtggctgtgcaagagaagacacaagcccagaattgatggcctggtgaaggtgggcaccctgaagaagaggctggacaagttcaatgaggtggtgtctgtgctgaaggatggcaagccagagatgaacaagcagatcaagaacctggagatcagcattgacaccctgatggccaagatcaagagcaccatgatgacccaggagcagatccagaaggagtatgatgccctggtgaagagcagcgaggagctgctgagcgccctgcagaagaagaagcagcaggaggaggaggccgagcggctgcggcgcatccaggaggagatggagaaggagaggaagagaagagaggaggatgagaagagaagaaggaaggaggaggaggagaggaggatgaagctggagatggaggccaagaggaagcaggaggaggaggagaggaagaagagagaagatgatgagaagaggatccaggccgaggtggaggcccagctggcccggcagaaggaggaggagagccagcagcaggccgtgctggagcaggagcggcgggaccgggagctggccctgcgcatcgcccagagcgaggccgagctgatcagtgatgaggcccaggccgacctggccctgcggagaaatgatggcacccggcccaagatgaccccagagcagatggccaaggagatgtctgagttcctgagccggggccctgctgtgctggccaccaaggctgctgctggcaccaagaagtatgacctgagcaagtggaagtatgcagagctgcgggacaccatcaacaccagctgtgacatcgagctgctggccgcctgccgggaggagttccaccggcggctgaaggtgtaccacgcctggaagagcaagaacaagaagaggaacacagaaacagagcagagggcccccaagtctgtgacagattatgactttgcccccttcctgaacaacagcccccagcagaacccagctgcccagatcccagcccggcagcgggagattgagatgaaccggcagcagcgcttcttccgcatccccttcatccggcctgctgaccagtacaaggacccccagagcaagaagaagggctggtggtacgcccactttgatggcccctggatcgcccggcagatggagctgcacccagacaagccacccatcctgctggtggccggcaaggatgacatggagatgtgtgagctgaacctggaggagaccggcctgaccaggaagagaggagctgagatcctgccccggcagtttgaggagatctgggagcgctgtggcggcatccagtacctgcagaatgccatcgagagccggcaggcccggcccacctacgccacagccatgctgcagagcctgctgaagtag

SEQ ID NO: 151787 - DNA, 3861 bp, Artificial Sequence
  derived and/or modified sequence
atggaggatggcaagcctgtgtgggccccccaccccacagatggcttccagatgggcaacatcgtggacatcggccctgacagcctgaccatcgagcccctgaaccagaagggcaagaccttcctggccctgatcaaccaggtgtttcctgctgaggaggacagcaagaaggatgtggaggacaactgcagcctgatgtacctgaatgaggccaccctgctgcacaacatcaaggtgcgctacagcaaggaccgcatctacacctacgtggccaacatcctgattgctgtgaacccctactttgacatccccaagatctacagcagcgaggccatcaagagctaccagggcaagagcctgggcacccggcccccccacgtgtttgccatcgctgacaaggccttccgggacatgaaggtgctgaagatgagccagagcatcatcgtgtctggagagagcggggccggcaagacagagaacaccaagtttgtgctgcgctacctgacagagagctatggcaccggccaggacattgatgaccgcatcgtggaggccaaccccctgctggaggcctttggaaatgccaagacagtgaggaacaacaacagcagcagatttgggaagtttgtggagatccacttcaatgagaagagctctgtggtgggcggctttgtgagccactacctgctggagaagagccgcatctgtgtgcagggcaaggaggagaggaactaccacatcttctaccgcctgtgtgccggggccagcgaggacatccgggagaagctgcacctgagcagcccagacaacttccgctacctgaacagaggctgcacccgctactttgccaacaaggagacagacaagcagatcctgcagaacaggaagagccctgagtacctgaaggccggctccatgaaggaccccctgctggatgaccacggggacttcatccgcatgtgcacagccatgaagaagattggcctggatgatgaggagaagctggacctcttccgggtggtggccggcgtgctgcacctgggcaacatcgactttgaggaggccggcagcaccagcggcggctgcaacctgaagaacaagagcgcccagagcctggagtactgtgccgagctgctgggcctggaccaggatgacctgcgggtgtccctgaccaccagggtgatgctgaccacagctgggggcaccaagggcaccgtcatcaaggtgcccctgaaggtggagcaggccaacaatgccagagatgccctggccaagacagtgtacagccacctgtttgaccacgtggtgaacagagtgaaccagtgcttcccctttgagaccagcagctacttcatcggcgtgctggacattgctggctttgagtactttgagcacaacagctttgagcagttctgcatcaactactgcaatgagaagctgcagcagttcttcaatgaaagaatcctgaaggaggagcaggagctgtaccagaaggagggcctgggcgtgaatgaggtgcactacgtggacaaccaggactgcatcgacctgattgaggccaagctggtgggcatcctggacatcctggatgaggagaaccggctgccccagcccagcgaccagcacttcaccagcgctgtgcaccagaagcacaaggaccacttccggctgaccatccccaggaagagcaagctggccgtgcacaggaacatcagagatgatgagggcttcatcatccgccactttgctggagctgtgtgctatgagaccacccagtttgtggagaagaacaatgatgccctgcacatgagcctggagagcctcatctgtgagagccgggacaagttcatccgggagctgtttgagagcagcaccaacaacaacaaggacaccaagcagaaggccggcaagctgtccttcatctctgtgggcaacaagttcaagacccagctgaacctgctgctggacaagctgcggagcactggagccagcttcatccgctgcatcaagcccaacctgaagatgaccagccaccactttgagggcgcccagatcctgagccagctgcagtgcagcggcatggtgtctgtgctggacctgatgcagggcggctaccccagccgggccagcttccacgagctgtacaacatgtacaagaagtacatgccagacaagctggcccggctggaccccaggctcttctgcaaggccctcttcaaggccctgggcctgaatgaaaatgactacaagtttggcctgaccaaggtgttcttccggcctgggaagtttgctgagtttgaccagatcatgaagagtgaccctgaccacctggccgagctggtgaagagggtgaaccactggctgacctgcagccgctggaagaaggtgcagtggtgcagcctgagcgtcatcaagctgaagaacaagatcaagtacagagctgaggcctgcatcaagatgcagaagaccatccgcatgtggctgtgcaagagaagacacaagcccagaattgatggcctggtgaaggtgggcaccctgaagaagaggctggacaagttcaatgaggtggtgtctgtgctgaaggatggcaagccagagatgaacaagcagatcaagaacctggagatcagcattgacaccctgatggccaagatcaagagcaccatgatgacccaggagcagatccagaaggagtatgatgccctggtgaagagcagcgaggagctgctgagcgccctgcagaagaagaagcagcaggaggaggaggccgagcggctgcggcgcatccaggaggagatggagaaggagaggaagagaagagaggaggatgagaagagaagaaggaaggaggaggaggagaggaggatgaagctggagatggaggccaagaggaagcaggaggaggaggagaggaagaagagagaagatgatgagaagaggatccaggccgaggtggaggcccagctggcccggcagaaggaggaggagagccagcagcaggccgtgctggagcaggagcggcgggaccgggagctggccctgcgcatcgcccagagcgaggccgagctgatcagtgatgaggcccaggccgacctggccctgcggcgctacctggacagctaccctgtgaccagcaagaatgatggcacccggcccaagatgaccccagagcagatggccaaggagatgtctgagttcctgagccggggccctgctgtgctggccaccaaggctgctgctggcaccaagaagtatgacctgagcaagtggaagtatgcagagctgcgggacaccatcaacaccagctgtgacatcgagctgctggccgcctgccgggaggagttccaccggcggctgaaggtgtaccacgcctggaagagcaagaacaagaagaggaacacagaaacagagcagagggcccccaagtctgtgacagattatgcccagcagaacccagctgcccagatcccagcccggcagcgggagattgagatgaaccggcagcagcgcttcttccgcatccccttcatccggcctgctgaccagtacaaggacccccagagcaagaagaagggctggtggtacgcccactttgatggcccctggatcgcccggcagatggagctgcacccagacaagccacccatcctgctggtggccggcaaggatgacatggagatgtgtgagctgaacctggaggagaccggcctgaccaggaagagaggagctgagatcctgccccggcagtttgaggagatctgggagcgctgtggcggcatccagtacctgcagaatgccatcgagagccggcaggcccggcccacctacgccacagccatgctgcagagcctgctgaagtag

SEQ ID NO: 151788 - DNA, 3789 bp, Artificial Sequence
  derived and/or modified sequence
atggaggatggcaagcctgtgtgggccccccaccccacagatggcttccagatgggcaacatcgtggacatcggccctgacagcctgaccatcgagcccctgaaccagaagggcaagaccttcctggccctgatcaaccaggtgtttcctgctgaggaggacagcaagaaggatgtggaggacaactgcagcctgatgtacctgaatgaggccaccctgctgcacaacatcaaggtgcgctacagcaaggaccgcatctacacctacgtggccaacatcctgattgctgtgaacccctactttgacatccccaagatctacagcagcgaggccatcaagagctaccagggcaagagcctgggcacccggcccccccacgtgtttgccatcgctgacaaggccttccgggacatgaaggtgctgaagatgagccagagcatcatcgtgtctggagagagcggggccggcaagacagagaacaccaagtttgtgctgcgctacctgacagagagctatggcaccggccaggacattgatgaccgcatcgtggaggccaaccccctgctggaggcctttggaaatgccaagacagtgaggaacaacaacagcagcagatttgggaagtttgtggagatccacttcaatgagaagagctctgtggtgggcggctttgtgagccactacctgctggagaagagccgcatctgtgtgcagggcaaggaggagaggaactaccacatcttctaccgcctgtgtgccggggccagcgaggacatccgggagaagctgcacctgagcagcccagacaacttccgctacctgaacagaggctgcacccgctactttgccaacaaggagacagacaagcagatcctgcagaacaggaagagccctgagtacctgaaggccggctccatgaaggaccccctgctggatgaccacggggacttcatccgcatgtgcacagccatgaagaagattggcctggatgatgaggagaagctggacctcttccgggtggtggccggcgtgctgcacctgggcaacatcgactttgaggaggccggcagcaccagcggcggctgcaacctgaagaacaagagcgcccagagcctggagtactgtgccgagctgctgggcctggaccaggatgacctgcgggtgtccctgaccaccagggtgatgctgaccacagctgggggcaccaagggcaccgtcatcaaggtgcccctgaaggtggagcaggccaacaatgccagagatgccctggccaagacagtgtacagccacctgtttgaccacgtggtgaacagagtgaaccagtgcttcccctttgagaccagcagctacttcatcggcgtgctggacattgctggctttgagtactttgagcacaacagctttgagcagttctgcatcaactactgcaatgagaagctgcagcagttcttcaatgaaagaatcctgaaggaggagcaggagctgtaccagaaggagggcctgggcgtgaatgaggtgcactacgtggacaaccaggactgcatcgacctgattgaggccaagctggtgggcatcctggacatcctggatgaggagaaccggctgccccagcccagcgaccagcacttcaccagcgctgtgcaccagaagcacaaggaccacttccggctgaccatccccaggaagagcaagctggccgtgcacaggaacatcagagatgatgagggcttcatcatccgccactttgctggagctgtgtgctatgagaccacccagtttgtggagaagaacaatgatgccctgcacatgagcctggagagcctcatctgtgagagccgggacaagttcatccgggagctgtttgagagcagcaccaacaacaacaaggacaccaagcagaaggccggcaagctgtccttcatctctgtgggcaacaagttcaagacccagctgaacctgctgctggacaagctgcggagcactggagccagcttcatccgctgcatcaagcccaacctgaagatgaccagccaccactttgagggcgcccagatcctgagccagctgcagtgcagcggcatggtgtctgtgctggacctgatgcagggcggctaccccagccgggccagcttccacgagctgtacaacatgtacaagaagtacatgccagacaagctggcccggctggaccccaggctcttctgcaaggccctcttcaaggccctgggcctgaatgaaaatgactacaagtttggcctgaccaaggtgttcttccggcctgggaagtttgctgagtttgaccagatcatgaagagtgaccctgaccacctggccgagctggtgaagagggtgaaccactggctgacctgcagccgctggaagaaggtgcagtggtgcagcctgagcgtcatcaagctgaagaacaagatcaagtacagagctgaggcctgcatcaagatgcagaagaccatccgcatgtggctgtgcaagagaagacacaagcccagaattgatggcctggtgaaggtgggcaccctgaagaagaggctggacaagttcaatgaggtggtgtctgtgctgaaggatggcaagccagagatgaacaagcagatcaagaacctggagatcagcattgacaccctgatggccaagatcaagagcaccatgatgacccaggagcagatccagaaggagtatgatgccctggtgaagagcagcgaggagctgctgagcgccctgcagaagaagaagcagcaggaggaggaggccgagcggctgcggcgcatccaggaggagatggagaaggagaggaagagaagagaggaggatgagaagagaagaaggaaggaggaggaggagaggaggatgaagctggagatggaggccaagaggaagcaggaggaggaggagaggaagaagagagaagatgatgagaagaggatccaggccgaggtggaggcccagctggcccggcagaaggaggaggagagccagcagcaggccgtgctggagcaggagcggcgggaccgggagctggccctgcgcatcgcccagagcgaggccgagctgatcagtgatgaggcccaggccgacctggccctgcggcggggccctgctgtgctggccaccaaggctgctgctggcaccaagaagtatgacctgagcaagtggaagtatgcagagctgcgggacaccatcaacaccagctgtgacatcgagctgctggccgcctgccgggaggagttccaccggcggctgaaggtgtaccacgcctggaagagcaagaacaagaagaggaacacagaaacagagcagagggcccccaagtctgtgacagattatgactttgcccccttcctgaacaacagcccccagcagaacccagctgcccagatcccagcccggcagcgggagattgagatgaaccggcagcagcgcttcttccgcatccccttcatccggcctgctgaccagtacaaggacccccagagcaagaagaagggctggtggtacgcccactttgatggcccctggatcgcccggcagatggagctgcacccagacaagccacccatcctgctggtggccggcaaggatgacatggagatgtgtgagctgaacctggaggagaccggcctgaccaggaagagaggagctgagatcctgccccggcagtttgaggagatctgggagcgctgtggcggcatccagtacctgcagaatgccatcgagagccggcaggcccggcccacctacgccacagccatgctgcagagcctgctgaagtag

SEQ ID NO: 151789 - DNA, 3888 bp, Artificial Sequence
  derived and/or modified sequence
atggaggatggcaagcctgtgtgggccccccaccccacagatggcttccagatgggcaacatcgtggacatcggccctgacagcctgaccatcgagcccctgaaccagaagggcaagaccttcctggccctgatcaaccaggtgtttcctgctgaggaggacagcaagaaggatgtggaggacaactgcagcctgatgtacctgaatgaggccaccctgctgcacaacatcaaggtgcgctacagcaaggaccgcatctacacctacgtggccaacatcctgattgctgtgaacccctactttgacatccccaagatctacagcagcgaggccatcaagagctaccagggcaagagcctgggcacccggcccccccacgtgtttgccatcgctgacaaggccttccgggacatgaaggtgctgaagatgagccagagcatcatcgtgtctggagagagcggggccggcaagacagagaacaccaagtttgtgctgcgctacctgacagagagctatggcaccggccaggacattgatgaccgcatcgtggaggccaaccccctgctggaggcctttggaaatgccaagacagtgaggaacaacaacagcagcagatttgggaagtttgtggagatccacttcaatgagaagagctctgtggtgggcggctttgtgagccactacctgctggagaagagccgcatctgtgtgcagggcaaggaggagaggaactaccacatcttctaccgcctgtgtgccggggccagcgaggacatccgggagaagctgcacctgagcagcccagacaacttccgctacctgaacagaggctgcacccgctactttgccaacaaggagacagacaagcagatcctgcagaacaggaagagccctgagtacctgaaggccggctccatgaaggaccccctgctggatgaccacggggacttcatccgcatgtgcacagccatgaagaagattggcctggatgatgaggagaagctggacctcttccgggtggtggccggcgtgctgcacctgggcaacatcgactttgaggaggccggcagcaccagcggcggctgcaacctgaagaacaagagcgcccagagcctggagtactgtgccgagctgctgggcctggaccaggatgacctgcgggtgtccctgaccaccagggtgatgctgaccacagctgggggcaccaagggcaccgtcatcaaggtgcccctgaaggtggagcaggccaacaatgccagagatgccctggccaagacagtgtacagccacctgtttgaccacgtggtgaacagagtgaaccagtgcttcccctttgagaccagcagctacttcatcggcgtgctggacattgctggctttgagtactttgagcacaacagctttgagcagttctgcatcaactactgcaatgagaagctgcagcagttcttcaatgaaagaatcctgaaggaggagcaggagctgtaccagaaggagggcctgggcgtgaatgaggtgcactacgtggacaaccaggactgcatcgacctgattgaggccaagctggtgggcatcctggacatcctggatgaggagaaccggctgccccagcccagcgaccagcacttcaccagcgctgtgcaccagaagcacaaggaccacttccggctgaccatccccaggaagagcaagctggccgtgcacaggaacatcagagatgatgagggcttcatcatccgccactttgctggagctgtgtgctatgagaccacccagtttgtggagaagaacaatgatgccctgcacatgagcctggagagcctcatctgtgagagccgggacaagttcatccgggagctgtttgagagcagcaccaacaacaacaaggacaccaagcagaaggccggcaagctgtccttcatctctgtgggcaacaagttcaagacccagctgaacctgctgctggacaagctgcggagcactggagccagcttcatccgctgcatcaagcccaacctgaagatgaccagccaccactttgagggcgcccagatcctgagccagctgcagtgcagcggcatggtgtctgtgctggacctgatgcagggcggctaccccagccgggccagcttccacgagctgtacaacatgtacaagaagtacatgccagacaagctggcccggctggaccccaggctcttctgcaaggccctcttcaaggccctgggcctgaatgaaaatgactacaagtttggcctgaccaaggtgttcttccggcctgggaagtttgctgagtttgaccagatcatgaagagtgaccctgaccacctggccgagctggtgaagagggtgaaccactggctgacctgcagccgctggaagaaggtgcagtggtgcagcctgagcgtcatcaagctgaagaacaagatcaagtacagagctgaggcctgcatcaagatgcagaagaccatccgcatgtggctgtgcaagagaagacacaagcccagaattgatggcctggtgaaggtgggcaccctgaagaagaggctggacaagttcaatgaggtggtgtctgtgctgaaggatggcaagccagagatgaacaagcagatcaagaacctggagatcagcattgacaccctgatggccaagatcaagagcaccatgatgacccaggagcagatccagaaggagtatgatgccctggtgaagagcagcgaggagctgctgagcgccctgcagaagaagaagcagcaggaggaggaggccgagcggctgcggcgcatccaggaggagatggagaaggagaggaagagaagagaggaggatgagaagagaagaaggaaggaggaggaggagaggaggatgaagctggagatggaggccaagaggaagcaggaggaggaggagaggaagaagagagaagatgatgagaagaggatccaggccgaggtggaggcccagctggcccggcagaaggaggaggagagccagcagcaggccgtgctggagcaggagcggcgggaccgggagctggccctgcgcatcgcccagagcgaggccgagctgatcagtgatgaggcccaggccgacctggccctgcggcgctacctggacagctaccctgtgaccagcaagaatgatggcacccggcccaagatgaccccagagcagatggccaaggagatgtctgagttcctgagccggggccctgctgtgctggccaccaaggctgctgctggcaccaagaagtatgacctgagcaagtggaagtatgcagagctgcgggacaccatcaacaccagctgtgacatcgagctgctggccgcctgccgggaggagttccaccggcggctgaaggtgtaccacgcctggaagagcaagaacaagaagaggaacacagaaacagagcagagggcccccaagtctgtgacagattatgactttgcccccttcctgaacaacagcccccagcagaacccagctgcccagatcccagcccggcagcgggagattgagatgaaccggcagcagcgcttcttccgcatccccttcatccggcctgctgaccagtacaaggacccccagagcaagaagaagggctggtggtacgcccactttgatggcccctggatcgcccggcagatggagctgcacccagacaagccacccatcctgctggtggccggcaaggatgacatggagatgtgtgagctgaacctggaggagaccggcctgaccaggaagagaggagctgagatcctgccccggcagtttgaggagatctgggagcgctgtggcggcatccagtacctgcagaatgccatcgagagccggcaggcccggcccacctacgccacagccatgctgcagagcctgctgaagtag

SEQ ID NO: 151790 - DNA, 5387 bp, Artificial Sequence
  derived and/or modified sequence
ggagatcgtggatcctccttcaaaaatggaggatggaaagcccgtttgggcgccacaccctacagatggatttcagatgggcaatattgtggatattggccccgacagcttaacaattgaacccttgaatcagaaaggcaagacatttttggctctcataaaccaagtgtttcctgcagaagaggacagtaaaaaagatgtggaagataactgttcactaatgtatttaaatgaagccacactgctccataatatcaaagttcgatatagtaaagacagaatttatacatatgtcgccaacattctgattgcagtgaatccatactttgacatacctaaaatatattcttcagaagcaataaagtcatatcaaggaaaatctcttgggacaagaccacctcatgtctttgcaattgctgataaagcttttcgagacatgaaggtgctcaagatgagtcagtctatcattgtatctggagaatcaggagccggcaaaacagaaaatacaaaatttgttctaagatacctgactgaatcctatggaacaggtcaagatattgatgacagaattgttgaagctaacccactcctagaagcctttggaaatgcgaagactgttcgcaacaataatagcagtcgatttgggaaatttgtagaaatacattttaatgaaaagagctcagttgttggaggatttgtttcacattatctcctagagaaatctaggatctgtgttcaaggcaaagaggaaagaaattatcatatcttttataggttgtgtgctggtgcttctgaagatattagagaaaaacttcatttgagttcaccagataattttcggtatttaaaccgaggctgcactagatactttgctaacaaagaaactgacaaacagattttacagaaccgcaaaagtcctgagtaccttaaggcaggttctatgaaagatcctctgctagatgaccatggtgattttattagaatgtgcacggctatgaaaaaaattggtttggatgatgaagaaaagcttgatctcttccgggtagtagctggcgtcctgcaccttggaaatattgattttgaggaagctggcagcacttcaggtggttgtaatctgaagaataaatctgctcagtctttggaatattgtgctgaattactgggtttggaccaagatgatcttcgagtaagtttgaccacaagagtcatgctaacaacagcagggggcaccaaaggaacagttataaaggtacctctgaaagtggagcaagcaaacaatgctcgtgatgccctggcaaagacagtgtatagccatctttttgatcatgtggtaaacagagtaaatcagtgttttccttttgaaacatcatcctattttattggagtcctagatattgctggttttgagtactttgagcataacagttttgaacaattttgcatcaactattgcaatgaaaaacttcaacaattttttaatgaaaggattctgaaggaggaacaagaactctatcaaaaagaaggtttaggtgttaatgaagtgcattatgtggataatcaggactgtatagatttaattgaagccaaattagtgggaatactggatattttggatgaagaaaatcgccttccccagccaagtgatcaacactttacatctgcagttcaccaaaagcacaaggatcattttcgactcactattcccagaaaatctaagctggcagttcataggaatatcagagacgacgaaggcttcattatcaggcattttgcgggggcagtgtgctatgaaacaacccagtttgtggagaaaaataatgatgctttacatatgtctcttgaatccttaatatgtgaatccagagataagtttatacgggaattatttgaatcatccacaaataacaacaaagatactaaacaaaaagcaggaaaacttagcttcatcagcgtgggaaacaagtttaagacacagttaaatttgcttctggataaacttcgaagtactggagcaagctttattcgttgcatcaaacctaacttaaagatgacaagccaccactttgaaggtgctcaaattctgtctcagcttcagtgttcagggatggtgtctgttttggacttgatgcagggtggttacccatcacgagcttcatttcatgaactctacaacatgtacaaaaagtatatgccagataaacttgcaagattggatccaagactattttgtaaggctttgtttaaagctttgggcttaaatgaaaatgactacaagtttgggttaaccaaagtattttttagacctggcaagtttgcagaatttgatcagatcatgaagtctgaccctgaccacttagcagagttggttaaaagagtcaatcactggctcacatgcagtcgctggaagaaagttcagtggtgctcactctcagtcatcaaattgaaaaacaaaataaaatatcgagctgaagcctgcattaaaatgcaaaaaactattcgaatgtggctttgcaagaggagacacaaacctcgcattgatggtctggttaaggtgggcacactgaaaaaacgacttgataaatttaatgaggtagtcagtgtgttgaaagatggaaaacccgagatgaataaacagatcaagaatctggaaatttctattgatactttgatggccaaaattaagtccactatgatgacgcaggaacaaatccagaaagaatatgatgcactggttaaaagctcagaggaactcctcagtgcattacagaaaaaaaaacagcaggaagaggaagcagaaaggctgaggcgtattcaagaagaaatggaaaaggaaagaaaaagacgtgaagaagacgaaaaacgtcgaagaaaggaagaggaggaaaggcggatgaaacttgagatggaagcaaagagaaaacaagaagaagaagagagaaagaaaagggaagatgatgaaaaacgcattcaagctgaagtggaggcacagctggcccgacagaaggaggaggaatcccaacagcaagcagttctggagcaggagcgcagggaccgggagctggccctgaggattgcccagagtgaagccgagctcatcagtgatgaggcccaggccgacctggcgctgcggagaggtcctgctgtactagccaccaaagcagctgctggtactaagaaatatgatcttagtaaatggaaatatgcagaactacgtgataccatcaatacttcttgtgatattgagctcctggcagcttgcagagaagaatttcataggagactaaaagtgtatcatgcttggaaatctaagaacaagaagagaaatactgaaacagagcaacgtgctccaaagtctgttactgattatgctcagcaaaacccagcagctcagattcctgccaggcagcgggagattgaaatgaaccgacagcaacgcttcttccgcatcccattcatccgccctgccgaccagtacaaagaccctcagagtaagaaaaaaggctggtggtatgcccattttgatggaccatggattgcccggcaaatggaactccatcctgacaagccacccatcctacttgtggctggtaaggacgacatggagatgtgtgagctgaatcttgaggagactggcctgactcggaagcgtggtgctgagatcttgccaagacagtttgaagaaatctgggaacgctgtggaggcatccagtaccttcagaatgcgattgagagcagacaggctcggcccacctatgcaacagccatgctgcagagtctgttaaagtagatgttgcacaccagccttacagctgggagcctttgccatggtacttaggtagggtgtgtgcccccagatttaaccattccataatcatgttagagttacttctataaagtgaacagattttattaatcacggcttttggtgaatttgtttaaggttaattatggtagcaaattttggacctaaacattatttttctgtatcccgctgtaattcccaaaactctcattattctctaactattacacatgggcatattctgatgtttctcatcctttgccagaagactaccttacatccatcgtaattgttctctaggaaaagagaacttttttcaaaattcaaaatactttttaaggatggcacagtaccatataactggagtaataaaacatgagcttacattcttacaataactaaaccacttaaaatgatcaaggcactaatgttttggtctgaaaagctgtgtactttatagacattttcagacatttttggaaatttccattaaaggtggaaaatctatttttttcctcctttgcagtgtcttagtttgaatgaaacacttcgaagttctagaattctagaaagagccttaatgtatttgatgtattctgtgataagaggtactaatagtatccagcacagatttgcttttctttgctagcacaatgtgtgttgctgtcagaatattctttttatattctgtggaaaaataaaggaaattcagattgtttaaatgcctaaaagttttgagataagttttgtttcaattagaaaaggaaataggttttaggtggcatagtggcttaactggactgaattcaaatattctttcaacttcatctcaatagtgatttttgtatcagaatcttgtccaagttgtttcattgatttagtaagtgttctgcttccaacatctttctttttaagaaattcctagtgtcttttttggcctttgaggttttggtaattgtagacctgtttcataagctttgtaattcagaaatccttgtatttagtaagtgcttgttttacataactgataattttaaaatgttttctttgtgtgctgttagtattgattcaaatgtcagcagctttaagcctaatatttatgactttcacatttggaatttaaagacaaaaatacatcaaggagttatgctgacataattctaaggagttttgttgtattttagaataaaattataaagtaaaatgattctctgtactgctttttcccccagtttttagagaccctaacctttgaaatgaaattccagtgatttcttttttccctagaaagattacctcagttagggaagtatttcccagctgactagtgtttgtgagccacagacactgtcttcagaattgcttctctcatgtcttagtagagaaatatttatttattatgatacattcaaatgattgtcaagttaaattaaatggttgtgtctgtgctattgagaatgcaaatgtgattatcttttgaaggctgtattactgcatagcttcacccaccctcgggtcatttcgtccctgtgattggggacagaaggtgtagctactgaagtaaatgacctattctctctcttcc

SEQ ID NO: 151791 - DNA, 5597 bp, Artificial Sequence
  derived and/or modified sequence
cttcactggccctcatcacttctcaccgcgccctccagcttcacccgtacaggtagccccgccgccgcgcacctgccttcgctcccgcaccggtgacagtggatagtggaaacaggagatcgtggatcctccttcaaaaatggaggatggaaagcccgtttgggcgccacaccctacagatggatttcagatgggcaatattgtggatattggccccgacagcttaacaattgaacccttgaatcagaaaggcaagacatttttggctctcataaaccaagtgtttcctgcagaagaggacagtaaaaaagatgtggaagataactgttcactaatgtatttaaatgaagccacactgctccataatatcaaagttcgatatagtaaagacagaatttatacatatgtcgccaacattctgattgcagtgaatccatactttgacatacctaaaatatattcttcagaagcaataaagtcatatcaaggaaaatctcttgggacaagaccacctcatgtctttgcaattgctgataaagcttttcgagacatgaaggtgctcaagatgagtcagtctatcattgtatctggagaatcaggagccggcaaaacagaaaatacaaaatttgttctaagatacctgactgaatcctatggaacaggtcaagatattgatgacagaattgttgaagctaacccactcctagaagcctttggaaatgcgaagactgttcgcaacaataatagcagtcgatttgggaaatttgtagaaatacattttaatgaaaagagctcagttgttggaggatttgtttcacattatctcctagagaaatctaggatctgtgttcaaggcaaagaggaaagaaattatcatatcttttataggttgtgtgctggtgcttctgaagatattagagaaaaacttcatttgagttcaccagataattttcggtatttaaaccgaggctgcactagatactttgctaacaaagaaactgacaaacagattttacagaaccgcaaaagtcctgagtaccttaaggcaggttctatgaaagatcctctgctagatgaccatggtgattttattagaatgtgcacggctatgaaaaaaattggtttggatgatgaagaaaagcttgatctcttccgggtagtagctggcgtcctgcaccttggaaatattgattttgaggaagctggcagcacttcaggtggttgtaatctgaagaataaatctgctcagtctttggaatattgtgctgaattactgggtttggaccaagatgatcttcgagtaagtttgaccacaagagtcatgctaacaacagcagggggcaccaaaggaacagttataaaggtacctctgaaagtggagcaagcaaacaatgctcgtgatgccctggcaaagacagtgtatagccatctttttgatcatgtggtaaacagagtaaatcagtgttttccttttgaaacatcatcctattttattggagtcctagatattgctggttttgagtactttgagcataacagttttgaacaattttgcatcaactattgcaatgaaaaacttcaacaattttttaatgaaaggattctgaaggaggaacaagaactctatcaaaaagaaggtttaggtgttaatgaagtgcattatgtggataatcaggactgtatagatttaattgaagccaaattagtgggaatactggatattttggatgaagaaaatcgccttccccagccaagtgatcaacactttacatctgcagttcaccaaaagcacaaggatcattttcgactcactattcccagaaaatctaagctggcagttcataggaatatcagagacgacgaaggcttcattatcaggcattttgcgggggcagtgtgctatgaaacaacccagtttgtggagaaaaataatgatgctttacatatgtctcttgaatccttaatatgtgaatccagagataagtttatacgggaattatttgaatcatccacaaataacaacaaagatactaaacaaaaagcaggaaaacttagcttcatcagcgtgggaaacaagtttaagacacagttaaatttgcttctggataaacttcgaagtactggagcaagctttattcgttgcatcaaacctaacttaaagatgacaagccaccactttgaaggtgctcaaattctgtctcagcttcagtgttcagggatggtgtctgttttggacttgatgcagggtggttacccatcacgagcttcatttcatgaactctacaacatgtacaaaaagtatatgccagataaacttgcaagattggatccaagactattttgtaaggctttgtttaaagctttgggcttaaatgaaaatgactacaagtttgggttaaccaaagtattttttagacctggcaagtttgcagaatttgatcagatcatgaagtctgaccctgaccacttagcagagttggttaaaagagtcaatcactggctcacatgcagtcgctggaagaaagttcagtggtgctcactctcagtcatcaaattgaaaaacaaaataaaatatcgagctgaagcctgcattaaaatgcaaaaaactattcgaatgtggctttgcaagaggagacacaaacctcgcattgatggtctggttaaggtgggcacactgaaaaaacgacttgataaatttaatgaggtagtcagtgtgttgaaagatggaaaacccgagatgaataaacagatcaagaatctggaaatttctattgatactttgatggccaaaattaagtccactatgatgacgcaggaacaaatccagaaagaatatgatgcactggttaaaagctcagaggaactcctcagtgcattacagaaaaaaaaacagcaggaagaggaagcagaaaggctgaggcgtattcaagaagaaatggaaaaggaaagaaaaagacgtgaagaagacgaaaaacgtcgaagaaaggaagaggaggaaaggcggatgaaacttgagatggaagcaaagagaaaacaagaagaagaagagagaaagaaaagggaagatgatgaaaaacgcattcaagctgaagtggaggcacagctggcccgacagaaggaggaggaatcccaacagcaagcagttctggagcaggagcgcagggaccgggagctggccctgaggattgcccagagtgaagccgagctcatcagtgatgaggcccaggccgacctggcgctgcggagaaatgatggaacaagacccaaaatgacaccggaacaaatggccaaagaaatgtcagaatttttgagtagaggtcctgctgtactagccaccaaagcagctgctggtactaagaaatatgatcttagtaaatggaaatatgcagaactacgtgataccatcaatacttcttgtgatattgagctcctggcagcttgcagagaagaatttcataggagactaaaagtgtatcatgcttggaaatctaagaacaagaagagaaatactgaaacagagcaacgtgctccaaagtctgttactgattatgattttgcaccatttttgaacaattcacctcagcaaaacccagcagctcagattcctgccaggcagcgggagattgaaatgaaccgacagcaacgcttcttccgcatcccattcatccgccctgccgaccagtacaaagaccctcagagtaagaaaaaaggctggtggtatgcccattttgatggaccatggattgcccggcaaatggaactccatcctgacaagccacccatcctacttgtggctggtaaggacgacatggagatgtgtgagctgaatcttgaggagactggcctgactcggaagcgtggtgctgagatcttgccaagacagtttgaagaaatctgggaacgctgtggaggcatccagtaccttcagaatgcgattgagagcagacaggctcggcccacctatgcaacagccatgctgcagagtctgttaaagtagatgttgcacaccagccttacagctgggagcctttgccatggtacttaggtagggtgtgtgcccccagatttaaccattccataatcatgttagagttacttctataaagtgaacagattttattaatcacggcttttggtgaatttgtttaaggttaattatggtagcaaattttggacctaaacattatttttctgtatcccgctgtaattcccaaaactctcattattctctaactattacacatgggcatattctgatgtttctcatcctttgccagaagactaccttacatccatcgtaattgttctctaggaaaagagaacttttttcaaaattcaaaatactttttaaggatggcacagtaccatataactggagtaataaaacatgagcttacattcttacaataactaaaccacttaaaatgatcaaggcactaatgttttggtctgaaaagctgtgtactttatagacattttcagacatttttggaaatttccattaaaggtggaaaatctatttttttcctcctttgcagtgtcttagtttgaatgaaacacttcgaagttctagaattctagaaagagccttaatgtatttgatgtattctgtgataagaggtactaatagtatccagcacagatttgcttttctttgctagcacaatgtgtgttgctgtcagaatattctttttatattctgtggaaaaataaaggaaattcagattgtttaaatgcctaaaagttttgagataagttttgtttcaattagaaaaggaaataggttttaggtggcatagtggcttaactggactgaattcaaatattctttcaacttcatctcaatagtgatttttgtatcagaatcttgtccaagttgtttcattgatttagtaagtgttctgcttccaacatctttctttttaagaaattcctagtgtcttttttggcctttgaggttttggtaattgtagacctgtttcataagctttgtaattcagaaatccttgtatttagtaagtgcttgttttacataactgataattttaaaatgttttctttgtgtgctgttagtattgattcaaatgtcagcagctttaagcctaatatttatgactttcacatttggaatttaaagacaaaaatacatcaaggagttatgctgacataattctaaggagttttgttgtattttagaataaaattataaagtaaaatgattctctgtactgctttttcccccagtttttagagaccctaacctttgaaatgaaattccagtgatttcttttttccctagaaagattacctcagttagggaagtatttcccagctgactagtgtttgtgagccacagacactgtcttcagaattgcttctctcatgtcttagtagagaaatatttatttattatgatacattcaaatgattgtcaagttaaattaaatggttgtgtctgtgctattgagaatgcaaatgtgattatcttttgaaggctgtattactgcatagcttcacccaccctcgggtcatttcgtccctgtgattggggacagaaggtgtagctactgaagtaaatgacctattctctctcttcc

SEQ ID NO: 151792 - DNA, 8665 bp, Artificial Sequence
  derived and/or modified sequence
gtgcacgccgcagtgccggggactcggcggggcgccggccggcgggcggagaccgactcgggatctgtccgagcaggaagccagcctcagcccggccgctgtcgccgccctgtcctggtgcccgtccgcgtcgtcgccctcttcactggccctcatcacttctcaccgcgccctccagcttcacccgtacaggtagccccgccgccgcgcacctgccttcgctcccgcaccggtgacagtggatagtggaaacaggagatcgtggatcctccttcaaaaatggaggatggaaagcccgtttgggcgccacaccctacagatggatttcagatgggcaatattgtggatattggccccgacagcttaacaattgaacccttgaatcagaaaggcaagacatttttggctctcataaaccaagtgtttcctgcagaagaggacagtaaaaaagatgtggaagataactgttcactaatgtatttaaatgaagccacactgctccataatatcaaagttcgatatagtaaagacagaatttatacatatgtcgccaacattctgattgcagtgaatccatactttgacatacctaaaatatattcttcagaagcaataaagtcatatcaaggaaaatctcttgggacaagaccacctcatgtctttgcaattgctgataaagcttttcgagacatgaaggtgctcaagatgagtcagtctatcattgtatctggagaatcaggagccggcaaaacagaaaatacaaaatttgttctaagatacctgactgaatcctatggaacaggtcaagatattgatgacagaattgttgaagctaacccactcctagaagcctttggaaatgcgaagactgttcgcaacaataatagcagtcgatttgggaaatttgtagaaatacattttaatgaaaagagctcagttgttggaggatttgtttcacattatctcctagagaaatctaggatctgtgttcaaggcaaagaggaaagaaattatcatatcttttataggttgtgtgctggtgcttctgaagatattagagaaaaacttcatttgagttcaccagataattttcggtatttaaaccgaggctgcactagatactttgctaacaaagaaactgacaaacagattttacagaaccgcaaaagtcctgagtaccttaaggcaggttctatgaaagatcctctgctagatgaccatggtgattttattagaatgtgcacggctatgaaaaaaattggtttggatgatgaagaaaagcttgatctcttccgggtagtagctggcgtcctgcaccttggaaatattgattttgaggaagctggcagcacttcaggtggttgtaatctgaagaataaatctgctcagtctttggaatattgtgctgaattactgggtttggaccaagatgatcttcgagtaagtttgaccacaagagtcatgctaacaacagcagggggcaccaaaggaacagttataaaggtacctctgaaagtggagcaagcaaacaatgctcgtgatgccctggcaaagacagtgtatagccatctttttgatcatgtggtaaacagagtaaatcagtgttttccttttgaaacatcatcctattttattggagtcctagatattgctggttttgagtactttgagcataacagttttgaacaattttgcatcaactattgcaatgaaaaacttcaacaattttttaatgaaaggattctgaaggaggaacaagaactctatcaaaaagaaggtttaggtgttaatgaagtgcattatgtggataatcaggactgtatagatttaattgaagccaaattagtgggaatactggatattttggatgaagaaaatcgccttccccagccaagtgatcaacactttacatctgcagttcaccaaaagcacaaggatcattttcgactcactattcccagaaaatctaagctggcagttcataggaatatcagagacgacgaaggcttcattatcaggcattttgcgggggcagtgtgctatgaaacaacccagtttgtggagaaaaataatgatgctttacatatgtctcttgaatccttaatatgtgaatccagagataagtttatacgggaattatttgaatcatccacaaataacaacaaagatactaaacaaaaagcaggaaaacttagcttcatcagcgtgggaaacaagtttaagacacagttaaatttgcttctggataaacttcgaagtactggagcaagctttattcgttgcatcaaacctaacttaaagatgacaagccaccactttgaaggtgctcaaattctgtctcagcttcagtgttcagggatggtgtctgttttggacttgatgcagggtggttacccatcacgagcttcatttcatgaactctacaacatgtacaaaaagtatatgccagataaacttgcaagattggatccaagactattttgtaaggctttgtttaaagctttgggcttaaatgaaaatgactacaagtttgggttaaccaaagtattttttagacctggcaagtttgcagaatttgatcagatcatgaagtctgaccctgaccacttagcagagttggttaaaagagtcaatcactggctcacatgcagtcgctggaagaaagttcagtggtgctcactctcagtcatcaaattgaaaaacaaaataaaatatcgagctgaagcctgcattaaaatgcaaaaaactattcgaatgtggctttgcaagaggagacacaaacctcgcattgatggtctggttaaggtgggcacactgaaaaaacgacttgataaatttaatgaggtagtcagtgtgttgaaagatggaaaacccgagatgaataaacagatcaagaatctggaaatttctattgatactttgatggccaaaattaagtccactatgatgacgcaggaacaaatccagaaagaatatgatgcactggttaaaagctcagaggaactcctcagtgcattacagaaaaaaaaacagcaggaagaggaagcagaaaggctgaggcgtattcaagaagaaatggaaaaggaaagaaaaagacgtgaagaagacgaaaaacgtcgaagaaaggaagaggaggaaaggcggatgaaacttgagatggaagcaaagagaaaacaagaagaagaagagagaaagaaaagggaagatgatgaaaaacgcattcaagctgaagtggaggcacagctggcccgacagaaggaggaggaatcccaacagcaagcagttctggagcaggagcgcagggaccgggagctggccctgaggattgcccagagtgaagccgagctcatcagtgatgaggcccaggccgacctggcgctgcggaggtacttggattcctatccggtaacttctaaaaatgatggaacaagacccaaaatgacaccggaacaaatggccaaagaaatgtcagaatttttgagtagaggtcctgctgtactagccaccaaagcagctgctggtactaagaaatatgatcttagtaaatggaaatatgcagaactacgtgataccatcaatacttcttgtgatattgagctcctggcagcttgcagagaagaatttcataggagactaaaagtgtatcatgcttggaaatctaagaacaagaagagaaatactgaaacagagcaacgtgctccaaagtctgttactgattatgctcagcaaaacccagcagctcagattcctgccaggcagcgggagattgaaatgaaccgacagcaacgcttcttccgcatcccattcatccgccctgccgaccagtacaaagaccctcagagtaagaaaaaaggctggtggtatgcccattttgatggaccatggattgcccggcaaatggaactccatcctgacaagccacccatcctacttgtggctggtaaggacgacatggagatgtgtgagctgaatcttgaggagactggcctgactcggaagcgtggtgctgagatcttgccaagacagtttgaagaaatctgggaacgctgtggaggcatccagtaccttcagaatgcgattgagagcagacaggctcggcccacctatgcaacagccatgctgcagagtctgttaaagtagatgttgcacaccagccttacagctgggagcctttgccatggtacttaggtagggtgtgtgcccccagatttaaccattccataatcatgttagagttacttctataaagtgaacagattttattaatcacggcttttggtgaatttgtttaaggttaattatggtagcaaattttggacctaaacattatttttctgtatcccgctgtaattcccaaaactctcattattctctaactattacacatgggcatattctgatgtttctcatcctttgccagaagactaccttacatccatcgtaattgttctctaggaaaagagaacttttttcaaaattcaaaatactttttaaggatggcacagtaccatataactggagtaataaaacatgagcttacattcttacaataactaaaccacttaaaatgatcaaggcactaatgttttggtctgaaaagctgtgtactttatagacattttcagacatttttggaaatttccattaaaggtggaaaatctatttttttcctcctttgcagtgtcttagtttgaatgaaacacttcgaagttctagaattctagaaagagccttaatgtatttgatgtattctgtgataagaggtactaatagtatccagcacagatttgcttttctttgctagcacaatgtgtgttgctgtcagaatattctttttatattctgtggaaaaataaaggaaattcagattgtttaaatgcctaaaagttttgagataagttttgtttcaattagaaaaggaaataggttttaggtggcatagtggcttaactggactgaattcaaatattctttcaacttcatctcaatagtgatttttgtatcagaatcttgtccaagttgtttcattgatttagtaagtgttctgcttccaacatctttctttttaagaaattcctagtgtcttttttggcctttgaggttttggtaattgtagacctgtttcataagctttgtaattcagaaatccttgtatttagtaagtgcttgttttacataactgataattttaaaatgttttctttgtgtgctgttagtattgattcaaatgtcagcagctttaagcctaatatttatgactttcacatttggaatttaaagacaaaaatacatcaaggagttatgctgacataattctaaggagttttgttgtattttagaataaaattataaagtaaaatgattctctgtactgctttttcccccagtttttagagaccctaacctttgaaatgaaattccagtgatttcttttttccctagaaagattacctcagttagggaagtatttcccagctgactagtgtttgtgagccacagacactgtcttcagaattgcttctctcatgtcttagtagagaaatatttatttattatgatacattcaaatgattgtcaagttaaattaaatggttgtgtctgtgctattgagaatgcaaatgtgattatcttttgaaggctgtattactgcatagcttcacccaccctcgggtcatttcgtccctgtgattggggacagaaggtgtagctactgaagtaaatgacctattctctctcttccatctctcgcctttaactggtgtttttatttgtgtaggatagtgaatgataagcttttttcctaaccagtagtgagtaaagttcttgaacaaaatttagtagccaaattgttttttaatgacatgtctctttagtacaatagttttgtgtatcttttagatacattaataggcactagatggaaaattaaagagttaaacatatttaaatgagagaatctaatgtttcagaaatttgtaagaaatgtatcacagcaaagggttgttataagtccttagtttttgactctaatagttaatacaattatagttaatcttaagccataatgtttctaatcatgtcacacagctgtcctagaacttatctatttaaaatagtttcctgagttaattttggccagcagggcaactgccctaattcagatagatttacagtaacctacgtacagtagatgcacatacacacagacacccctttgctggagaaacttaggaccctgtcagccttttaaaggaaacagcaggagtggtgtcctaaatgatgttcatgcagctgctttaccatgttcacagtcaagcccatgcatgccaggttaaaactgtggaaatcaaaagtaaattcactcatattttaatcattttaactgagatttaaaattagaagtttaaaccactatatataaagaactaatcttttcttaataccagttctttccatagcatatgctttgcaaaggcagcatgcataaaatatttaaaatgagaggacagaatgttttcacatttgattcaattttaatataattcctaattgtggtaacacagttgagatatgtattatgagttatgggaactaattgagaaaaggaagttactctaatccacgtatgttaagagaatattgagttttcttagttgtaaagttggggagatggcaccttctcagaggattgtgaaaatatgaggaagaaacaaaacagtgcatgtaggagcacagggccacacaaaggcattctattgttatgctcattctgcttctgtaatgacttttcataggtcattcttgtgaaccattttgttttgcaagcaaccaaggaaagaacatcttaagtggaaaatcagtggtggttgtgaacacttagagaatagcaatccacaggcaagaataatggtattgtttgtagagctttattaattggatattttttaaaagacattttcattcacaggtcattactatggttctcagcgatccaaatatgtagatcattggtttttttttttacctgaagtagcttaagagtacttggatcagtagaataaatatttattgaatcaatcagtcagccaattaatatgatgttagtgatagacctgcctccttttatggaagaggtaacagatccagagaggtcaagtaatttagttgtagactgaaaaatatatcaaagcctttgctgcaatcatatgtaacaaaaagaaccaaaacaaacactttttagtggcacctgtggatttacaaagggttgcctctctgtcattccacaacttcagaaggtgtgacaggttttccctatttatcattaccaataataacaagtattgagagttttaaaatttctcccagaagataaactaacaaggatggaaggggagggcaaaggatatctaaacatgagaataaggacatgttagagggggggaaacagttgtaacaataaggaaagagaagagcaacagtggaagagacaggttgtgtgcccctaaagattctgcacccccagtttggaaacactgatacattttaggacacagagcactcctagatctctacgaaattttagaatgaataatgtgtaatttataggatcagaacgtatggttattaaaacttggatcaagatatgcccggtgtatacattcttagcacataggaatggcactgccatactggagaaggtcagcagtaaataggcattctgtacataagcctcatggaagggtaagatggagagactggcagaagtagcacctactctgctgggagcacttctctgagtacgctttagttcaattcaaatcactgtattctttccccattgctaacctaatatatgaaacaagcttagctgtctcagaagtttttcaagagatgatcaggaaaaattaatgcacattcaaaaggagaatcttcagtacaaatttgtttttttaaaaatagatttagggctgggcgcggtggctcacgcctgtaatcccagcactttgggaggccgaggcgggtggatcacgaggtcaagacttcgagaccagcctggccaacatggtgaaaccctgtctctactaaaaatacaaaacattagccaggcgtggtagtgggtgcctgtaatccctgctacttgggaggctgaggcaggagaatcacttgaacgcgggaggcagaggttgcagggagccgagatggcgccattgcactccatcctgggcaacaagagcgaaattccatctcaaaaaataaaatagatttagggggtacaagtgcagttttgttacatgggtatattgcatagtggtaaaatgtgggcttttagtgtacctaacacccagagaagcatacattgtgcccagtaggtaatttttcatccctaaaccttttctcagcctcccactttctggagtctccaatgtcggttattccactctttatgtccatatctacacattcaatcctaatttgtaccaagtagcatctcacctttaaatcacaggcttattagttgggtgttttctttttacttatgaaaattcatctagtcaaactgtcaattaatttttcctcatttcattaaaagtgtatatctaatgctttctctaaaaattgatgtactggaaatacaaataaataaatgctccctgtgtagaatttc

SEQ ID NO: 151793 - DNA, 5651 bp, Artificial Sequence
  derived and/or modified sequence
ggggactcggcggggcgccggccggcgggcggagaccgactcgggatctgtccgagcaggaagccagcctcagcccggccgctgtcgccgccctgtcctggtgcccgtccgcgtcgtcgccctcttcactggccctcatcacttctcaccgcgccctccagcttcacccgtacaggtagccccgccgccgcgcacctgccttcgctcccgcaccggtgacagtggatagtggaaacaggagatcgtggatcctccttcaaaaatggaggatggaaagcccgtttgggcgccacaccctacagatggatttcagatgggcaatattgtggatattggccccgacagcttaacaattgaacccttgaatcagaaaggcaagacatttttggctctcataaaccaagtgtttcctgcagaagaggacagtaaaaaagatgtggaagataactgttcactaatgtatttaaatgaagccacactgctccataatatcaaagttcgatatagtaaagacagaatttatacatatgtcgccaacattctgattgcagtgaatccatactttgacatacctaaaatatattcttcagaagcaataaagtcatatcaaggaaaatctcttgggacaagaccacctcatgtctttgcaattgctgataaagcttttcgagacatgaaggtgctcaagatgagtcagtctatcattgtatctggagaatcaggagccggcaaaacagaaaatacaaaatttgttctaagatacctgactgaatcctatggaacaggtcaagatattgatgacagaattgttgaagctaacccactcctagaagcctttggaaatgcgaagactgttcgcaacaataatagcagtcgatttgggaaatttgtagaaatacattttaatgaaaagagctcagttgttggaggatttgtttcacattatctcctagagaaatctaggatctgtgttcaaggcaaagaggaaagaaattatcatatcttttataggttgtgtgctggtgcttctgaagatattagagaaaaacttcatttgagttcaccagataattttcggtatttaaaccgaggctgcactagatactttgctaacaaagaaactgacaaacagattttacagaaccgcaaaagtcctgagtaccttaaggcaggttctatgaaagatcctctgctagatgaccatggtgattttattagaatgtgcacggctatgaaaaaaattggtttggatgatgaagaaaagcttgatctcttccgggtagtagctggcgtcctgcaccttggaaatattgattttgaggaagctggcagcacttcaggtggttgtaatctgaagaataaatctgctcagtctttggaatattgtgctgaattactgggtttggaccaagatgatcttcgagtaagtttgaccacaagagtcatgctaacaacagcagggggcaccaaaggaacagttataaaggtacctctgaaagtggagcaagcaaacaatgctcgtgatgccctggcaaagacagtgtatagccatctttttgatcatgtggtaaacagagtaaatcagtgttttccttttgaaacatcatcctattttattggagtcctagatattgctggttttgagtactttgagcataacagttttgaacaattttgcatcaactattgcaatgaaaaacttcaacaattttttaatgaaaggattctgaaggaggaacaagaactctatcaaaaagaaggtttaggtgttaatgaagtgcattatgtggataatcaggactgtatagatttaattgaagccaaattagtgggaatactggatattttggatgaagaaaatcgccttccccagccaagtgatcaacactttacatctgcagttcaccaaaagcacaaggatcattttcgactcactattcccagaaaatctaagctggcagttcataggaatatcagagacgacgaaggcttcattatcaggcattttgcgggggcagtgtgctatgaaacaacccagtttgtggagaaaaataatgatgctttacatatgtctcttgaatccttaatatgtgaatccagagataagtttatacgggaattatttgaatcatccacaaataacaacaaagatactaaacaaaaagcaggaaaacttagcttcatcagcgtgggaaacaagtttaagacacagttaaatttgcttctggataaacttcgaagtactggagcaagctttattcgttgcatcaaacctaacttaaagatgacaagccaccactttgaaggtgctcaaattctgtctcagcttcagtgttcagggatggtgtctgttttggacttgatgcagggtggttacccatcacgagcttcatttcatgaactctacaacatgtacaaaaagtatatgccagataaacttgcaagattggatccaagactattttgtaaggctttgtttaaagctttgggcttaaatgaaaatgactacaagtttgggttaaccaaagtattttttagacctggcaagtttgcagaatttgatcagatcatgaagtctgaccctgaccacttagcagagttggttaaaagagtcaatcactggctcacatgcagtcgctggaagaaagttcagtggtgctcactctcagtcatcaaattgaaaaacaaaataaaatatcgagctgaagcctgcattaaaatgcaaaaaactattcgaatgtggctttgcaagaggagacacaaacctcgcattgatggtctggttaaggtgggcacactgaaaaaacgacttgataaatttaatgaggtagtcagtgtgttgaaagatggaaaacccgagatgaataaacagatcaagaatctggaaatttctattgatactttgatggccaaaattaagtccactatgatgacgcaggaacaaatccagaaagaatatgatgcactggttaaaagctcagaggaactcctcagtgcattacagaaaaaaaaacagcaggaagaggaagcagaaaggctgaggcgtattcaagaagaaatggaaaaggaaagaaaaagacgtgaagaagacgaaaaacgtcgaagaaaggaagaggaggaaaggcggatgaaacttgagatggaagcaaagagaaaacaagaagaagaagagagaaagaaaagggaagatgatgaaaaacgcattcaagctgaagtggaggcacagctggcccgacagaaggaggaggaatcccaacagcaagcagttctggagcaggagcgcagggaccgggagctggccctgaggattgcccagagtgaagccgagctcatcagtgatgaggcccaggccgacctggcgctgcggagaggtcctgctgtactagccaccaaagcagctgctggtactaagaaatatgatcttagtaaatggaaatatgcagaactacgtgataccatcaatacttcttgtgatattgagctcctggcagcttgcagagaagaatttcataggagactaaaagtgtatcatgcttggaaatctaagaacaagaagagaaatactgaaacagagcaacgtgctccaaagtctgttactgattatgattttgcaccatttttgaacaattcacctcagcaaaacccagcagctcagattcctgccaggcagcgggagattgaaatgaaccgacagcaacgcttcttccgcatcccattcatccgccctgccgaccagtacaaagaccctcagagtaagaaaaaaggctggtggtatgcccattttgatggaccatggattgcccggcaaatggaactccatcctgacaagccacccatcctacttgtggctggtaaggacgacatggagatgtgtgagctgaatcttgaggagactggcctgactcggaagcgtggtgctgagatcttgccaagacagtttgaagaaatctgggaacgctgtggaggcatccagtaccttcagaatgcgattgagagcagacaggctcggcccacctatgcaacagccatgctgcagagtctgttaaagtagatgttgcacaccagccttacagctgggagcctttgccatggtacttaggtagggtgtgtgcccccagatttaaccattccataatcatgttagagttacttctataaagtgaacagattttattaatcacggcttttggtgaatttgtttaaggttaattatggtagcaaattttggacctaaacattatttttctgtatcccgctgtaattcccaaaactctcattattctctaactattacacatgggcatattctgatgtttctcatcctttgccagaagactaccttacatccatcgtaattgttctctaggaaaagagaacttttttcaaaattcaaaatactttttaaggatggcacagtaccatataactggagtaataaaacatgagcttacattcttacaataactaaaccacttaaaatgatcaaggcactaatgttttggtctgaaaagctgtgtactttatagacattttcagacatttttggaaatttccattaaaggtggaaaatctatttttttcctcctttgcagtgtcttagtttgaatgaaacacttcgaagttctagaattctagaaagagccttaatgtatttgatgtattctgtgataagaggtactaatagtatccagcacagatttgcttttctttgctagcacaatgtgtgttgctgtcagaatattctttttatattctgtggaaaaataaaggaaattcagattgtttaaatgcctaaaagttttgagataagttttgtttcaattagaaaaggaaataggttttaggtggcatagtggcttaactggactgaattcaaatattctttcaacttcatctcaatagtgatttttgtatcagaatcttgtccaagttgtttcattgatttagtaagtgttctgcttccaacatctttctttttaagaaattcctagtgtcttttttggcctttgaggttttggtaattgtagacctgtttcataagctttgtaattcagaaatccttgtatttagtaagtgcttgttttacataactgataattttaaaatgttttctttgtgtgctgttagtattgattcaaatgtcagcagctttaagcctaatatttatgactttcacatttggaatttaaagacaaaaatacatcaaggagttatgctgacataattctaaggagttttgttgtattttagaataaaattataaagtaaaatgattctctgtactgctttttcccccagtttttagagaccctaacctttgaaatgaaattccagtgatttcttttttccctagaaagattacctcagttagggaagtatttcccagctgactagtgtttgtgagccacagacactgtcttcagaattgcttctctcatgtcttagtagagaaatatttatttattatgatacattcaaatgattgtcaagttaaattaaatggttgtgtctgtgctattgagaatgcaaatgtgattatcttttgaaggctgtattactgcatagcttcacccaccctcgggtcatttcgtccctgtgattggggacagaaggtgtagctactgaagtaaatgacctattctctctcttcc

SEQ ID NO: 151794 - DNA, 8692 bp, Artificial Sequence
  derived and/or modified sequence
gtgcacgccgcagtgccggggactcggcggggcgccggccggcgggcggagaccgactcgggatctgtccgagcaggaagccagcctcagcccggccgctgtcgccgccctgtcctggtgcccgtccgcgtcgtcgccctcttcactggccctcatcacttctcaccgcgccctccagcttcacccgtacaggtagccccgccgccgcgcacctgccttcgctcccgcaccggtgacagtggatagtggaaacaggagatcgtggatcctccttcaaaaatggaggatggaaagcccgtttgggcgccacaccctacagatggatttcagatgggcaatattgtggatattggccccgacagcttaacaattgaacccttgaatcagaaaggcaagacatttttggctctcataaaccaagtgtttcctgcagaagaggacagtaaaaaagatgtggaagataactgttcactaatgtatttaaatgaagccacactgctccataatatcaaagttcgatatagtaaagacagaatttatacatatgtcgccaacattctgattgcagtgaatccatactttgacatacctaaaatatattcttcagaagcaataaagtcatatcaaggaaaatctcttgggacaagaccacctcatgtctttgcaattgctgataaagcttttcgagacatgaaggtgctcaagatgagtcagtctatcattgtatctggagaatcaggagccggcaaaacagaaaatacaaaatttgttctaagatacctgactgaatcctatggaacaggtcaagatattgatgacagaattgttgaagctaacccactcctagaagcctttggaaatgcgaagactgttcgcaacaataatagcagtcgatttgggaaatttgtagaaatacattttaatgaaaagagctcagttgttggaggatttgtttcacattatctcctagagaaatctaggatctgtgttcaaggcaaagaggaaagaaattatcatatcttttataggttgtgtgctggtgcttctgaagatattagagaaaaacttcatttgagttcaccagataattttcggtatttaaaccgaggctgcactagatactttgctaacaaagaaactgacaaacagattttacagaaccgcaaaagtcctgagtaccttaaggcaggttctatgaaagatcctctgctagatgaccatggtgattttattagaatgtgcacggctatgaaaaaaattggtttggatgatgaagaaaagcttgatctcttccgggtagtagctggcgtcctgcaccttggaaatattgattttgaggaagctggcagcacttcaggtggttgtaatctgaagaataaatctgctcagtctttggaatattgtgctgaattactgggtttggaccaagatgatcttcgagtaagtttgaccacaagagtcatgctaacaacagcagggggcaccaaaggaacagttataaaggtacctctgaaagtggagcaagcaaacaatgctcgtgatgccctggcaaagacagtgtatagccatctttttgatcatgtggtaaacagagtaaatcagtgttttccttttgaaacatcatcctattttattggagtcctagatattgctggttttgagtactttgagcataacagttttgaacaattttgcatcaactattgcaatgaaaaacttcaacaattttttaatgaaaggattctgaaggaggaacaagaactctatcaaaaagaaggtttaggtgttaatgaagtgcattatgtggataatcaggactgtatagatttaattgaagccaaattagtgggaatactggatattttggatgaagaaaatcgccttccccagccaagtgatcaacactttacatctgcagttcaccaaaagcacaaggatcattttcgactcactattcccagaaaatctaagctggcagttcataggaatatcagagacgacgaaggcttcattatcaggcattttgcgggggcagtgtgctatgaaacaacccagtttgtggagaaaaataatgatgctttacatatgtctcttgaatccttaatatgtgaatccagagataagtttatacgggaattatttgaatcatccacaaataacaacaaagatactaaacaaaaagcaggaaaacttagcttcatcagcgtgggaaacaagtttaagacacagttaaatttgcttctggataaacttcgaagtactggagcaagctttattcgttgcatcaaacctaacttaaagatgacaagccaccactttgaaggtgctcaaattctgtctcagcttcagtgttcagggatggtgtctgttttggacttgatgcagggtggttacccatcacgagcttcatttcatgaactctacaacatgtacaaaaagtatatgccagataaacttgcaagattggatccaagactattttgtaaggctttgtttaaagctttgggcttaaatgaaaatgactacaagtttgggttaaccaaagtattttttagacctggcaagtttgcagaatttgatcagatcatgaagtctgaccctgaccacttagcagagttggttaaaagagtcaatcactggctcacatgcagtcgctggaagaaagttcagtggtgctcactctcagtcatcaaattgaaaaacaaaataaaatatcgagctgaagcctgcattaaaatgcaaaaaactattcgaatgtggctttgcaagaggagacacaaacctcgcattgatggtctggttaaggtgggcacactgaaaaaacgacttgataaatttaatgaggtagtcagtgtgttgaaagatggaaaacccgagatgaataaacagatcaagaatctggaaatttctattgatactttgatggccaaaattaagtccactatgatgacgcaggaacaaatccagaaagaatatgatgcactggttaaaagctcagaggaactcctcagtgcattacagaaaaaaaaacagcaggaagaggaagcagaaaggctgaggcgtattcaagaagaaatggaaaaggaaagaaaaagacgtgaagaagacgaaaaacgtcgaagaaaggaagaggaggaaaggcggatgaaacttgagatggaagcaaagagaaaacaagaagaagaagagagaaagaaaagggaagatgatgaaaaacgcattcaagctgaagtggaggcacagctggcccgacagaaggaggaggaatcccaacagcaagcagttctggagcaggagcgcagggaccgggagctggccctgaggattgcccagagtgaagccgagctcatcagtgatgaggcccaggccgacctggcgctgcggaggtacttggattcctatccggtaacttctaaaaatgatggaacaagacccaaaatgacaccggaacaaatggccaaagaaatgtcagaatttttgagtagaggtcctgctgtactagccaccaaagcagctgctggtactaagaaatatgatcttagtaaatggaaatatgcagaactacgtgataccatcaatacttcttgtgatattgagctcctggcagcttgcagagaagaatttcataggagactaaaagtgtatcatgcttggaaatctaagaacaagaagagaaatactgaaacagagcaacgtgctccaaagtctgttactgattatgattttgcaccatttttgaacaattcacctcagcaaaacccagcagctcagattcctgccaggcagcgggagattgaaatgaaccgacagcaacgcttcttccgcatcccattcatccgccctgccgaccagtacaaagaccctcagagtaagaaaaaaggctggtggtatgcccattttgatggaccatggattgcccggcaaatggaactccatcctgacaagccacccatcctacttgtggctggtaaggacgacatggagatgtgtgagctgaatcttgaggagactggcctgactcggaagcgtggtgctgagatcttgccaagacagtttgaagaaatctgggaacgctgtggaggcatccagtaccttcagaatgcgattgagagcagacaggctcggcccacctatgcaacagccatgctgcagagtctgttaaagtagatgttgcacaccagccttacagctgggagcctttgccatggtacttaggtagggtgtgtgcccccagatttaaccattccataatcatgttagagttacttctataaagtgaacagattttattaatcacggcttttggtgaatttgtttaaggttaattatggtagcaaattttggacctaaacattatttttctgtatcccgctgtaattcccaaaactctcattattctctaactattacacatgggcatattctgatgtttctcatcctttgccagaagactaccttacatccatcgtaattgttctctaggaaaagagaacttttttcaaaattcaaaatactttttaaggatggcacagtaccatataactggagtaataaaacatgagcttacattcttacaataactaaaccacttaaaatgatcaaggcactaatgttttggtctgaaaagctgtgtactttatagacattttcagacatttttggaaatttccattaaaggtggaaaatctatttttttcctcctttgcagtgtcttagtttgaatgaaacacttcgaagttctagaattctagaaagagccttaatgtatttgatgtattctgtgataagaggtactaatagtatccagcacagatttgcttttctttgctagcacaatgtgtgttgctgtcagaatattctttttatattctgtggaaaaataaaggaaattcagattgtttaaatgcctaaaagttttgagataagttttgtttcaattagaaaaggaaataggttttaggtggcatagtggcttaactggactgaattcaaatattctttcaacttcatctcaatagtgatttttgtatcagaatcttgtccaagttgtttcattgatttagtaagtgttctgcttccaacatctttctttttaagaaattcctagtgtcttttttggcctttgaggttttggtaattgtagacctgtttcataagctttgtaattcagaaatccttgtatttagtaagtgcttgttttacataactgataattttaaaatgttttctttgtgtgctgttagtattgattcaaatgtcagcagctttaagcctaatatttatgactttcacatttggaatttaaagacaaaaatacatcaaggagttatgctgacataattctaaggagttttgttgtattttagaataaaattataaagtaaaatgattctctgtactgctttttcccccagtttttagagaccctaacctttgaaatgaaattccagtgatttcttttttccctagaaagattacctcagttagggaagtatttcccagctgactagtgtttgtgagccacagacactgtcttcagaattgcttctctcatgtcttagtagagaaatatttatttattatgatacattcaaatgattgtcaagttaaattaaatggttgtgtctgtgctattgagaatgcaaatgtgattatcttttgaaggctgtattactgcatagcttcacccaccctcgggtcatttcgtccctgtgattggggacagaaggtgtagctactgaagtaaatgacctattctctctcttccatctctcgcctttaactggtgtttttatttgtgtaggatagtgaatgataagcttttttcctaaccagtagtgagtaaagttcttgaacaaaatttagtagccaaattgttttttaatgacatgtctctttagtacaatagttttgtgtatcttttagatacattaataggcactagatggaaaattaaagagttaaacatatttaaatgagagaatctaatgtttcagaaatttgtaagaaatgtatcacagcaaagggttgttataagtccttagtttttgactctaatagttaatacaattatagttaatcttaagccataatgtttctaatcatgtcacacagctgtcctagaacttatctatttaaaatagtttcctgagttaattttggccagcagggcaactgccctaattcagatagatttacagtaacctacgtacagtagatgcacatacacacagacacccctttgctggagaaacttaggaccctgtcagccttttaaaggaaacagcaggagtggtgtcctaaatgatgttcatgcagctgctttaccatgttcacagtcaagcccatgcatgccaggttaaaactgtggaaatcaaaagtaaattcactcatattttaatcattttaactgagatttaaaattagaagtttaaaccactatatataaagaactaatcttttcttaataccagttctttccatagcatatgctttgcaaaggcagcatgcataaaatatttaaaatgagaggacagaatgttttcacatttgattcaattttaatataattcctaattgtggtaacacagttgagatatgtattatgagttatgggaactaattgagaaaaggaagttactctaatccacgtatgttaagagaatattgagttttcttagttgtaaagttggggagatggcaccttctcagaggattgtgaaaatatgaggaagaaacaaaacagtgcatgtaggagcacagggccacacaaaggcattctattgttatgctcattctgcttctgtaatgacttttcataggtcattcttgtgaaccattttgttttgcaagcaaccaaggaaagaacatcttaagtggaaaatcagtggtggttgtgaacacttagagaatagcaatccacaggcaagaataatggtattgtttgtagagctttattaattggatattttttaaaagacattttcattcacaggtcattactatggttctcagcgatccaaatatgtagatcattggtttttttttttacctgaagtagcttaagagtacttggatcagtagaataaatatttattgaatcaatcagtcagccaattaatatgatgttagtgatagacctgcctccttttatggaagaggtaacagatccagagaggtcaagtaatttagttgtagactgaaaaatatatcaaagcctttgctgcaatcatatgtaacaaaaagaaccaaaacaaacactttttagtggcacctgtggatttacaaagggttgcctctctgtcattccacaacttcagaaggtgtgacaggttttccctatttatcattaccaataataacaagtattgagagttttaaaatttctcccagaagataaactaacaaggatggaaggggagggcaaaggatatctaaacatgagaataaggacatgttagagggggggaaacagttgtaacaataaggaaagagaagagcaacagtggaagagacaggttgtgtgcccctaaagattctgcacccccagtttggaaacactgatacattttaggacacagagcactcctagatctctacgaaattttagaatgaataatgtgtaatttataggatcagaacgtatggttattaaaacttggatcaagatatgcccggtgtatacattcttagcacataggaatggcactgccatactggagaaggtcagcagtaaataggcattctgtacataagcctcatggaagggtaagatggagagactggcagaagtagcacctactctgctgggagcacttctctgagtacgctttagttcaattcaaatcactgtattctttccccattgctaacctaatatatgaaacaagcttagctgtctcagaagtttttcaagagatgatcaggaaaaattaatgcacattcaaaaggagaatcttcagtacaaatttgtttttttaaaaatagatttagggctgggcgcggtggctcacgcctgtaatcccagcactttgggaggccgaggcgggtggatcacgaggtcaagacttcgagaccagcctggccaacatggtgaaaccctgtctctactaaaaatacaaaacattagccaggcgtggtagtgggtgcctgtaatccctgctacttgggaggctgaggcaggagaatcacttgaacgcgggaggcagaggttgcagggagccgagatggcgccattgcactccatcctgggcaacaagagcgaaattccatctcaaaaaataaaatagatttagggggtacaagtgcagttttgttacatgggtatattgcatagtggtaaaatgtgggcttttagtgtacctaacacccagagaagcatacattgtgcccagtaggtaatttttcatccctaaaccttttctcagcctcccactttctggagtctccaatgtcggttattccactctttatgtccatatctacacattcaatcctaatttgtaccaagtagcatctcacctttaaatcacaggcttattagttgggtgttttctttttacttatgaaaattcatctagtcaaactgtcaattaatttttcctcatttcattaaaagtgtatatctaatgctttctctaaaaattgatgtactggaaatacaaataaataaatgctccctgtgtagaatttc

SEQ ID NO: 151795 - DNA, 3762 bp, Artificial Sequence
  derived and/or modified sequence
atggaggacggcaagcccgtgtgggccccccaccccaccgacggctttcagatgggtaatattgttgacataggaccagacagtctgactatcgaacccctgaatcaaaagggcaaaacatttctggctctgatcaatcaggtcttcccagccgaagaggattccaagaaagatgtggaggacaactgctcacttatgtacctgaacgaagctacccttctccataatattaaggttaggtacagcaaagatagaatatatacctatgtggcgaatattctaatcgcagttaatccgtacttcgatatcccaaagatatactcctctgaagctatcaagtcttaccaaggtaagtccctggggacacggcctccgcacgtattcgctatcgcggacaaagccttccgggatatgaaagtcctgaagatgtcgcaatctattatcgtgagcggggagtcgggcgccgggaagacagaaaacactaaattcgtactgcgatacctgactgagagctacgggaccggtcaggatatagacgataggattgtcgaggccaatccgctgctggaggcattcggtaacgccaaaacagttaggaataacaattccagcagattcggtaaattcgtagaaattcacttcaatgagaagagttcagtagtcggagggtttgtgagccactatctgctggaaaaaagcagaatatgtgtgcagggcaaagaagaacgaaattaccatattttctatcgtctgtgcgcgggggccagcgaagacattcgggaaaaactgcatttgagttccccagataacttccggtatttaaacagagggtgtacacgctatttcgctaataaagagacagacaagcagatcctccagaacaggaagtctcctgaatacctcaaggccggaagcatgaaggatccactgctggacgatcacggagacttcatccgcatgtgtacagcaatgaagaagattggcttagatgacgaagaaaaactcgatttgttccgagtcgtggccggggtccttcatttgggaaatatcgacttcgaagaagccgggtcaacttctgggggctgtaacctgaagaataaaagtgcacaaagcctggagtactgtgccgagctgctgggactcgatcaggacgacctgcgtgtgagtttaaccacacgtgttatgctgactacagcagggggaacaaagggtactgttattaaggtgcctctcaaggtcgaacaggccaataacgctcgggacgcattggccaagactgtgtatagccacctgttcgatcacgtcgtgaatagggtgaaccagtgcttcccattcgagaccagctcctatttcattggagtgcttgacatcgctggcttcgagtacttcgaacacaactcctttgaacagttttgcatcaactattgcaatgagaagctccaacagtttttcaatgaacgtatcctcaaagaggagcaggaactgtatcaaaaggaaggacttggcgtcaacgaggtgcattatgttgacaaccaggactgcattgacctcattgaggccaagcttgtggggatactggatatcctggatgaggagaacaggctgccgcagccatctgatcaacattttactagcgctgtccaccagaagcacaaagatcattttaggctcactatcccgcgaaagtccaagctggccgtgcataggaatattagggacgacgagggcttcataattcggcacttcgcaggagcagtctgttatgagacaactcagtttgtggaaaaaaataacgatgcactgcacatgtctctcgaatctctgatatgcgagagccgcgacaagtttatccgcgagcttttcgaaagctctaccaacaataataaagacaccaaacagaaggcggggaaactgtcctttatttctgtgggaaacaagtttaaaacccagctgaatctgcttctggacaaactgcgatccactggcgcctcctttattcgttgcatcaaaccaaacctgaaaatgacttcccaccactttgaaggcgcacagattctaagccaactacagtgctccggcatggtgtccgtgctggatctgatgcagggtggctatccatctagggcttctttccacgagctttataatatgtataagaagtatatgcctgacaagttggccaggctggacccaagattattttgcaaggcattatttaaggcactcggcctgaacgagaacgattataaattcggactgactaaagtgttctttagacccggaaaattcgctgagttcgaccagataatgaagtctgatccagatcacttggccgagcttgtaaagcgggtgaatcattggctcacttgttcgaggtggaagaaagtccaatggtgctctctgtcggtcattaagctgaaaaacaagattaagtacagggcagaagcttgtataaaaatgcagaagacaattagaatgtggttgtgtaagagacggcacaagcctaggatcgacgggttggtgaaggtgggaaccctcaaaaaacgactggacaaattcaacgaagtcgtttccgtgctgaaggatggaaagcctgaaatgaacaagcaaataaaaaacctggagatctcaatcgacaccctgatggcaaagatcaagtctaccatgatgacccaggagcagatccagaaggagtacgacgcactcgtcaagtcgagtgaggagcttctgtctgctttgcaaaagaagaagcaacaggaggaggaagcagagagactgcgccgcatccaggaggagatggagaaagagcgaaaacggagagaggaggacgaaaagcgccgacgtaaggaagaggaagaacggcggatgaagctggagatggaggctaagaggaagcaggaggaggaggaacgaaaaaagcgggaagatgatgagaagagaatccaggcagaagtcgaggcacaactggccagacaaaaggaagaagaatctcagcagcaggccgtccttgaacaggagaggagggaccgggaactcgctctccgtatcgcccagtcagaggccgaactgatctctgacgaggcacaggcagatctagccttacggcgtgggcccgccgtgctggcgaccaaagcggcagctggcacaaaaaagtatgacctgtctaagtggaaatatgccgaactacgggacacaataaacacaagctgcgatatcgaattactcgcagcctgtcgcgaggagttccataggaggctgaaagtatatcatgcatggaagagcaagaataagaaaaggaacacagagactgagcagagagccccgaagagtgtcacagactacgcccaacagaacccggccgcccagatacccgctcggcagagagagatcgagatgaaccgccaacagagatttttccgaatccccttcatcagaccggctgaccaatataaagacccacagagtaagaaaaagggctggtggtacgcacactttgatggtccatggatcgcgcggcagatggagctgcatcccgataaacccccgatactgttggtggctggaaaagacgacatggaaatgtgcgagttaaatctggaggaaacaggtcttactaggaagcgcggcgccgagatcctgcctcgccagttcgaggaaatctgggaacgttgcggagggatccagtaccttcagaacgccattgaatcacgccaggcccgccccacatatgcaaccgccatgctgcagagtctgctgaagtag

SEQ ID NO: 151796 - DNA, 3858 bp, Artificial Sequence
  derived and/or modified sequence
atggaggacggcaagcccgtgtgggccccccaccccaccgacggctttcagatgggcaacattgttgacattggacccgactctctaactatcgaaccactgaatcaaaagggaaagacattcctggctctcatcaatcaggtgtttccagctgaggaagacagtaagaaagatgtggaggacaactgtagcctgatgtaccttaatgaggctaccctgctgcacaacatcaaggtgcgctactcgaaggaccgtatctatacatacgtcgccaacatcttgatcgctgttaatccatactttgatatcccaaagatctactctagcgaggcaattaagagctatcaagggaagagtctgggcactcgcccccctcacgtgtttgccatagctgacaaggcatttcgcgatatgaaagttctcaagatgtctcaaagcattatcgtgagcggcgagtcaggagctgggaaaacagagaataccaaattcgtgctgcgctatctaaccgagagctatggaactggccaagatatcgatgaccggatagtagaggctaaccctctgctggaagcattcgggaacgctaaaacagttagaaataataacagttccaggtttgggaaattcgtcgagatacactttaatgaaaagagtagcgtggtgggggggtttgtatcccattacctgctcgaaaaaagtagaatctgtgtgcagggtaaagaagagcggaactatcacatattctacaggctatgcgccggcgccagtgaagatatcagagaaaagttacacctgtcgtcaccagataactttcgctatttgaatcgaggatgcacaagatacttcgccaacaaggaaaccgacaagcagatcctccaaaatagaaaatctccagagtatctaaaggcaggttctatgaaagatcctctgctggatgatcatggagattttatccgcatgtgcacggctatgaagaagatcggcttagacgatgaagaaaaactggatctctttagggtggtcgccggcgttctgcacctcggaaatattgatttcgaggaagcgggaagtacatctgggggctgcaacctcaaaaataagagcgcccaatccttggaatactgcgctgagttgctgggcctggatcaagatgacctgcgggtgtcccttacgacccgcgtgatgctgacgactgctgggggaactaagggcacggtaattaaggtgccattgaaagttgaacaggctaataacgcacgggatgccctggctaaaaccgtttattcccaccttttcgaccacgtggttaacagggtgaaccagtgcttccctttcgaaacaagtagttactttataggagtcttagatattgccggctttgaatactttgagcacaattcttttgagcagttctgcatcaattactgtaatgagaaactccagcagtttttcaacgagcggattctgaaggaggaacaggaactctatcagaaagagggtctgggcgtgaatgaggtacactacgtagacaatcaagactgtatcgaccttatcgaagccaaactggtggggatcttagacatcctcgacgaggaaaataggttacctcagcctagcgatcagcatttcaccagcgccgtccatcagaaacacaaagaccactttcggcttacaatcccccgcaaaagcaagctagcggtacaccgaaacatccgagacgatgaaggctttatcattcggcacttcgcaggggcagtatgctacgaaacaacgcagtttgttgaaaaaaataatgacgcactccacatgagtctggagtctttgatctgcgagtcacgcgataaattcattagggaactctttgagtcaagtacaaacaataacaaggacacaaagcagaaggctggcaagttgagtttcattagtgttgggaataaattcaagacacagcttaatttgcttctggacaaactgcggtcaactggagccagcttcatacgctgcattaagccaaaccttaaaatgacctctcatcactttgaaggcgcacagattctctcacagctacagtgttcgggtatggttagcgtactggatcttatgcagggcggctacccgtctcgcgcctcctttcatgagctctacaacatgtataagaagtatatgcccgacaagttggcaagactcgaccccaggctattctgcaaggctctgttcaaggcactgggtctcaatgagaatgactataagttcggattgacaaaagtcttttttaggcccggcaagttcgcggagtttgatcaaatcatgaagagcgatccagaccatctcgccgagctagtaaaacgagtgaaccactggctaacatgttcccgctggaaaaaagtgcagtggtgttccttgtccgtaattaaattaaagaacaagattaagtatcgggcggaggcttgtatcaaaatgcagaaaactatcagaatgtggctgtgcaagagaagacataagcctaggattgatgggctggttaaagtcggaactttgaaaaaacgtctggataagtttaatgaagtcgtatccgtcttaaaggatggcaaaccagagatgaacaagcagattaagaatttggaaatcagcatcgataccctgatggccaagataaaaagcactatgatgacccaagaacagatacagaaagagtacgatgctctggtcaaatccagtgaggagctcctttcagcccttcagaaaaagaaacagcaggaggaggaggctgagagattacgcaggattcaggaggaaatggaaaaagaacgaaaaagaagagaggaagatgaaaaaagaagaaggaaggaagaggaagagcgccgaatgaagttggaaatggaggccaaacgtaagcaggaggaggaggaaaggaagaaacgggaggacgatgaaaagcgaatccaggccgaggtcgaggcacaactcgctaggcagaaggaagaggaatcacagcaacaggccgtgctggaacaggaacgccgtgatcgtgagttggctttaaggatcgctcagtccgaggctgagctgatttctgacgaggcacaggctgatcttgcactgcgtcgcaatgatggcaccaggccaaagatgacaccagagcaaatggcaaaggaaatgtccgaatttctgtcacgggggcccgccgtgctggccaccaaggccgctgccggaacaaagaagtacgatttaagtaagtggaaatatgctgagctgagagacaccatcaacactagctgtgacattgagctgctggccgcatgtcgggaggaatttcaccgtcggctgaaggtttaccacgcctggaaaagtaaaaataaaaagcgaaataccgagactgaacagcgtgccccaaagtccgttactgattacgatttcgcaccatttttgaacaacagtccccagcaaaacccagctgcccagatccctgctcggcagagggagatcgagatgaatagacaacaacgtttctttcggatacccttcattcgccccgccgatcagtataaggacccccagagcaaaaaaaagggctggtggtatgcccattttgacgggccgtggatcgcccgacaaatggagcttcaccctgataagccgcctatcctactcgtggccggaaaagatgatatggaaatgtgcgaactgaacttggaagaaaccgggcttacccggaagcgaggggccgaaattcttccacgtcagtttgaggagatctgggaacggtgtggaggcatacagtacttacagaatgctattgaatccaggcaggcgaggccaacgtacgctactgctatgctgcaaagcctactgaagtag

SEQ ID NO: 151797 - DNA, 3861 bp, Artificial Sequence
  derived and/or modified sequence
atggaggacggcaagcccgtgtgggccccccaccccaccgacggcttccagatgggcaacatagtggacataggcccggactctttgactatcgaacctcttaaccagaaggggaagaccttcctcgctctgattaaccaagtatttccagccgaagaagattcaaagaaggacgtggaagacaattgcagtctgatgtacttgaacgaggcaaccttgctgcacaatatcaaagtccggtactccaaggatcggatttatacatacgttgccaatatcttaatcgccgtcaacccctattttgatatccctaaaatatactctagtgaggccattaaaagctatcaaggcaagagcctgggaacccgcccacctcatgtgttcgctatagctgacaaggccttccgggatatgaaggtgcttaaaatgtcccagtctatcatcgtatcgggcgagtcaggcgcagggaagacagagaacactaaatttgtgctgagatatctcaccgagagctacgggaccgggcaggatatcgatgatcgcatagtagaggcgaatcccctcttggaggctttcggaaatgcgaagacagtcagaaataataattcctccagatttgggaaattcgttgagatccacttcaatgaaaagtcaagtgttgttggtggcttcgtctctcactatctgctcgagaaatctcggatttgcgtacagggcaaggaggagagaaactaccatatcttctatagactgtgcgctggtgccagtgaagacattcgcgagaagcttcatctgagctcacccgacaactttaggtacctgaatagaggctgtactaggtatttcgccaacaaagagactgataaacagattctgcagaaccgtaagtcgccggagtaccttaaggctggatctatgaaagaccccctacttgatgaccacggggacttcatccggatgtgtactgccatgaaaaagattggtctggatgacgaagaaaagctcgacctctttcgggtggtcgcgggggtcctgcaccttggcaatatcgactttgaggaagcgggatccacatccggcggatgcaacttgaaaaataagtccgcccagtcattagagtattgcgctgaattgctcggactcgaccaggatgatctgcgagtgtccctgacgaccagggtcatgctgacaactgcaggaggtacaaagggcactgtgattaaggtaccgctgaaagtggagcaagccaacaacgcgagggatgcactagcgaagactgtctacagccacctcttcgaccatgtcgtcaatcgggtgaaccagtgtttcccttttgaaaccagctcctatttcatcggggtcctcgacatcgctgggtttgaatacttcgagcataacagcttcgaacaattttgtataaactattgcaatgagaagctccagcaattcttcaacgaacgtatcttaaaggaggaacaggagctttaccagaaggaaggcctcggcgtgaatgaagtacactacgtggataaccaggattgcatcgacttaatagaagcaaagctggttggtattttggacatactggatgaggagaacagattaccccagcccagtgaccaacatttcacatccgcggtgcatcagaaacacaaagatcactttaggctgaccattcccaggaagagtaagctcgccgtgcatagaaacatccgcgatgacgaggggtttataataaggcatttcgcaggcgccgtgtgctacgagacaactcaatttgttgaaaaaaacaacgatgccctgcacatgtccctggagtctctgatttgtgagtcaagagataagtttatcagagagctcttcgaatcttctaccaataataacaaagacaccaaacaaaaggccggcaaacttagttttatcagcgtgggcaataaattcaagacacagctgaacttgcttctggataaattacgctcaactggcgctagcttcatcaggtgtattaaacccaatctgaagatgacatcacaccattttgagggcgcccagattttatcccaactgcagtgttccggcatggtgtcggttttggacttgatgcaaggcggatatccttcaagagccagttttcatgagctctacaacatgtacaagaagtacatgccagataagcttgcccgactcgacccaaggctcttttgtaaggccctcttcaaagcccttggcctgaacgaaaacgactataaattcggcttaactaaggtcttctttcgacctgggaagttcgccgaattcgatcagattatgaagtcagaccctgaccacttggccgaactggtgaaaagagttaatcattggctgacatgcagccgctggaaaaaagtgcagtggtgctccctgtctgtgattaagcttaagaataagatcaagtatcgggcagaggcatgtattaagatgcagaaaacaattcgcatgtggctgtgcaagcgacgacataagccaagaatagatggcctggtcaaagtgggtacactgaagaagcgcctcgataagtttaatgaagtcgttagcgtgttgaaggatggtaagccagaaatgaataagcagatcaaaaacttggagatctccatagatacactgatggccaagatcaaatccacgatgatgacgcaggaacagatccagaaggaatacgacgccctggtaaagtccagtgaggagctgttgtctgccctgcagaaaaagaagcagcaggaagaagaggctgaacgcctgcggcgcattcaggaagagatggaaaaggaaaggaagcggagagaggaagacgagaagaggcgacggaaggaggaggaagaaaggaggatgaagttagagatggaggcaaagagaaagcaggaggaggaagaacgcaaaaaacgcgaggacgacgagaaacgaatccaagcggaggtcgaagcacagctggcccgccagaaagaggaggagtcccagcagcaggcagtgcttgagcaggagcgcagggaccgtgaactcgcccttcggatagcccaatctgaggccgagttgatcagcgacgaagctcaagctgacctggccctacggcggtacctggatagctacccagtgacaagcaagaacgatggcacacggcccaagatgactcccgaacaaatggccaaggagatgtcagaatttctgtccagagggcccgcagtgctggcgacaaaggcagccgccggtactaagaagtatgatttatccaagtggaagtatgccgagctgagggatacaattaacacctcatgtgacatcgagctgttagccgcctgtcgggaagaatttcatcgcaggttgaaggtgtatcatgcttggaagtcaaagaacaagaagcgcaacaccgaaactgagcagcgcgcgcccaagagtgttacagattatgcccagcagaaccctgctgcccagataccagctaggcagcgcgagattgaaatgaatcgtcagcagcgcttctttcgcatccccttcatcaggcctgccgaccagtacaaggaccctcagtcaaagaaaaaggggtggtggtacgcacactttgacggaccttggatcgcaagacagatggagttgcaccctgacaagccacctatcctgcttgtggctgggaaggatgacatggagatgtgtgagctgaacttggaggagacaggactgacacgcaaaaggggcgcagagatcctgcctagacagtttgaggaaatttgggaaagatgcgggggaatccagtatcttcagaacgctatcgagtccaggcaggcccgccctacctacgccaccgccatgctgcagagcctgctgaagtag

SEQ ID NO: 151798 - DNA, 3789 bp, Artificial Sequence
  derived and/or modified sequence
atggaggacggcaagcccgtgtgggccccccaccccaccgacggctttcagatggggaacattgtggatatcgggcccgactctctgactatcgaacccctgaaccagaaaggcaagacttttctggccctgatcaatcaagtgttccctgcggaagaggattctaagaaggatgtagaagataactgttctcttatgtacttaaacgaagccactctcttgcacaacatcaaagtgcggtatagtaaggataggatctatacctacgtggcgaatattctgatcgcagtgaacccatacttcgacattccgaaaatctattcaagcgaggctattaaatcctatcaggggaaatcactcggaaccagacccccccatgtatttgcgatagcagataaggccttcagagacatgaaagtcttgaaaatgtctcagtccattatcgtgtctggcgagagcggcgccggaaagactgagaataccaaattcgttctgaggtatctgaccgagtcctatggcacaggtcaagatatcgatgataggatcgtcgaggccaatccgctactagaggccttcggaaatgctaaaaccgtcaggaacaataactcctcgagatttggcaaattcgttgagatacacttcaacgagaaatctagcgttgtgggcggattcgtttcccactacttactagaaaaaagtcggatttgcgtccaaggtaaagaagaacggaattaccatattttctaccggctttgcgcgggagcttcggaggacatacgcgagaagttgcatttaagctcccctgacaactttcgatacctgaatagaggctgtaccaggtatttcgcaaacaaagagaccgataagcagatcctgcagaacagaaaaagccctgagtatctcaaagccggttccatgaaggacccccttctggatgaccacggggattttattagaatgtgcactgctatgaagaagatcggcctcgacgatgaggagaaacttgatctgttccgcgtggtggcaggagtactacatctgggtaacatagacttcgaggaggccggatcgactagtggcggatgtaatctgaaaaataagagcgcacagtctctcgaatactgtgccgaattattgggactcgatcaggacgacctgcgtgtgtccctgacgaccagggtcatgctcactaccgctggaggcaccaagggcactgtgatcaaggtgcctcttaaagtggaacaggctaataacgctagagacgctcttgcaaagaccgtttacagccacctctttgaccacgtggtgaacagggtgaatcagtgctttccattcgagacaagttcctactttatcggcgtgctggatatagcaggtttcgagtattttgagcataatagcttcgagcagttttgcataaactactgtaacgaaaagctccagcagtttttcaatgagcgtatcctaaaagaagagcaagagttgtatcagaaagaagggttaggagttaacgaggtgcactacgtcgacaaccaggactgtatcgacttgattgaggcgaagctggtcgggatccttgatatccttgatgaggaaaacaggcttcctcagcctagcgaccagcatttcacatcagccgtccaccagaaacacaaagaccacttcaggctgacaatccctcggaaatcaaagctggctgtgcacagaaacattcgtgacgacgaagggtttatcattcggcatttcgccggtgctgtctgctacgagaccacgcaattcgtggaaaagaacaatgatgcgctacacatgtcactggagtctttgatttgtgaatcacgggataagttcattagggaactatttgaaagttccactaacaataataaggacaccaaacaaaaagcgggcaagcttagttttatcagcgtgggcaacaaattcaagactcagctgaacttgctgctggataagctgcggtcaaccggtgccagtttcatccggtgcataaaacctaacctgaagatgacctcacaccattttgagggcgcgcagatcctgagccagctacaatgctccgggatggtttccgtgcttgatttaatgcaaggaggctatcccagtcgagctagcttccatgagctgtacaatatgtacaaaaagtatatgcccgacaagctcgcccgactcgatcctaggctgttctgtaaggcactgttcaaagccctcgggctcaacgaaaacgattacaagtttggactgaccaaggtgttttttcgtccaggcaaattcgcagaattcgaccagatcatgaagtcagaccccgatcacctggctgagctggtcaaacgggtgaaccactggctgacttgctccaggtggaagaaagtgcagtggtgttccctgagtgtaatcaaactcaagaataaaatcaagtatcgcgccgaggcctgcattaagatgcagaaaactatccgaatgtggctgtgtaagaggagacacaagcctagaatagatgggctggtgaaagtcggtaccttgaagaagcgcctggacaagttcaatgaggtggtcagcgtactgaaggatggcaagcccgaaatgaacaaacaaatcaaaaacctggaaatatccatcgacacgctcatggccaaaattaaatcaacgatgatgactcaggagcagatccaaaaggagtatgatgcactggtgaagtcctccgaagagctgctaagcgctctacagaaaaaaaaacaacaagaggaggaagcggagcgcttgcgccggatacaggaagaaatggaaaaggagcgcaagaggcgcgaagaggacgaaaaaagaaggcgcaaagaggaggaagaacggagaatgaagctggagatggaggccaaaagaaagcaagaggaggaagaaagaaagaagagagaggatgacgaaaagcgcattcaggcagaagtcgaggctcagctcgcaaggcagaaagaagaggagagccagcagcaggccgtattagagcaggagagacgggaccgggaattggccttgcgtatcgcacagtccgaggctgagctcatctcagatgaggcacaggcagacctggccttacgcagggggcccgccgtgttagcaacgaaagctgcagccggtacaaaaaagtatgacctgagcaagtggaagtatgccgaattgcgggacacgatcaatacctcttgtgatatcgagctgttagccgcctgtcgggaagaatttcacagaaggttgaaggtctatcacgcctggaaatcaaaaaataagaaaaggaacacagagaccgaacagcgtgctcccaagtcggttactgactatgacttcgcccccttcttaaacaattcacctcaacaaaatcccgcagcacagatacccgccagacaacgggagatcgaaatgaacaggcagcagagattctttcgtattcccttcatccgacccgccgaccaatacaaggacccacaaagcaagaagaagggttggtggtatgctcactttgatggtccctggattgcccggcagatggaactgcatccagataaaccgcctatcttgctggtggccggtaaggatgatatggagatgtgtgagcttaacctggaggagacaggattgacccgcaagagaggcgctgagatcctcccgcgccagttcgaggagatttgggagcggtgcggagggatccagtacctgcagaatgctatcgaatcgcgacaagcccgccctacatacgcgacggccatgctgcagagtttgcttaagtag

SEQ ID NO: 151799 - DNA, 3888 bp, Artificial Sequence
  derived and/or modified sequence
atggaggacggcaagcccgtgtgggccccccaccccaccgacggctttcagatgggcaatatagttgacatcggcccagactcactgacgatcgagcctttgaatcagaaaggaaaaacgtttctggctctgattaatcaggtgttccctgccgaagaggattctaaaaaggatgtggaggataactgcagcctcatgtatttaaatgaggccaccctccttcacaacatcaaagtgagatatagcaaggatcggatctacacttatgtcgccaatatactcattgcagtcaacccgtacttcgatatccccaagatctattctagtgaggctattaagtcgtaccaggggaaatccctcggcactcgcccccctcatgttttcgccattgccgacaaagctttcagagacatgaaggttctgaaaatgtctcagtcaataatcgtaagcggtgagtccggagctgggaagacggaaaatactaagtttgtgctgagatatctcacggagtcatacggaacagggcaagatatcgatgaccgcatcgtggaagccaaccccctgctggaagctttcggaaatgctaaaaccgtgcggaacaacaacagcagccgattcgggaagtttgtggaaatacacttcaacgagaagagtagcgtggtcggaggttttgtctcacattatctgttagaaaaatccaggatctgcgttcaagggaaagaggaaaggaattaccacatcttttacagactctgtgcgggggcgtctgaagacatccgggagaaacttcacctgagctcacctgataacttccggtatctgaaccgggggtgcacaaggtatttcgcgaacaaggagaccgacaagcagattttacagaatcggaagtctccagaatatctcaaagcaggcagcatgaaggatccactgctcgatgaccacggggatttcattagaatgtgtactgccatgaaaaagatcggcctcgatgatgaggaaaagctcgacctctttagggtggtcgctggggtgcttcatctggggaatatcgacttcgaggaggccggaagcacttccggcggctgcaatctgaagaataaatccgctcagagtctcgaatactgcgccgaactcctcggtctagatcaggatgacttacgcgtgtccctgacgactcgcgtcatgcttacaacagctggcggcacaaagggcacagtgatcaaggtccccttgaaagttgagcaggctaataacgctcgagacgctctagcaaagactgtctactcacatttgtttgatcacgtagttaaccgagtgaatcagtgcttcccgtttgaaacatccagctatttcattggcgtgcttgacattgcaggctttgagtatttcgagcataactcttttgagcagttctgcataaactattgcaacgagaaactccagcaattctttaacgagcgtatactgaaagaggaacaagagctataccagaaagagggcttgggcgttaatgaagtacattatgttgataatcaggactgcatcgacctaatagaagccaaactggtgggaattttggacatcttggacgaagagaatagactgccacaacccagcgatcagcactttacaagtgcggtacaccagaagcacaaagaccacttccgcctcaccatccctagaaagagcaaactggcggtgcaccggaatatacgggatgacgagggtttcattatccgacacttcgctggggccgtgtgttacgagactacacagtttgtcgaaaagaataacgatgctctgcatatgtccctcgagtctctgatatgtgagagccgggataaattcattagggagctatttgagtctagcacaaacaacaacaaagatactaagcagaaggcagggaagctgtctttcataagtgtgggtaataagtttaagacccagctgaatctgctcctcgataagctgcgtagcaccggcgccagctttatccggtgtatcaaaccaaacttgaaaatgaccagtcaccactttgaaggggctcagatcttgtcacagttacagtgctcaggtatggtgagcgttctggatctgatgcaaggcgggtacccaagtcgggcgtcctttcatgaactttataacatgtataaaaaatatatgcctgataaattggcgagactagacccaagactcttctgcaaggctctgttcaaagccctgggtcttaatgagaatgactataaattcggtctgaccaaagtgtttttccgacctggcaaattcgctgagttcgaccagattatgaagagcgaccccgatcacttggccgagcttgttaagcgggtgaaccattggctcacttgctcccgctggaaaaaggtgcagtggtgtagtttgtcagttatcaaactgaaaaacaagatcaaatatcgagcagaggcctgcataaagatgcagaaaaccatccggatgtggctctgcaagaggcggcataagcccagaatcgatggactggtcaaggtggggaccctgaagaagcgtctggataaatttaacgaggtggtgtctgttctcaaggatgggaaacctgagatgaacaagcagatcaaaaatcttgaaatctccattgataccctgatggctaaaataaagtcgacaatgatgactcaagagcagatccagaaagagtacgacgccctggtgaagagtagcgaagaattgctctctgctctgcagaaaaagaaacagcaagaggaggaggccgagcgcctcaggcggatccaagaggagatggagaaggaaagaaagaggagggaggaggacgagaaacgcagaagaaaggaagaagaagaacgacgcatgaagctagaaatggaggctaaacggaaacaggaagaggaagaaaggaagaagagggaggatgacgaaaagcgaatccaggccgaagtggaagcgcagttagcacggcagaaagaggaagaatcgcaacagcaggcagtgctggaacaggaacggagggacagggaactggcgctcagaatcgcacaatcagaggctgagctgattagtgatgaagctcaggccgacctcgccctgcggagatatcttgattcctaccctgtcacctctaagaacgacggcaccaggcctaaaatgacgcctgagcagatggctaaagaaatgtctgaattcttgtcaagaggtccggctgtgttggctacaaaggccgcggcaggcaccaaaaaatatgatttgtctaaatggaagtacgcagaactcagagataccattaatacaagctgcgatatcgaattgctagctgcctgtcgcgaggagttccaccgaagattgaaggtctaccacgcgtggaaatccaaaaacaagaagaggaacaccgagactgagcagcgtgcccccaagagtgtcaccgattatgacttcgcacccttcctgaacaactcaccccaacagaatcctgccgctcagatccccgccaggcagagggaaatcgaaatgaaccgacaacagaggtttttcaggatccctttcatccggccggccgaccaatacaaggaccctcagtctaagaagaaagggtggtggtacgcacactttgacggtccgtggatcgcccgccagatggaacttcacccagacaaaccaccaattctcctggtggcaggcaaggacgatatggaaatgtgtgagctcaatctggaagagacaggcctcacccggaaacgaggtgccgagatcctgcccaggcagtttgaagaaatctgggagagatgtggaggcatccagtatctacagaatgctatcgaatccagacaggcgagaccaacatacgcgaccgctatgctacagagtttgttgaagtag

SEQ ID NO: 151800 - DNA, 3762 bp, Artificial Sequence
  derived and/or modified sequence
atggaggacggcaagccggtgtgggctccccatccaacagatggattccagatgggaaacattgtcgatataggacctgactctctcacaatcgaacctcttaatcagaagggcaaaacttttctcgcgttgattaatcaggtgtttccggctgaagaagattctaagaaagacgtggaggataattgtagtctcatgtatttgaacgaggccacgttgctgcacaacattaaggttaggtattccaaggataggatctatacatacgtggctaatatcctaatcgcagtcaacccgtacttcgatatccccaagatttattcatctgaagctatcaagagctatcaaggtaaatctcttggaacacgcccaccccacgttttcgcaatcgccgataaggcctttcgagacatgaaggtgttgaagatgtcacagtctataattgtctctggggaaagcggggctgggaagacagagaatacaaaattcgtgttgcgctacctaactgaaagctacggaaccggtcaagatatcgacgaccggatcgtggaggccaaccctctgctagaggcgtttgggaacgctaaaacggtgagaaataacaactcatctagatttggaaagtttgttgagattcacttcaacgagaagagctccgtggtcgggggatttgttagtcattacctgctcgaaaaatcccggatctgtgtgcagggcaaagaagagcgaaactaccacatcttctaccggctgtgtgccggagctagcgaggacattcgcgaaaaactgcacctctctagcccggacaacttcaggtacctcaacaggggatgcactcgatattttgctaacaaagagaccgacaagcagattcttcagaatagaaagtcccccgagtatctgaaggctggctctatgaaagatcccttgctggatgaccatggcgatttcatcagaatgtgtaccgcaatgaagaaaattggtctggacgatgaagaaaagctcgatctgttcagggtggtggccggagtgctccaccttgggaatatagactttgaagaggctgggagcacctctggcggatgcaatttaaaaaataagagtgctcaaagcctcgaatactgcgcggaactgctcgggctggaccaagatgacctccgtgtgtctcttaccacacgggtgatgctcaccacagctggcggaacaaagggcaccgtgatcaaggtaccgctcaaggtggagcaagccaacaacgctagagatgccctggcaaagaccgtgtattctcatttgttcgaccacgtagttaatagagtcaatcagtgctttccatttgagacaagtagttacttcattggcgttcttgacatcgccggattcgagtactttgagcacaactccttcgagcaattctgtatcaactactgcaacgagaagctgcagcaattcttcaacgagcgtatcctcaaagaagagcaagagctttatcagaaagagggcttaggagtgaacgaggttcactatgtcgacaatcaggactgcatcgatctcatagaggccaaattagtgggcatccttgacattctggatgaggaaaaccgcttgccacagccctccgatcagcatttcacctctgccgtccaccagaagcacaaagaccattttcgacttacgatacctcgcaagagcaaattagcggttcatcgcaatatacgggatgatgagggctttattattcgccactttgccggtgcagtctgctatgaaacgactcagttcgttgaaaagaataatgacgccctccacatgtcgctggaaagcctgatctgcgaaagtcgtgacaaattcatccgagaactgtttgagagctctaccaacaacaataaggacacaaagcagaaggctggaaagctgagttttatctccgtcggtaataaattcaagacacagctcaacctcctgctggataaattgcggtccaccggcgcttcattcatcagatgcataaaacccaatttaaaaatgacctcccaccattttgagggtgcccagatcctctcacagctgcagtgctcggggatggtttccgtgctagatctgatgcagggcggttaccccagcagagcctcatttcatgagctgtataatatgtacaaaaagtacatgccggacaagctcgctcggctagacccaagattattttgcaaagccttgttcaaggccttaggcctgaacgagaacgactacaagttcgggctcaccaaggtgttctttcgacccggtaaattcgctgagtttgaccagattatgaagtccgatccagatcacctagcggagctcgtcaagagagtaaaccactggctgacatgctcccggtggaagaaggtccagtggtgctctttatcggtcatcaaactgaagaacaaaatcaagtaccgggctgaggcctgtataaaaatgcagaagactatacggatgtggctgtgtaagagaaggcacaaaccacgcattgacggactcgttaaggtgggaacccttaaaaagcgtttagacaaattcaacgaagtcgtctcagtgctgaaggatggcaagcccgaaatgaacaaacagataaagaatttggagatatcaatagacacactcatggccaagattaaaagcaccatgatgactcaggagcagattcagaaggagtacgacgccctggtcaagagcagcgaagagctgttgtccgctctgcaaaaaaagaaacagcaggaagaggaggcagagaggttgcgtcgaattcaggaggagatggagaaggagaggaaaagaagagaggaggatgagaagcggaggcgcaaggaggaagaagagcgtcgtatgaagctcgagatggaagcaaagcgaaaacaggaggaggaggaacggaagaagagggaggatgatgaaaaacgaatccaggctgaagttgaagcccagcttgcccgtcagaaagaggaggaaagccaacaacaggctgttctagagcaggaacgcagagatagggaattggctctccgcatagcccagagtgaagcagagctgatttcagacgaggctcaggccgatctcgctctgagacggggaccagccgtgctcgccactaaggctgccgcaggtaccaagaaatacgatctgtcaaaatggaaatacgcggagctgcgagatacaattaatacctcttgcgacatcgagttgctcgccgcatgtagggaagagtttcaccggaggctgaaagtctaccatgcttggaaatctaagaataaaaagagaaacaccgagactgagcagcgcgctccgaaatcagtgacagattacgcccagcagaaccctgccgcacagatccccgctaggcaaagagaaattgagatgaatcggcagcaacgcttctttagaatacctttcatccgcccagcagatcagtacaaggacccccaatccaagaagaaggggtggtggtatgcccactttgatggaccctggatcgccagacaaatggaactgcaccctgacaaaccccctattctcctggtagcagggaaagacgacatggagatgtgcgaactgaatctggaagagaccggcctgacccgaaaacgcggagctgaaatactgccacggcaattcgaagaaatttgggaaaggtgcggcggaattcagtatctgcaaaatgccatcgagtcccggcaggctagaccaacttacgccacagccatgctgcagtctttgctaaagtag

SEQ ID NO: 151801 - DNA, 3858 bp, Artificial Sequence
  derived and/or modified sequence
atggaagatggtaagcctgtttgggctccgcaccctacagacggatttcaaatgggcaacatcgtggacataggcccagattcgctaaccatcgaaccgctgaatcaaaagggaaaaaccttcctggccttgattaatcaagtcttccctgccgaggaggatagcaagaaagatgttgaggataactgctctctgatgtatctgaatgaggccacacttctgcacaacattaaagtgcgctactctaaagatagaatatacacgtacgttgccaatatactcattgccgtgaacccctactttgatatacctaagatttacagtagtgaggccatcaaaagctaccaaggcaagtcccttggaacccgccctccacacgtgttcgccattgcagataaggcattccgcgacatgaaagtcctaaagatgagccagagtatcatcgtcagtggcgagagcggcgcaggaaagacagagaatacaaaattcgtcttgaggtacctcacagagtcatatggaaccggtcaggacatcgatgaccgtattgttgaagccaatcctctgctggaggcctttggaaacgcaaagacggtcaggaacaataattcctcaaggttcgggaagtttgtagaaatccacttcaatgagaagagtagcgtggtaggcggtttcgtgtcgcactacttattggagaaatcaaggatttgcgttcaggggaaagaggaacggaactatcatattttttacaggttgtgcgctggggcttccgaggatattcgggaaaaattgcatcttagcagtccagacaactttaggtacctaaatagagggtgtactagatatttcgctaacaaggagaccgacaagcaaatcctgcagaaccggaagtcacctgaatacctgaaagccggaagcatgaaggaccctctgcttgatgaccacggagatttcattcggatgtgcacagccatgaagaaaatcggattagatgatgaggagaagctggaccttttcagggtggttgctggtgtgctacacctgggcaatatagatttcgaggaagccggaagcacatctgggggatgcaatctgaagaataagtctgcccagtccttagagtactgcgccgaactgctgggactggaccaggacgatctcagggtaagcttaacaacgcgggttatgctaacaacagcgggaggtaccaagggtacagtgattaaggttcccttgaaggtagagcaagccaataatgccagggacgccctcgccaaaactgtgtactctcacctatttgaccatgtggtaaaccgcgtcaaccagtgcttccctttcgaaacgtcttcttactttattggtgtgctcgacattgccggatttgagtatttcgaacataattcctttgaacaattctgcatcaactactgcaatgaaaaactccagcaatttttcaatgaacgtatcctcaaggaggaacaggagctgtaccaaaaagaaggcttgggcgtaaacgaggtgcattacgtggacaaccaggattgtatcgacctgatcgaagctaaacttgtgggaatacttgacatcctggatgaagaaaacagactgccgcagccttccgaccagcattttaccagcgcagtgcatcagaagcacaaagatcacttccgacttacaattcctagaaaaagcaagctggcggtgcataggaacatccgggatgacgaaggattcattatcaggcacttcgccggagctgtttgttatgaaactactcaatttgtagaaaagaataatgacgctttgcatatgtcccttgagagcctgatctgtgagtctcgagacaagtttattcgtgaactgtttgagagctcaacaaacaacaacaaagatactaagcaaaaggctggcaaactgtcattcatttccgtcggcaacaagttcaaaactcagctcaacttgctgctcgataaactcaggagtaccggggcatctttcattagatgcataaagcctaacctgaagatgacaagccaccacttcgaaggcgctcaaattctgtcacagctgcagtgcagcggcatggtgagcgtgctcgacttgatgcagggcggatacccatcacgtgctagctttcacgagctatacaatatgtacaaaaaatatatgcccgacaagctcgcgagacttgatcctcgcttgttttgcaaagccctctttaaggctctcggactaaatgagaatgattataaatttggcctgacaaaggtgttcttcaggcccggtaaatttgcagagtttgatcagatcatgaaaagcgaccccgaccatttggccgaactggtaaaacgggtgaatcactggttgacatgcagccgttggaagaaggtgcagtggtgcagtttgtccgttataaagctaaagaataaaatcaagtacagggccgaagcctgtatcaagatgcagaagacgatcaggatgtggctgtgcaagcgcaggcataagcctagaatagacggcctagtcaaggtgggcactctaaagaaaagactcgataaattcaacgaggttgtcagcgtgctgaaggacggtaagccagagatgaataagcagattaagaacttagagatcagcatcgacacgctgatggccaagatcaaatcaacgatgatgacccaggagcagatccaaaaggaatacgacgccctggtcaaaagtagtgaggaactgctttccgcgctgcagaaaaaaaaacaacaggaggaggaagccgagaggcttcgtaggatccaggaagaaatggagaaggagcgcaaaagacgcgaggaagacgagaagagacgtaggaaggaggaggaggaaagacgaatgaagttggagatggaggccaagcggaagcaagaggaagaggagcggaaaaagagggaggatgatgagaaacggatacaggctgaggtagaggctcagttagccaggcaaaaggaggaagaaagtcagcaacaggccgttctggaacaagagaggagagaccgagagcttgccctgagaattgctcaatcagaggccgagttgatctccgatgaggcacaagccgaccttgcactgcggcgtaatgacggcacccgacccaaaatgacaccagaacagatggctaaagaaatgtctgagttcctgtcgagaggcccagccgtactggccacaaaagctgccgctggcactaagaagtatgatctcagcaagtggaagtacgcagagttgcgggacacgatcaatacttcctgcgacatcgaattgctggctgcgtgcagggaggagttccatcggcgactcaaagtgtatcacgcctggaagtcaaagaacaagaaacgtaataccgagaccgagcaaagagccccaaagtctgtgaccgactacgattttgccccattcttgaataacagccctcagcagaacccagctgcccaaatccctgctcggcaaagagaaattgaaatgaatcgtcagcagcgttttttccggatccctttcattcgtccggcagaccagtacaaggatccacagtctaaaaagaaaggctggtggtacgcccatttcgatggcccttggattgcgaggcagatggaattgcatcccgataaaccccctattctattggttgctgggaaagacgacatggagatgtgtgaactgaacctcgaggaaacaggcctgaccagaaagcgaggggctgaaattcttcccagacaattcgaggagatctgggaacgctgtggaggtatccagtatctccagaatgccatcgaatcacgccaggctaggccaacatatgccacagccatgctccagtccctcctcaaatag

SEQ ID NO: 151802 - DNA, 3861 bp, Artificial Sequence
  derived and/or modified sequence
atggaggatggcaagcctgtgtgggcaccacaccccacagacggctttcagatgggcaacatcgttgacatagggccagacagcctgaccattgagcctctcaaccagaagggcaagacatttctagcgcttattaatcaggttttccctgccgaggaggattctaaaaaggacgtcgaggataattgctctttgatgtacttaaatgaggctaccctcctgcataatataaaggtgaggtacagtaaagaccgcatttacacctatgtggctaacatcctcattgcagtgaacccttattttgacatcccgaaaatctactcttctgaagccatcaagagctatcagggaaagagcctgggcactcggccaccacacgtcttcgcgatcgctgacaaggctttccgagatatgaaggttttgaagatgtcccaatctatcattgtaagcggggaatcaggcgctggcaaaacagaaaatacaaaattcgtgctgagatacctcacagaatcttacggcaccgggcaagatatcgatgaccgaatcgtcgaagctaacccccttcttgaagccttcggcaacgccaaaaccgttcggaataataactcatcccgttttggcaagtttgttgaaatacactttaacgaaaagtcttcagttgtgggtggcttcgtgagtcactaccttctggagaagagccgaatatgtgtgcagggcaaagaggagcgcaattatcacattttttacagactgtgcgctggagcttccgaggatatccgcgaaaaacttcacctgtcgagtccagacaatttcaggtaccttaaccggggttgtacaagatactttgccaataaagaaactgacaagcagatcctacagaaccgaaagtctcccgagtatctcaaagccggttctatgaaagaccctttattagacgatcatggcgacttcataagaatgtgcaccgccatgaaaaagattggcctggatgatgaggagaaactggacctgttccgcgttgtggctggtgttctgcacctaggaaatattgacttcgaggaagcaggctccacctctgggggatgcaacctgaaaaataaatctgcgcaatctctagaatactgtgctgagctgctcgggttggaccaagacgacttgagagtttctttgacaacacgcgtaatgctaaccaccgccggagggaccaagggcactgtcatcaaggtgcctctgaaagtggaacaggctaacaacgcgagagacgccttagcgaagaccgtctacagtcatctgttcgaccatgtggttaaccgcgtgaatcaatgtttcccttttgagacatcctcatattttattggcgtacttgacattgcgggattcgagtatttcgagcataattccttcgaacaattctgtatcaattactgcaatgaaaagctccagcagttcttcaacgagagaatattgaaggaagaacaggaactttatcaaaaggaagggctgggcgttaatgaagtccattacgtcgataaccaggactgtatagacttgatcgaggctaagctcgttgggatactcgacatattggacgaggagaatcggctgccacagccgagcgaccagcacttcacgtccgccgtgcaccaaaagcacaaggatcattttagactgactattccaaggaaatcaaagcttgcagtccataggaacatacgagacgacgaaggtttcattatcaggcacttcgccggagctgtctgttatgagaccacgcagtttgtggagaagaacaacgacgcactgcacatgagtctggaaagccttatctgcgaatctcgagacaaattcatccgggagctctttgagtcctccacaaacaacaacaaggatactaagcagaaggccggaaaattgtcattcatctctgtaggcaacaagttcaagactcaattgaatctgctattggataagctgaggagcaccggggcttctttcatccgctgcatcaaacccaacctcaagatgacgtcgcaccacttcgaaggcgctcagatcctaagccagcttcagtgctctgggatggtgagcgttctggacctcatgcagggagggtatccctcacgggctagctttcacgaactgtacaacatgtacaaaaaatatatgcccgacaaattagcccgtctggatcctagactattctgtaaagctctcttcaaggcattgggtcttaatgagaatgactacaaatttggtttaacaaaagtcttttttcgccctggtaaattcgccgagtttgatcagattatgaagagtgaccctgaccatttagccgagctggttaaacgagtgaaccattggctcacctgcagccgctggaagaaggtgcagtggtgttcgttgagtgtcattaaattaaagaataagatcaaatacagggcagaggcctgcatcaagatgcagaaaaccatccgcatgtggctgtgtaagcgcagacataagccgagaatcgacggccttgtaaaggtcggaacactgaagaagagactggacaagtttaacgaagtggtgtctgtcttgaaggacggcaagcctgagatgaacaaacagattaaaaacctcgaaatttccattgataccctgatggccaagatcaagagcacgatgatgactcaggagcagatccagaaggagtacgacgctttggtgaaaagtagcgaagaactgttgagcgctcttcaaaagaagaagcagcaggaagaagaggccgaacgtcttcgaagaatacaagaggaaatggaaaaggaacggaagaggagagaagaagatgagaagaggcggagaaaggaagaggaggagagacgcatgaagctggaaatggaagcaaaacgcaaacaggaggaggaagaacggaaaaagcgagaggacgatgagaaaagaattcaagccgaggttgaagcccaattggccaggcaaaaagaggaggagtctcagcagcaggccgtcctggagcaggagcgcagagaccgcgagctcgcacttagaatcgcgcaaagtgaagccgagctcatctccgacgaggcccaggcagatctcgcactgcgcagatacttagatagctatccagtgactagcaaaaatgacggcacaagacccaaaatgacaccagaacaaatggctaaggagatgtccgagtttctttccagagggccagccgtcttggccaccaaggctgccgctgggaccaagaaatacgatttgtctaagtggaaatatgctgaacttagggatacaatcaacacctcttgcgacattgagctcttggctgcatgtagagaggagttccatcggagactgaaagtgtaccacgcctggaagagcaagaataaaaagcgtaacaccgagaccgagcaacgggcaccaaagtcagtcacagactacgctcagcagaacccagctgctcaaatccccgcaagacagcgagaaatagaaatgaaccggcagcagcggtttttccggatacctttcatccgacctgcagaccaatacaaagacccacagtctaagaaaaaagggtggtggtacgctcactttgacggaccatggatcgcgaggcaaatggaacttcaccccgataagccccctattctcctggtagctgggaaggacgacatggagatgtgtgagctgaacctcgaagaaacgggcttgactcgaaagcgtggagccgagatcttgcccaggcaatttgaagagatctgggaacgatgcggaggtattcaatatttacagaatgcaatagagtctcgccaggcacgacccacttacgcaacagccatgcttcagtcactgttaaaatag

SEQ ID NO: 151803 - DNA, 3789 bp, Artificial Sequence
  derived and/or modified sequence
atggaggatggtaagcctgtttgggctccacaccctaccgatggattccagatggggaacatcgtggatataggacctgatagcctcactattgagccccttaatcagaaaggcaaaactttcctggccctcataaatcaagtcttcccagccgaggaagactcaaagaaggacgtggaggataactgctcactaatgtacctgaacgaggccacgttgctgcacaatatcaaggttaggtattccaaggatagaatatatacttacgtcgcaaacatcctcatagccgtcaatccttacttcgacattcctaaaatctacagttccgaagccattaaatcttatcagggcaaaagcctgggcactagacctccccatgtcttcgctatagccgacaaggcattccgagacatgaaggtactcaaaatgtctcagagcatcatagtgtcgggtgagtccggagccggaaagaccgagaacacaaaattcgtcctacggtatttaacagaaagttatgggaccggccaggatattgatgaccgcatcgtggaggctaaccccctccttgaggcttttggcaacgccaaaaccgtccggaataataactcctcgcgctttggaaaattcgtggaaatccactttaatgaaaaatcgtcagtcgtcggtggtttcgtgagtcattatcttttggaaaaaagccggatatgtgtgcagggcaaggaagagagaaattatcacatcttttatcgtctctgcgccggtgcaagtgaggacatccgggagaaactccacctcagctcgcctgacaatttccgttacctgaatagaggatgtaccagatacttcgctaacaaagaaactgataaacagatcctgcaaaacagaaagtctccagaatacctgaaggccggttccatgaaagacccgctcctggatgaccacggagacttcatcagaatgtgtaccgccatgaaaaagattggccttgacgacgaagagaagctcgacttattccgtgtcgtggccggagtgctccatctcggaaacatagattttgaggaagctgggagcacctctgggggttgtaacctgaagaataaaagcgctcaatctctggaatattgcgccgaactgctgggacttgaccaggacgatctgagggtatctctgactacacgggtgatgctgaccactgccggtggcacaaaggggaccgtgatcaaagtgccactgaaagtggaacaggccaacaacgcgagggacgcactagccaagaccgtctattcacatcttttcgatcatgtggtcaaccgcgtcaaccagtgttttccattcgaaacctcctcttatttcattggtgtacttgatatagcgggtttcgagtacttcgagcataacagctttgagcagttctgtattaattactgcaacgagaagcttcagcagtttttcaatgagcgaatcctcaaggaggaacaagaactttaccagaaggagggactcggagtgaatgaagtgcattacgtggacaatcaggattgcatcgatctcattgaagctaagctcgtggggatcctagacatcttggacgaagaaaatcggctgccacagccatccgaccagcatttcacaagtgcagttcatcagaagcacaaagaccacttccgcctcaccatcccacgcaaatcaaagttggccgtgcaccggaatatacgcgacgatgagggctttatcatacggcattttgcaggcgctgtgtgctacgaaacaacacaatttgtggaaaaaaacaacgatgcgcttcatatgtccctcgagtccttgatctgcgagagtcgagacaaatttatcagggagctgttcgaatctagtacaaataacaacaaggatactaagcagaaagccggaaagttgtcattcatttctgtcggaaacaagtttaagacacagctaaacctacttcttgacaagttaagatcaaccggggctagcttcatcaggtgcatcaaaccaaatttgaaaatgactagccaccatttcgaaggagcccaaatactgtcacagctacaatgttctggaatggtgagcgtgttggacttaatgcagggcggataccccagccgggctagtttccacgaactgtacaacatgtacaagaaatacatgcccgacaagctggcgcgactggacccaaggcttttctgcaaggcactcttcaaggccctgggattgaacgagaacgattataagttcgggctgacaaaagttttctttcgccctggtaagtttgccgagtttgaccagatcatgaaatctgacccagaccatctcgcagaactggtgaagcgggtgaaccattggctgacctgtagtcgctggaagaaagtacagtggtgctccctgtcggtcataaagttgaagaacaaaattaagtacagagccgaggcgtgtataaagatgcaaaagacaattagaatgtggctctgcaaaagacggcacaagccgaggatcgacgggctggttaaggtagggaccttaaaaaaacgattggacaaatttaatgaggtcgtctccgttcttaaggacggtaagcctgaaatgaacaaacaaatcaagaatcttgagatatcaattgatacactcatggccaaaatcaagtcgacaatgatgacccaagagcagatccaaaaagaatatgatgcgctggtaaaatcaagtgaggaacttctttcagctttgcagaagaaaaagcagcaggaggaggaggccgagcgattgagaaggatccaagaagagatggagaaggaaaggaagagacgggaagaggacgaaaagcgccgaaggaaggaggaggaggagaggcgaatgaaactggaaatggaggcgaagaggaagcaggaggaggaagagaggaagaaaagagaagacgatgagaagcggatccaggctgaagtggaagcacagttggctcgccaaaaggaggaggaaagccagcagcaggcggttcttgaacaagagcgacgggaccgcgagcttgctctgagaatagcccagtcagaggctgagttgatctcagacgaggcccaggctgacctggcactgcgcaggggccctgcagtcttagctacaaaagctgcagctggcacaaaaaaatatgatttgtctaaatggaagtacgccgagctgcgagatacgattaacacatcgtgtgatattgaactccttgccgcatgcagggaggaatttcatcggagactgaaggtgtatcatgcgtggaagtctaaaaacaagaaacggaataccgaaaccgagcagcgagctccgaaatccgtgaccgactacgacttcgcaccatttctgaataattccccacaacagaaccccgcagcccaaatccctgccagacagagagagattgagatgaacaggcagcagagattctttcggattcctttcatccgtcccgctgaccagtacaaggaccctcagtctaagaagaaaggctggtggtatgctcactttgacggtccgtggatcgctagacagatggagctacatccagacaaaccccctatccttctggtggcgggaaaagatgatatggaaatgtgcgagttaaacctggaagagacagggctgacaaggaaaaggggtgccgagatcctcccccgtcaattcgaggagatctgggagcgctgtggcggtatccagtatttgcaaaatgcgatcgagtcacgacaagccagacctacatatgccacagcaatgctgcagagtttgctgaagtag

SEQ ID NO: 151804 - DNA, 3888 bp, Artificial Sequence
  derived and/or modified sequence
atggaggacggtaagcccgtctgggcccctcatcctaccgacgggtttcagatggggaacatcgtggacataggaccagattcgcttacaatcgagccactcaatcagaaaggcaagaccttcctcgccctcatcaatcaagtgtttcccgctgaagaggattccaagaaagacgtggaagataactgctcacttatgtacctcaatgaagctacattgttacacaacatcaaagttcgatactccaaagacaggatttatacgtatgttgccaatatcctcatagcagtgaatccatactttgatattccaaaaatatattccagcgaggctatcaaaagctaccaggggaagagtttggggactcggccaccccatgtgttcgctatcgctgacaaggccttccgggacatgaaggtcttgaagatgagccagtcaattattgtgtcgggggagagtggtgccggaaagaccgagaatacaaagttcgtactgcgctatctgaccgagtcctacggaactggtcaggacatagatgatcgtattgtggaggctaatccactcctagaggcattcggaaatgctaaaaccgtgcggaacaataatagctcgcgattcggtaagtttgttgaaatccactttaatgagaagagctctgtcgtgggaggcttcgtcagtcactatctgttggaaaaatcacgtatttgtgtgcagggaaaggaggaacgcaactaccatatcttctacaggctttgcgccggtgcgtcagaggatatacgcgagaagctccacttatctagtccggacaatttccgctacctcaaccgcggttgcactagatattttgcaaacaaggagactgataagcagattttgcagaatcgcaaatcgcctgagtacttgaaggcaggcagtatgaaggaccccctgttagacgatcacggagactttatccgtatgtgtacagcaatgaagaaaataggccttgatgacgaagaaaaactggatcttttcagagtggtggctggcgttctccacctgggcaacattgattttgaggaggcgggttccaccagtggcggatgcaacctgaaaaacaaatcagcccagagcctcgagtattgtgccgaattgctggggctggaccaagatgatctgcgcgttagcctgacaactcgcgtgatgctgactaccgccggtggcacaaaaggtaccgtgatcaaggtgccactgaaggtggagcaggcaaacaatgcccgagatgccttggcaaaaacagtgtactcgcacctctttgaccatgtggtgaacagagtgaatcaatgcttccctttcgaaacctccagttacttcatcggggtcctggatatcgcgggatttgagtacttcgagcacaattcattcgagcagttctgcataaactattgcaacgaaaaactgcaacagttttttaatgagcggatcctgaaagaagaacaggaactgtatcagaaggaaggcctgggcgttaatgaagttcactatgtggacaatcaggattgtatcgatctcatagaggctaagcttgttgggatattagatatactggatgaggaaaacagacttcctcaaccatccgatcagcactttaccagcgcagtgcatcaaaagcacaaagaccatttccgcctcacgatccctcgaaaaagcaagctggcagtgcatcgaaatattagggatgacgaaggctttataatccgccatttcgcaggagcggtctgttacgagaccacccaattcgtggagaagaacaatgatgctttacacatgagcttagaaagtctgatctgtgagtctagagacaagttcattcgtgagctgtttgaaagctctacgaacaacaataaggataccaagcagaaagccggaaagctgtcctttataagtgtcggtaacaagttcaaaacacaactgaacctgctgctggataaattgcgctcaaccggcgcttctttcataagatgcatcaagccgaatctaaaaatgaccagtcaccactttgaaggcgctcagatactcagccaactccagtgttctggcatggtgagcgtccttgatttgatgcaaggtggttatccgtcacgcgcaagcttccacgagctctacaacatgtataaaaaatacatgcccgacaagcttgcgcgacttgacccgcgtcttttttgcaaggcgttgttcaaagccctaggtctgaatgaaaatgattacaaatttgggctgactaaggtcttcttccgcccagggaagtttgcggagtttgatcaaattatgaagagtgatccagatcatctcgccgagcttgtcaaacgggttaatcactggttgacctgttcacggtggaaaaaggtccagtggtgcagcctctccgtgattaagctcaaaaacaaaattaaatatagggctgaagcatgcatcaagatgcaaaagaccatcaggatgtggctttgcaagcggcgacataagccaagaatcgacggactggtgaaagtgggcactcttaagaagcggttagataagttcaacgaggttgtgtccgttctcaaggacggaaaaccagaaatgaataagcaaattaagaaccttgaaatcagtatcgacactctgatggctaagattaagtcaacaatgatgacccaggagcaaatccagaaggagtacgatgccttagttaaaagcagcgaggaactcctgtccgcattacaaaaaaagaaacagcaggaagaagaggcagaacgcttgcggaggatccaggaagagatggagaaagaaagaaaacggagagaagaggatgagaaacgtcgcagaaaggaggaagaagaacgacggatgaagttggagatggaggcgaagcggaaacaggaggaggaggagaggaagaagcgtgaagacgacgagaagagaatccaggccgaggtcgaagcccaattggctaggcaaaaagaagaagagtcccagcagcaggcggtcttagagcaggagagaagggaccgcgagctggcactccgcatcgcacagtcagaagcggaattaatctctgacgaggcacaggccgacctggccctccgaaggtacttggactcttatccagtaacatcaaagaacgatggaactagacccaagatgacgccggaacaaatggctaaggaaatgtccgagttcctgtcccgcggacctgccgtcctcgccacaaaggcagctgcaggcactaagaaatacgacttaagtaagtggaagtatgccgaattgcgggacaccattaatacatcttgtgacatagagctcctcgccgcttgccgcgaggagttccaccgccgactcaaggtttatcatgcctggaaaagtaagaacaagaagcgcaataccgaaaccgagcagcgcgcaccaaagagcgtaacagactatgattttgctccatttttgaacaattcccctcagcagaatcccgctgcccagatacccgctcgtcagcgagaaattgagatgaacaggcaacagagatttttccgcatcccctttatccgcccagcggaccagtacaaagaccctcagagtaaaaaaaaaggatggtggtatgcccattttgacggaccatggatcgcaagacagatggagctgcaccccgacaaaccgccaattctgctcgtagccggaaaagatgacatggagatgtgcgaattgaacctggaagaaaccggtttaacccgaaagcggggtgccgagattctgcctcgacagttcgaggaaatttgggagagatgcgggggtatacagtacctgcagaatgccatagaatctaggcaagcaagaccaacctacgcaaccgccatgcttcagagtttgcttaaatag

SEQ ID NO: 151805 - DNA, 3762 bp, Artificial Sequence
  derived and/or modified sequence
atggaggacggcaagcccgtgtgggccccccaccccaccgacggcttccagatgggcaacatcgtggacatcggccccgacagcctgaccatcgagcccctgaaccagaagggcaagaccttcctggccctgatcaaccaggtgttccccgccgaggaggacagcaagaaggacgtggaggacaactgcagcctgatgtacctgaacgaggccaccctgctgcacaacatcaaggtgagatacagcaaggacagaatctacacctacgtggccaacatcctgatcgccgtgaacccctacttcgacatccccaagatctacagcagcgaggccatcaagagctaccagggcaagagcctgggcaccagacccccccacgtgttcgccatcgccgacaaggccttcagagacatgaaggtgctgaagatgagccagagcatcatcgtgagcggcgagagcggcgccggcaagaccgagaacaccaagttcgtgctgagatacctgaccgagagctacggcaccggccaggacatcgacgacagaatcgtggaggccaaccccctgctggaggccttcggcaacgccaagaccgtgagaaacaacaacagcagcagattcggcaagttcgtggagatccacttcaacgagaagagcagcgtggtgggcggcttcgtgagccactacctgctggagaagagcagaatctgcgtgcagggcaaggaggagagaaactaccacatcttctacagactgtgcgccggcgccagcgaggacatcagagagaagctgcacctgagcagccccgacaacttcagatacctgaacagaggctgcaccagatacttcgccaacaaggagaccgacaagcagatcctgcagaacagaaagagccccgagtacctgaaggccggcagcatgaaggaccccctgctggacgaccacggcgacttcatcagaatgtgcaccgccatgaagaagatcggcctggacgacgaggagaagctggacctgttcagagtggtggccggcgtgctgcacctgggcaacatcgacttcgaggaggccggcagcaccagcggcggctgcaacctgaagaacaagagcgcccagagcctggagtactgcgccgagctgctgggcctggaccaggacgacctgagagtgagcctgaccaccagagtgatgctgaccaccgccggcggcaccaagggcaccgtgatcaaggtgcccctgaaggtggagcaggccaacaacgccagagacgccctggccaagaccgtgtacagccacctgttcgaccacgtggtgaacagagtgaaccagtgcttccccttcgagaccagcagctacttcatcggcgtgctggacatcgccggcttcgagtacttcgagcacaacagcttcgagcagttctgcatcaactactgcaacgagaagctgcagcagttcttcaacgagagaatcctgaaggaggagcaggagctgtaccagaaggagggcctgggcgtgaacgaggtgcactacgtggacaaccaggactgcatcgacctgatcgaggccaagctggtgggcatcctggacatcctggacgaggagaacagactgccccagcccagcgaccagcacttcaccagcgccgtgcaccagaagcacaaggaccacttcagactgaccatccccagaaagagcaagctggccgtgcacagaaacatcagagacgacgagggcttcatcatcagacacttcgccggcgccgtgtgctacgagaccacccagttcgtggagaagaacaacgacgccctgcacatgagcctggagagcctgatctgcgagagcagagacaagttcatcagagagctgttcgagagcagcaccaacaacaacaaggacaccaagcagaaggccggcaagctgagcttcatcagcgtgggcaacaagttcaagacccagctgaacctgctgctggacaagctgagaagcaccggcgccagcttcatcagatgcatcaagcccaacctgaagatgaccagccaccacttcgagggcgcccagatcctgagccagctgcagtgcagcggcatggtgagcgtgctggacctgatgcagggcggctaccccagcagagccagcttccacgagctgtacaacatgtacaagaagtacatgcccgacaagctggccagactggaccccagactgttctgcaaggccctgttcaaggccctgggcctgaacgagaacgactacaagttcggcctgaccaaggtgttcttcagacccggcaagttcgccgagttcgaccagatcatgaagagcgaccccgaccacctggccgagctggtgaagagagtgaaccactggctgacctgcagcagatggaagaaggtgcagtggtgcagcctgagcgtgatcaagctgaagaacaagatcaagtacagagccgaggcctgcatcaagatgcagaagaccatcagaatgtggctgtgcaagagaagacacaagcccagaatcgacggcctggtgaaggtgggcaccctgaagaagagactggacaagttcaacgaggtggtgagcgtgctgaaggacggcaagcccgagatgaacaagcagatcaagaacctggagatcagcatcgacaccctgatggccaagatcaagagcaccatgatgacccaggagcagatccagaaggagtacgacgccctggtgaagagcagcgaggagctgctgagcgccctgcagaagaagaagcagcaggaggaggaggccgagagactgagaagaatccaggaggagatggagaaggagagaaagagaagagaggaggacgagaagagaagaagaaaggaggaggaggagagaagaatgaagctggagatggaggccaagagaaagcaggaggaggaggagagaaagaagagagaggacgacgagaagagaatccaggccgaggtggaggcccagctggccagacagaaggaggaggagagccagcagcaggccgtgctggagcaggagagaagagacagagagctggccctgagaatcgcccagagcgaggccgagctgatcagcgacgaggcccaggccgacctggccctgagaagaggccccgccgtgctggccaccaaggccgccgccggcaccaagaagtacgacctgagcaagtggaagtacgccgagctgagagacaccatcaacaccagctgcgacatcgagctgctggccgcctgcagagaggagttccacagaagactgaaggtgtaccacgcctggaagagcaagaacaagaagagaaacaccgagaccgagcagagagcccccaagagcgtgaccgactacgcccagcagaaccccgccgcccagatccccgccagacagagagagatcgagatgaacagacagcagagattcttcagaatccccttcatcagacccgccgaccagtacaaggacccccagagcaagaagaagggctggtggtacgcccacttcgacggcccctggatcgccagacagatggagctgcaccccgacaagccccccatcctgctggtggccggcaaggacgacatggagatgtgcgagctgaacctggaggagaccggcctgaccagaaagagaggcgccgagatcctgcccagacagttcgaggagatctgggagagatgcggcggcatccagtacctgcagaacgccatcgagagcagacaggccagacccacctacgccaccgccatgctgcagagcctgctgaagtag

SEQ ID NO: 151806 - DNA, 3858 bp, Artificial Sequence
  derived and/or modified sequence
atggaggacggcaagcccgtgtgggccccccaccccaccgacggcttccagatgggcaacatcgtggacatcggccccgacagcctgaccatcgagcccctgaaccagaagggcaagaccttcctggccctgatcaaccaggtgttccccgccgaggaggacagcaagaaggacgtggaggacaactgcagcctgatgtacctgaacgaggccaccctgctgcacaacatcaaggtgagatacagcaaggacagaatctacacctacgtggccaacatcctgatcgccgtgaacccctacttcgacatccccaagatctacagcagcgaggccatcaagagctaccagggcaagagcctgggcaccagacccccccacgtgttcgccatcgccgacaaggccttcagagacatgaaggtgctgaagatgagccagagcatcatcgtgagcggcgagagcggcgccggcaagaccgagaacaccaagttcgtgctgagatacctgaccgagagctacggcaccggccaggacatcgacgacagaatcgtggaggccaaccccctgctggaggccttcggcaacgccaagaccgtgagaaacaacaacagcagcagattcggcaagttcgtggagatccacttcaacgagaagagcagcgtggtgggcggcttcgtgagccactacctgctggagaagagcagaatctgcgtgcagggcaaggaggagagaaactaccacatcttctacagactgtgcgccggcgccagcgaggacatcagagagaagctgcacctgagcagccccgacaacttcagatacctgaacagaggctgcaccagatacttcgccaacaaggagaccgacaagcagatcctgcagaacagaaagagccccgagtacctgaaggccggcagcatgaaggaccccctgctggacgaccacggcgacttcatcagaatgtgcaccgccatgaagaagatcggcctggacgacgaggagaagctggacctgttcagagtggtggccggcgtgctgcacctgggcaacatcgacttcgaggaggccggcagcaccagcggcggctgcaacctgaagaacaagagcgcccagagcctggagtactgcgccgagctgctgggcctggaccaggacgacctgagagtgagcctgaccaccagagtgatgctgaccaccgccggcggcaccaagggcaccgtgatcaaggtgcccctgaaggtggagcaggccaacaacgccagagacgccctggccaagaccgtgtacagccacctgttcgaccacgtggtgaacagagtgaaccagtgcttccccttcgagaccagcagctacttcatcggcgtgctggacatcgccggcttcgagtacttcgagcacaacagcttcgagcagttctgcatcaactactgcaacgagaagctgcagcagttcttcaacgagagaatcctgaaggaggagcaggagctgtaccagaaggagggcctgggcgtgaacgaggtgcactacgtggacaaccaggactgcatcgacctgatcgaggccaagctggtgggcatcctggacatcctggacgaggagaacagactgccccagcccagcgaccagcacttcaccagcgccgtgcaccagaagcacaaggaccacttcagactgaccatccccagaaagagcaagctggccgtgcacagaaacatcagagacgacgagggcttcatcatcagacacttcgccggcgccgtgtgctacgagaccacccagttcgtggagaagaacaacgacgccctgcacatgagcctggagagcctgatctgcgagagcagagacaagttcatcagagagctgttcgagagcagcaccaacaacaacaaggacaccaagcagaaggccggcaagctgagcttcatcagcgtgggcaacaagttcaagacccagctgaacctgctgctggacaagctgagaagcaccggcgccagcttcatcagatgcatcaagcccaacctgaagatgaccagccaccacttcgagggcgcccagatcctgagccagctgcagtgcagcggcatggtgagcgtgctggacctgatgcagggcggctaccccagcagagccagcttccacgagctgtacaacatgtacaagaagtacatgcccgacaagctggccagactggaccccagactgttctgcaaggccctgttcaaggccctgggcctgaacgagaacgactacaagttcggcctgaccaaggtgttcttcagacccggcaagttcgccgagttcgaccagatcatgaagagcgaccccgaccacctggccgagctggtgaagagagtgaaccactggctgacctgcagcagatggaagaaggtgcagtggtgcagcctgagcgtgatcaagctgaagaacaagatcaagtacagagccgaggcctgcatcaagatgcagaagaccatcagaatgtggctgtgcaagagaagacacaagcccagaatcgacggcctggtgaaggtgggcaccctgaagaagagactggacaagttcaacgaggtggtgagcgtgctgaaggacggcaagcccgagatgaacaagcagatcaagaacctggagatcagcatcgacaccctgatggccaagatcaagagcaccatgatgacccaggagcagatccagaaggagtacgacgccctggtgaagagcagcgaggagctgctgagcgccctgcagaagaagaagcagcaggaggaggaggccgagagactgagaagaatccaggaggagatggagaaggagagaaagagaagagaggaggacgagaagagaagaagaaaggaggaggaggagagaagaatgaagctggagatggaggccaagagaaagcaggaggaggaggagagaaagaagagagaggacgacgagaagagaatccaggccgaggtggaggcccagctggccagacagaaggaggaggagagccagcagcaggccgtgctggagcaggagagaagagacagagagctggccctgagaatcgcccagagcgaggccgagctgatcagcgacgaggcccaggccgacctggccctgagaagaaacgacggcaccagacccaagatgacccccgagcagatggccaaggagatgagcgagttcctgagcagaggccccgccgtgctggccaccaaggccgccgccggcaccaagaagtacgacctgagcaagtggaagtacgccgagctgagagacaccatcaacaccagctgcgacatcgagctgctggccgcctgcagagaggagttccacagaagactgaaggtgtaccacgcctggaagagcaagaacaagaagagaaacaccgagaccgagcagagagcccccaagagcgtgaccgactacgacttcgcccccttcctgaacaacagcccccagcagaaccccgccgcccagatccccgccagacagagagagatcgagatgaacagacagcagagattcttcagaatccccttcatcagacccgccgaccagtacaaggacccccagagcaagaagaagggctggtggtacgcccacttcgacggcccctggatcgccagacagatggagctgcaccccgacaagccccccatcctgctggtggccggcaaggacgacatggagatgtgcgagctgaacctggaggagaccggcctgaccagaaagagaggcgccgagatcctgcccagacagttcgaggagatctgggagagatgcggcggcatccagtacctgcagaacgccatcgagagcagacaggccagacccacctacgccaccgccatgctgcagagcctgctgaagtag

SEQ ID NO: 151807 - DNA, 3861 bp, Artificial Sequence
  derived and/or modified sequence
atggaggacggcaagcccgtgtgggccccccaccccaccgacggcttccagatgggcaacatcgtggacatcggccccgacagcctgaccatcgagcccctgaaccagaagggcaagaccttcctggccctgatcaaccaggtgttccccgccgaggaggacagcaagaaggacgtggaggacaactgcagcctgatgtacctgaacgaggccaccctgctgcacaacatcaaggtgagatacagcaaggacagaatctacacctacgtggccaacatcctgatcgccgtgaacccctacttcgacatccccaagatctacagcagcgaggccatcaagagctaccagggcaagagcctgggcaccagacccccccacgtgttcgccatcgccgacaaggccttcagagacatgaaggtgctgaagatgagccagagcatcatcgtgagcggcgagagcggcgccggcaagaccgagaacaccaagttcgtgctgagatacctgaccgagagctacggcaccggccaggacatcgacgacagaatcgtggaggccaaccccctgctggaggccttcggcaacgccaagaccgtgagaaacaacaacagcagcagattcggcaagttcgtggagatccacttcaacgagaagagcagcgtggtgggcggcttcgtgagccactacctgctggagaagagcagaatctgcgtgcagggcaaggaggagagaaactaccacatcttctacagactgtgcgccggcgccagcgaggacatcagagagaagctgcacctgagcagccccgacaacttcagatacctgaacagaggctgcaccagatacttcgccaacaaggagaccgacaagcagatcctgcagaacagaaagagccccgagtacctgaaggccggcagcatgaaggaccccctgctggacgaccacggcgacttcatcagaatgtgcaccgccatgaagaagatcggcctggacgacgaggagaagctggacctgttcagagtggtggccggcgtgctgcacctgggcaacatcgacttcgaggaggccggcagcaccagcggcggctgcaacctgaagaacaagagcgcccagagcctggagtactgcgccgagctgctgggcctggaccaggacgacctgagagtgagcctgaccaccagagtgatgctgaccaccgccggcggcaccaagggcaccgtgatcaaggtgcccctgaaggtggagcaggccaacaacgccagagacgccctggccaagaccgtgtacagccacctgttcgaccacgtggtgaacagagtgaaccagtgcttccccttcgagaccagcagctacttcatcggcgtgctggacatcgccggcttcgagtacttcgagcacaacagcttcgagcagttctgcatcaactactgcaacgagaagctgcagcagttcttcaacgagagaatcctgaaggaggagcaggagctgtaccagaaggagggcctgggcgtgaacgaggtgcactacgtggacaaccaggactgcatcgacctgatcgaggccaagctggtgggcatcctggacatcctggacgaggagaacagactgccccagcccagcgaccagcacttcaccagcgccgtgcaccagaagcacaaggaccacttcagactgaccatccccagaaagagcaagctggccgtgcacagaaacatcagagacgacgagggcttcatcatcagacacttcgccggcgccgtgtgctacgagaccacccagttcgtggagaagaacaacgacgccctgcacatgagcctggagagcctgatctgcgagagcagagacaagttcatcagagagctgttcgagagcagcaccaacaacaacaaggacaccaagcagaaggccggcaagctgagcttcatcagcgtgggcaacaagttcaagacccagctgaacctgctgctggacaagctgagaagcaccggcgccagcttcatcagatgcatcaagcccaacctgaagatgaccagccaccacttcgagggcgcccagatcctgagccagctgcagtgcagcggcatggtgagcgtgctggacctgatgcagggcggctaccccagcagagccagcttccacgagctgtacaacatgtacaagaagtacatgcccgacaagctggccagactggaccccagactgttctgcaaggccctgttcaaggccctgggcctgaacgagaacgactacaagttcggcctgaccaaggtgttcttcagacccggcaagttcgccgagttcgaccagatcatgaagagcgaccccgaccacctggccgagctggtgaagagagtgaaccactggctgacctgcagcagatggaagaaggtgcagtggtgcagcctgagcgtgatcaagctgaagaacaagatcaagtacagagccgaggcctgcatcaagatgcagaagaccatcagaatgtggctgtgcaagagaagacacaagcccagaatcgacggcctggtgaaggtgggcaccctgaagaagagactggacaagttcaacgaggtggtgagcgtgctgaaggacggcaagcccgagatgaacaagcagatcaagaacctggagatcagcatcgacaccctgatggccaagatcaagagcaccatgatgacccaggagcagatccagaaggagtacgacgccctggtgaagagcagcgaggagctgctgagcgccctgcagaagaagaagcagcaggaggaggaggccgagagactgagaagaatccaggaggagatggagaaggagagaaagagaagagaggaggacgagaagagaagaagaaaggaggaggaggagagaagaatgaagctggagatggaggccaagagaaagcaggaggaggaggagagaaagaagagagaggacgacgagaagagaatccaggccgaggtggaggcccagctggccagacagaaggaggaggagagccagcagcaggccgtgctggagcaggagagaagagacagagagctggccctgagaatcgcccagagcgaggccgagctgatcagcgacgaggcccaggccgacctggccctgagaagatacctggacagctaccccgtgaccagcaagaacgacggcaccagacccaagatgacccccgagcagatggccaaggagatgagcgagttcctgagcagaggccccgccgtgctggccaccaaggccgccgccggcaccaagaagtacgacctgagcaagtggaagtacgccgagctgagagacaccatcaacaccagctgcgacatcgagctgctggccgcctgcagagaggagttccacagaagactgaaggtgtaccacgcctggaagagcaagaacaagaagagaaacaccgagaccgagcagagagcccccaagagcgtgaccgactacgcccagcagaaccccgccgcccagatccccgccagacagagagagatcgagatgaacagacagcagagattcttcagaatccccttcatcagacccgccgaccagtacaaggacccccagagcaagaagaagggctggtggtacgcccacttcgacggcccctggatcgccagacagatggagctgcaccccgacaagccccccatcctgctggtggccggcaaggacgacatggagatgtgcgagctgaacctggaggagaccggcctgaccagaaagagaggcgccgagatcctgcccagacagttcgaggagatctgggagagatgcggcggcatccagtacctgcagaacgccatcgagagcagacaggccagacccacctacgccaccgccatgctgcagagcctgctgaagtag

SEQ ID NO: 151808 - DNA, 3789 bp, Artificial Sequence
  derived and/or modified sequence
atggaggacggcaagcccgtgtgggccccccaccccaccgacggcttccagatgggcaacatcgtggacatcggccccgacagcctgaccatcgagcccctgaaccagaagggcaagaccttcctggccctgatcaaccaggtgttccccgccgaggaggacagcaagaaggacgtggaggacaactgcagcctgatgtacctgaacgaggccaccctgctgcacaacatcaaggtgagatacagcaaggacagaatctacacctacgtggccaacatcctgatcgccgtgaacccctacttcgacatccccaagatctacagcagcgaggccatcaagagctaccagggcaagagcctgggcaccagacccccccacgtgttcgccatcgccgacaaggccttcagagacatgaaggtgctgaagatgagccagagcatcatcgtgagcggcgagagcggcgccggcaagaccgagaacaccaagttcgtgctgagatacctgaccgagagctacggcaccggccaggacatcgacgacagaatcgtggaggccaaccccctgctggaggccttcggcaacgccaagaccgtgagaaacaacaacagcagcagattcggcaagttcgtggagatccacttcaacgagaagagcagcgtggtgggcggcttcgtgagccactacctgctggagaagagcagaatctgcgtgcagggcaaggaggagagaaactaccacatcttctacagactgtgcgccggcgccagcgaggacatcagagagaagctgcacctgagcagccccgacaacttcagatacctgaacagaggctgcaccagatacttcgccaacaaggagaccgacaagcagatcctgcagaacagaaagagccccgagtacctgaaggccggcagcatgaaggaccccctgctggacgaccacggcgacttcatcagaatgtgcaccgccatgaagaagatcggcctggacgacgaggagaagctggacctgttcagagtggtggccggcgtgctgcacctgggcaacatcgacttcgaggaggccggcagcaccagcggcggctgcaacctgaagaacaagagcgcccagagcctggagtactgcgccgagctgctgggcctggaccaggacgacctgagagtgagcctgaccaccagagtgatgctgaccaccgccggcggcaccaagggcaccgtgatcaaggtgcccctgaaggtggagcaggccaacaacgccagagacgccctggccaagaccgtgtacagccacctgttcgaccacgtggtgaacagagtgaaccagtgcttccccttcgagaccagcagctacttcatcggcgtgctggacatcgccggcttcgagtacttcgagcacaacagcttcgagcagttctgcatcaactactgcaacgagaagctgcagcagttcttcaacgagagaatcctgaaggaggagcaggagctgtaccagaaggagggcctgggcgtgaacgaggtgcactacgtggacaaccaggactgcatcgacctgatcgaggccaagctggtgggcatcctggacatcctggacgaggagaacagactgccccagcccagcgaccagcacttcaccagcgccgtgcaccagaagcacaaggaccacttcagactgaccatccccagaaagagcaagctggccgtgcacagaaacatcagagacgacgagggcttcatcatcagacacttcgccggcgccgtgtgctacgagaccacccagttcgtggagaagaacaacgacgccctgcacatgagcctggagagcctgatctgcgagagcagagacaagttcatcagagagctgttcgagagcagcaccaacaacaacaaggacaccaagcagaaggccggcaagctgagcttcatcagcgtgggcaacaagttcaagacccagctgaacctgctgctggacaagctgagaagcaccggcgccagcttcatcagatgcatcaagcccaacctgaagatgaccagccaccacttcgagggcgcccagatcctgagccagctgcagtgcagcggcatggtgagcgtgctggacctgatgcagggcggctaccccagcagagccagcttccacgagctgtacaacatgtacaagaagtacatgcccgacaagctggccagactggaccccagactgttctgcaaggccctgttcaaggccctgggcctgaacgagaacgactacaagttcggcctgaccaaggtgttcttcagacccggcaagttcgccgagttcgaccagatcatgaagagcgaccccgaccacctggccgagctggtgaagagagtgaaccactggctgacctgcagcagatggaagaaggtgcagtggtgcagcctgagcgtgatcaagctgaagaacaagatcaagtacagagccgaggcctgcatcaagatgcagaagaccatcagaatgtggctgtgcaagagaagacacaagcccagaatcgacggcctggtgaaggtgggcaccctgaagaagagactggacaagttcaacgaggtggtgagcgtgctgaaggacggcaagcccgagatgaacaagcagatcaagaacctggagatcagcatcgacaccctgatggccaagatcaagagcaccatgatgacccaggagcagatccagaaggagtacgacgccctggtgaagagcagcgaggagctgctgagcgccctgcagaagaagaagcagcaggaggaggaggccgagagactgagaagaatccaggaggagatggagaaggagagaaagagaagagaggaggacgagaagagaagaagaaaggaggaggaggagagaagaatgaagctggagatggaggccaagagaaagcaggaggaggaggagagaaagaagagagaggacgacgagaagagaatccaggccgaggtggaggcccagctggccagacagaaggaggaggagagccagcagcaggccgtgctggagcaggagagaagagacagagagctggccctgagaatcgcccagagcgaggccgagctgatcagcgacgaggcccaggccgacctggccctgagaagaggccccgccgtgctggccaccaaggccgccgccggcaccaagaagtacgacctgagcaagtggaagtacgccgagctgagagacaccatcaacaccagctgcgacatcgagctgctggccgcctgcagagaggagttccacagaagactgaaggtgtaccacgcctggaagagcaagaacaagaagagaaacaccgagaccgagcagagagcccccaagagcgtgaccgactacgacttcgcccccttcctgaacaacagcccccagcagaaccccgccgcccagatccccgccagacagagagagatcgagatgaacagacagcagagattcttcagaatccccttcatcagacccgccgaccagtacaaggacccccagagcaagaagaagggctggtggtacgcccacttcgacggcccctggatcgccagacagatggagctgcaccccgacaagccccccatcctgctggtggccggcaaggacgacatggagatgtgcgagctgaacctggaggagaccggcctgaccagaaagagaggcgccgagatcctgcccagacagttcgaggagatctgggagagatgcggcggcatccagtacctgcagaacgccatcgagagcagacaggccagacccacctacgccaccgccatgctgcagagcctgctgaagtag

SEQ ID NO: 151809 - DNA, 3888 bp, Artificial Sequence
  derived and/or modified sequence
atggaggacggcaagcccgtgtgggccccccaccccaccgacggcttccagatgggcaacatcgtggacatcggccccgacagcctgaccatcgagcccctgaaccagaagggcaagaccttcctggccctgatcaaccaggtgttccccgccgaggaggacagcaagaaggacgtggaggacaactgcagcctgatgtacctgaacgaggccaccctgctgcacaacatcaaggtgagatacagcaaggacagaatctacacctacgtggccaacatcctgatcgccgtgaacccctacttcgacatccccaagatctacagcagcgaggccatcaagagctaccagggcaagagcctgggcaccagacccccccacgtgttcgccatcgccgacaaggccttcagagacatgaaggtgctgaagatgagccagagcatcatcgtgagcggcgagagcggcgccggcaagaccgagaacaccaagttcgtgctgagatacctgaccgagagctacggcaccggccaggacatcgacgacagaatcgtggaggccaaccccctgctggaggccttcggcaacgccaagaccgtgagaaacaacaacagcagcagattcggcaagttcgtggagatccacttcaacgagaagagcagcgtggtgggcggcttcgtgagccactacctgctggagaagagcagaatctgcgtgcagggcaaggaggagagaaactaccacatcttctacagactgtgcgccggcgccagcgaggacatcagagagaagctgcacctgagcagccccgacaacttcagatacctgaacagaggctgcaccagatacttcgccaacaaggagaccgacaagcagatcctgcagaacagaaagagccccgagtacctgaaggccggcagcatgaaggaccccctgctggacgaccacggcgacttcatcagaatgtgcaccgccatgaagaagatcggcctggacgacgaggagaagctggacctgttcagagtggtggccggcgtgctgcacctgggcaacatcgacttcgaggaggccggcagcaccagcggcggctgcaacctgaagaacaagagcgcccagagcctggagtactgcgccgagctgctgggcctggaccaggacgacctgagagtgagcctgaccaccagagtgatgctgaccaccgccggcggcaccaagggcaccgtgatcaaggtgcccctgaaggtggagcaggccaacaacgccagagacgccctggccaagaccgtgtacagccacctgttcgaccacgtggtgaacagagtgaaccagtgcttccccttcgagaccagcagctacttcatcggcgtgctggacatcgccggcttcgagtacttcgagcacaacagcttcgagcagttctgcatcaactactgcaacgagaagctgcagcagttcttcaacgagagaatcctgaaggaggagcaggagctgtaccagaaggagggcctgggcgtgaacgaggtgcactacgtggacaaccaggactgcatcgacctgatcgaggccaagctggtgggcatcctggacatcctggacgaggagaacagactgccccagcccagcgaccagcacttcaccagcgccgtgcaccagaagcacaaggaccacttcagactgaccatccccagaaagagcaagctggccgtgcacagaaacatcagagacgacgagggcttcatcatcagacacttcgccggcgccgtgtgctacgagaccacccagttcgtggagaagaacaacgacgccctgcacatgagcctggagagcctgatctgcgagagcagagacaagttcatcagagagctgttcgagagcagcaccaacaacaacaaggacaccaagcagaaggccggcaagctgagcttcatcagcgtgggcaacaagttcaagacccagctgaacctgctgctggacaagctgagaagcaccggcgccagcttcatcagatgcatcaagcccaacctgaagatgaccagccaccacttcgagggcgcccagatcctgagccagctgcagtgcagcggcatggtgagcgtgctggacctgatgcagggcggctaccccagcagagccagcttccacgagctgtacaacatgtacaagaagtacatgcccgacaagctggccagactggaccccagactgttctgcaaggccctgttcaaggccctgggcctgaacgagaacgactacaagttcggcctgaccaaggtgttcttcagacccggcaagttcgccgagttcgaccagatcatgaagagcgaccccgaccacctggccgagctggtgaagagagtgaaccactggctgacctgcagcagatggaagaaggtgcagtggtgcagcctgagcgtgatcaagctgaagaacaagatcaagtacagagccgaggcctgcatcaagatgcagaagaccatcagaatgtggctgtgcaagagaagacacaagcccagaatcgacggcctggtgaaggtgggcaccctgaagaagagactggacaagttcaacgaggtggtgagcgtgctgaaggacggcaagcccgagatgaacaagcagatcaagaacctggagatcagcatcgacaccctgatggccaagatcaagagcaccatgatgacccaggagcagatccagaaggagtacgacgccctggtgaagagcagcgaggagctgctgagcgccctgcagaagaagaagcagcaggaggaggaggccgagagactgagaagaatccaggaggagatggagaaggagagaaagagaagagaggaggacgagaagagaagaagaaaggaggaggaggagagaagaatgaagctggagatggaggccaagagaaagcaggaggaggaggagagaaagaagagagaggacgacgagaagagaatccaggccgaggtggaggcccagctggccagacagaaggaggaggagagccagcagcaggccgtgctggagcaggagagaagagacagagagctggccctgagaatcgcccagagcgaggccgagctgatcagcgacgaggcccaggccgacctggccctgagaagatacctggacagctaccccgtgaccagcaagaacgacggcaccagacccaagatgacccccgagcagatggccaaggagatgagcgagttcctgagcagaggccccgccgtgctggccaccaaggccgccgccggcaccaagaagtacgacctgagcaagtggaagtacgccgagctgagagacaccatcaacaccagctgcgacatcgagctgctggccgcctgcagagaggagttccacagaagactgaaggtgtaccacgcctggaagagcaagaacaagaagagaaacaccgagaccgagcagagagcccccaagagcgtgaccgactacgacttcgcccccttcctgaacaacagcccccagcagaaccccgccgcccagatccccgccagacagagagagatcgagatgaacagacagcagagattcttcagaatccccttcatcagacccgccgaccagtacaaggacccccagagcaagaagaagggctggtggtacgcccacttcgacggcccctggatcgccagacagatggagctgcaccccgacaagccccccatcctgctggtggccggcaaggacgacatggagatgtgcgagctgaacctggaggagaccggcctgaccagaaagagaggcgccgagatcctgcccagacagttcgaggagatctgggagagatgcggcggcatccagtacctgcagaacgccatcgagagcagacaggccagacccacctacgccaccgccatgctgcagagcctgctgaagtag

SEQ ID NO: 151810 - protein, 239 aa, Artificial Sequence
  derived and/or modified sequence
MAGVLKKTTGLVGLAVCNTPHEVCTFVLSSFLNSQGRLNSCHFAYCRVNGIQMFQALNYKPRELLRHGRCPPTSLIRCHIFIYFCHDLFIKPVFLLTFSLTFSWLHLCLLLSAPSQIYISVFHLFSLPYRFCLGALDYIYLGLLKVLPPFPSVRSFPSVFTNVFIKKTHKFFILLVPSIITPFLCFTLQITQKSYLYFLQFLSYSPLNALSHPWRFSSSPIISMLPNPMVSSYFSPSLT

SEQ ID NO: 151811 - protein, 116 aa, Artificial Sequence
  derived and/or modified sequence
MAGVLKKTTGLVGLAVCNTPHERLRILYTKILDVLEEIPKNAAYRKYTEQITNEKLAMVKAEPDVKKLEDQLQGGQLEEVILQAEHELNLARKMREWKLWEPLVEEPPADQWKWPI

SEQ ID NO: 151812 - DNA, 351 bp, Artificial Sequence
  derived and/or modified sequence
atggcaggcgtcttgaaaaaaacaactggcttagtgggtctggctgtgtgtaacacaccacacgagcgcctgaggattctctacaccaaaatcctcgacgtactcgaggagattcctaaaaacgctgcctatcggaaatacacagagcaaatcacaaatgagaagctggcaatggttaaagcggagcctgatgtgaaaaagttggaagaccagctccagggaggacagttagaagaggttatactgcaggcagagcacgagcttaatctcgctcgcaagatgcgggagtggaagctttgggaacctctcgtcgaggagccaccagcagatcagtggaagtggcctatatag

SEQ ID NO: 151813 - DNA, 351 bp, Artificial Sequence
  derived and/or modified sequence
atggccggcgtgctgaagaagaccaccggcctggtgggcctggccgtgtgcaacacccctcatgagcggctgcgcatcctgtacaccaagatcctggatgtgctggaggagatccccaagaatgctgcctacaggaagtacacagagcagatcaccaatgagaagctggccatggtgaaggccgagccagatgtgaagaagctggaggaccagctgcagggcggccagctggaggaggtgatcctgcaggccgagcacgagctgaacctggccaggaagatgagggagtggaagctgtgggagcccctggtggaggagcccccagctgaccagtggaagtggcccatctag

SEQ ID NO: 151814 - DNA, 1901 bp, Artificial Sequence
  derived and/or modified sequence
gtgcgaagaactaacttgctgttgagagatcaattcagaggatgctcaagctccgttatcactttcattttactaaactgagaaaggaaggttgaggaatgcatcaacggttaagcacagtgcaggttcctacagcgactggagttttttggtagttgggagtgtttccctcaatctttgggcaagccgtcagcagtggcaggaacaggaacagacagctgggaaaccctttctttccccaatcgtcttctagcttagctttaggcttgtatgcccatcgcgcatgcgtcaatttttctcttttaagatgggcggggcagagtctttgctcctttggcgatcctgaaggggtggagctaagctgtttccagggtgacagagtggcgacctcggtggtcgattgagcaggtctgagaattgttcccaaagggttgtgcgtcaccgagtcgttggcgctgtcatggcgggtgtgctgaagaagaccactggccttgtgggattggctgtgtgcaatactcctcacgagaggctaagaatattgtacacaaagattcttgatgttcttgaggaaatccctaaaaatgcagcatatagaaagtatacagaacagattacaaatgagaagctggctatggttaaagcggaaccagatgttaaaaaattagaagaccaacttcaaggcggtcaattagaagaggtgattcttcaggctgaacatgaactaaatctggcaagaaaaatgagggaatggaaactatgggagccattagtggaagagcctcctgccgatcagtggaaatggccaatataattattaagtgactttggtgtgttcatgggaaactgatgtaattaaatattctgttatattaagagcgtgttcttattactgacattttgtaatcaagaaaagtgatatagaaaatatgtaggagactgttaaaattggtgattatggtaatatggtcatgtgaatcaatttttgatttataaagtactcacacaagttgtttcaaagatgatatttctgtgaacagagaggccatgggaagatttgaaaattattaaagaaaaattcctacagattttcaatgcagagaccataatcaaaaagtaaactttctttagtagtatgttcaatacatcatttaattttttaagttatcctgaagaaggaaaggtccttaattattatagtctaaacaaatttatagattactgtttgaagtaaataatacgagtgaatattttcaaatgtgataaaatagcacaagtggctggtgataaaatttgaaattatggttaacctcagctgtgatcttatgtatgtaaagtgaaatttaaatagataattataggttgattacaaaatccatagtgtcattttattttagtcattattgaattataccatttactctgttttcttatagtcttaattttattatattttgttgttactgtattatatttgaaaaccttcaaattagaatacattgtacagttaaagaaattgacttggtacttaaaagaaagatttcccattgcatacaggttattggagaaattttccttttgttgcatttgtggaagttagttttctggcccgtggcctttaattttcttaatcaacctaattacatcaggatagaggtagagtttctgtaaaagaagagacattaagagttcctgaaatttatatctggcatacggataggcttatattcaaaacatcttagtcatacgaccataaattaaaagtggagtcactaaatagtttgcagtacgtttctaatataagtgtaggtgggtatcaaaacaagacaaatgctgttcagggaaagaagttggcaagcttaaggttaaacaaaaataaaattacatgtgttttcgccttccta

SEQ ID NO: 151815 - DNA, 351 bp, Artificial Sequence
  derived and/or modified sequence
atggccggcgtgctgaagaagaccaccggcctggtgggcctggccgtgtgtaataccccacacgaaagattacggattttgtacactaaaattttggacgttctggaggaaattcctaagaatgcagcgtaccggaagtatactgagcaaattactaatgagaaattggctatggtcaaggccgagcctgatgttaaaaaattagaagaccaacttcaagggggacagctggaggaggtaatacttcaggcggagcacgagctgaacttggctaggaaaatgcgtgaatggaagttgtgggagccactagtagaagaacccccagccgaccagtggaagtggccaatttag

SEQ ID NO: 151816 - DNA, 351 bp, Artificial Sequence
  derived and/or modified sequence
atggccggtgtgctgaagaaaaccaccggactggtgggcctcgctgtgtgtaatacccctcacgaacggctgagaattctgtataccaagattctggatgtgctcgaggaaatcccaaagaacgctgcctacaggaagtatacggaacagattactaacgagaagctcgccatggtcaaagcggagcccgacgtgaaaaagcttgaggaccagctgcagggcggacaacttgaggaggtgatcctccaggccgagcatgaactgaacctggccagaaagatgagagagtggaaactgtgggaacctctggttgaagagcctcccgcagaccagtggaagtggccgatttag

SEQ ID NO: 151817 - DNA, 351 bp, Artificial Sequence
  derived and/or modified sequence
atggccggcgtgctgaagaagaccaccggcctggtgggcctggccgtgtgcaacaccccccacgagagactgagaatcctgtacaccaagatcctggacgtgctggaggagatccccaagaacgccgcctacagaaagtacaccgagcagatcaccaacgagaagctggccatggtgaaggccgagcccgacgtgaagaagctggaggaccagctgcagggcggccagctggaggaggtgatcctgcaggccgagcacgagctgaacctggccagaaagatgagagagtggaagctgtgggagcccctggtggaggagccccccgccgaccagtggaagtggcccatctag

SEQ ID NO: 151818 - protein, 377 aa, Artificial Sequence
  derived and/or modified sequence
MAAAAQSRVVRVLSMSRSAITAIATSVCHGPPCRQLHHALMPHGKGGRSSVSGIVATVFGATGFLGRYVVNHLGRMGSQVIIPYRCDKYDIMHLRPMGDLGQLLFLEWDARDKDSIRRVVQHSNVVINLIGRDWETKNFDFEDVFVKIPQAIAQLSKEAGVEKFIHVSHLNANIKSSSRYLRNKAVGEKVVRDAFPEAIIVKPSDIFGREDRFLNSFASMHRFGPIPLGSLGWKTVKQPVYVVDVSKGIVNAVKDPDANGKSFAFVGPSRYLLFHLVKYIFAVAHRLFLPFPLPLFAYRWVARVFEISPFEPWITRDKVERMHITDMKLPHLPGLEDLGIQATPLELKAIEVLRRHRTYRWLSAEIEDVKPAKTVNI

SEQ ID NO: 151819 - DNA, 411 bp, Artificial Sequence
  derived and/or modified sequence
atgggcgacagcagaagagacgtgctgcacgagcccgccatcgccctgctgagcagcccccagacccagagcagactgcagatcgacgccttcatcgccagaagatgctggggcagccagtgggacatcaccggctacatccaccagcaggacttccccaccgccgtgttcatcggcttcagcaacgagttcaacatctgcatcccccaccccttcaccgagtggctgcagtgcgtgagaaagtacagccagagctggggcgtgagaaagggccagagacacatcagatacggcatgtgcagcgagagaacccaccacctgagcagaacctacagcagcctgctggagagagaggagaagctggccttctacggcgtgctgaccatgtgccagatctggtgcgagacctag

SEQ ID NO: 151820 - DNA, 1134 bp, Artificial Sequence
  derived and/or modified sequence
atggcagccgccgcgcagtcccgggtagtgcgcgtgctgtccatgagccgctccgcaatcaccgccattgcgaccagtgtctgccatggccctccatgcagacaactccaccacgctcttatgccccacgggaaaggaggaagaagttctgtgtcgggcatcgtagccacagtgttcggggctacagggttcttgggccggtacgtcgtgaaccaccttggtcgcatgggctctcaggtgataattccatacaggtgtgataaatacgatattatgcacctccggccaatgggggacctggggcagctgttatttctggaatgggatgcgcgggacaaggactccattaggcgcgtggtccagcacagtaatgtagtcattaatctcataggtcgggattgggagacaaaaaattttgatttcgaagacgtgttcgtgaagattccgcaggccattgcccaattgagtaaagaggcaggcgtggaaaagttcatccacgtgtcacacctgaacgccaatattaagagtagcagccgttacttaagaaacaaagcggtaggggaaaaggttgttagggacgcctttccggaagccattatcgtgaagcccagtgatattttcggcagggaagaccgtttcctcaattcatttgcaagtatgcataggtttgggcctattccacttgggagcctaggatggaagacagtgaagcagccggtctatgtggtcgatgtgtctaaaggcatagtgaatgctgtgaaagatccggacgctaatggcaagtcctttgcctttgtgggcccctccaggtacctactgttccacttagtcaagtatatttttgccgtagcccaccgcttatttctgccttttcctcttcccttgttcgcatatcgatgggtggccagggtgtttgagatctccccatttgagccctggataacccgagacaaagtggagaggatgcacattacagatatgaaactccctcatctgcccgggttggaggatctggggatccaggcgaccccactggaattaaaagcgatcgaggtactgcgccggcacagaacttataggtggctaagcgccgagattgaggatgtgaagcccgccaaaactgtaaatatttag

SEQ ID NO: 151821 - DNA, 1134 bp, Artificial Sequence
  derived and/or modified sequence
atggctgctgctgcccagagccgggtggtgcgggtgctgtccatgagccgcagcgccatcacagccatcgccacctctgtgtgccacggccccccctgccggcagctgcaccacgccctgatgcctcatggaaaaggaggccgcagctctgtgtctggcatcgtggccaccgtgtttggagccaccggcttcctgggccgctacgtggtgaaccacctgggccgcatgggcagccaggtgatcatcccctaccgctgtgacaagtatgacatcatgcacctgcggcccatgggagacctgggccagctgctcttcctggagtgggatgcccgggacaaggacagcatcagaagagtggtgcagcacagcaatgtggtgatcaacctgattggccgggactgggagaccaagaactttgattttgaagatgtgtttgtgaagatcccccaggccatcgcccagctgagcaaggaggccggcgtggagaagttcatccacgtgagccacctgaatgccaacatcaagagcagcagccgctacctgaggaacaaggctgtgggggagaaggtggtgagagatgccttccctgaggccatcatcgtgaagcccagcgacatcttcggccgggaggaccgcttcctgaacagctttgcctccatgcacagatttggccccatccccctgggcagcctgggctggaagacagtgaagcagcctgtgtatgtggtggatgtgtccaaaggaattgtgaatgctgtgaaggaccctgatgccaacgggaagagctttgcctttgtgggccccagccgctacctgctcttccacctggtgaagtacatctttgctgtggcccacaggctcttcctgcccttccccctgcccctgtttgcctaccgctgggtggcccgggtgtttgagatcagcccctttgagccctggatcacccgggacaaggtggagaggatgcacatcacagacatgaagctgccccacctgcccggcctggaggacctgggcatccaggccacccccctggagctgaaggccatcgaggtgctgcggcggcacaggacctaccgctggctgtctgctgagattgaagatgtgaagccagccaagacagtgaacatctag

SEQ ID NO: 151822 - DNA, 3334 bp, Artificial Sequence
  derived and/or modified sequence
gtgggggattgtgggaaaagatggcggctgccgcacaatcccgggttgtccgggtcctgtcaatgtcacgttctgccattactgcaatagccacatctgtgtgtcacggcccaccctgtcgccagcttcatcatgccctcatgcctcatgggaaaggtggacgttcctcagtcagtgggattgtggccactgtgtttggagcaacaggattcctggggcgatatgttgtcaaccaccttggacgcatggggtcacaggtaatcataccctatcggtgtgataaatatgacatcatgcaccttcgtcccatgggtgacctgggccagcttctgtttctggaatgggacgcgagagataaagattctatccgacgagtagtacaacacagcaatgtggtcatcaatcttattggacgagactgggaaaccaaaaactttgattttgaggatgtttttgtgaagattccccaagcaattgctcaactgtccaaggaagctggagttgaaaaattcattcatgtttcacatctgaatgcgaatattaaaagctcttctagatatttgagaaataaggctgttggagagaaagtagtgagagatgcatttccggaagccattatcgtaaagccgtcggacatctttggaagagaggatagattccttaattcttttgcaagtatgcatcggtttggtcctataccccttggttccttgggctggaagacagttaaacaaccagtatatgtcgtagatgtatccaaaggaattgttaatgcagttaaggatcctgatgccaatgggaaatcctttgctttcgttggtcccagtcggtacctccttttccacctggtgaagtacatctttgctgtggctcacagattgttcctcccattccccttgccgctttttgcctatcgatgggtagcaagagtctttgaaataagcccatttgagccctggataacaagggataaagtggagcggatgcacatcacagacatgaaattgcctcacctgcctggcttagaagaccttggtattcaggcaacaccactggaactcaaggccattgaggtgctgcggcgtcatcgcacttaccgctggctgtctgctgaaattgaggatgtgaagccggccaagaccgtcaacatttagtgcctcctgagcagctcttggttttggcgtcttttgggtcggcccatgtggtttgagcacccagccaggcggtctctttagaggatcctgtacacagttccactattaaaacatttcaggttgaattctgcagtattttcttccttgatttacaaaatgagaaatgtagtcacttagaacttgagcatgatttttgttaaacatatttaataatgatatatatactatttattctctgaaatgccagagagtttgaattttcctatgacaaaccacttctagcatacgttctagaagacaaggaccctttttaatgtcaaagtattgtaaagaccccaagtgatatgtgattgttttttaatttccattaaatgagagagcatacagtatcccctaacctgaatgtgtttacactgaaggtgtttttaaaatttattttaataatgtccatatgccttttaaaaatagtagtacatatatagaaaaacattgtccatagattctcaaaccccttgcagtaattccacagtcttcttggatctgagctatctgaggccagcccgatgcccttagtaccacatctggattatttcagacacataggtggagatagattctcttcacatgcaaaggagatgcttcagcttctatgccagcagtgccagcacttaggaattatgaccttctaatgaagttcttaaaattgcagccaagacccagatgaacatttggtttagtgttggcaaatcccaccagtacagtgtgatttaaaactcccacaatttgtggtgaagccaacataccaccatcctaggtgacccagggttggtcattgtgtttcactggacttcagcctcctgatctatatttgggacagggatgtcagtaaaaacgctgtttgatgagggaatgcccgtctccttacagagagaaaggtatatcagtgttgaaggtaagttctccacctgccctttctgcctgcatcagaatctttttatcccaaaacggtcaacagtgagctactccaagtgtggtccatagatcaccagcattgggatcatcttggggcttgttagaaatgcagaacccgggctgggcacagtggctcacacctgtaatcccaacgcttttgagttgctgtggtgggacggtcgcttgaggccaggagtttgagaccagcctaggcaatatggcaagaccttgtctctacagaaaaatttcaaaaagttagtagggcatggtggcacgcacctgtagtctcagttattcgggaggctaaggtatgatgattgcttgagcctgggagttcaaggttacagtgagctatgatagtgccactgcacttcagcttggactgaagatcctgtctcagaaaaaaaaaaaaaaaaaggcagaatcctaggttttgtcctgtcccaggcgtgttgaatcagaatctgcattttagcaaggtctccaggagatttgtatgcacattacagtatgagaagcactgccatacagaagagctgtatcagagttcagtgtgatccctgttattaatccaggttgctgaccccaccccagacctactgaatcagagtctcaggaaggagggcccaggaattttagttttattaaacattctagtttattctcctgtacactagtatgtcagaatcagcgtactagggaaaggaacacaaacccaacttcacgttttttcttcagatgctgtctgttattttggatgacacccctcctggccataagccagccattaggcacagagatgggtggatttaatttgaaaaggaactataattctataatgcacagtgtcctctcttagaatatctacactttctttcctttttttgattcttaaaaaaaaacttattgatacataatagatgtaaatattgtcagggtatatgtggtaatttgatatattcatataatcaatcagtgtaattgggatatccatcaccttaaacatttacctttatgctagtaacattcaaattactctcttctagctattttgaaatgtacagtagattagtattaactctagttaccctactgatctattgaacaccaggtcttacttcttctgtcttaactgtaattatcttcattttctagcaatgctatttctcatctctaacttgtatcatctcaggatgctgtatatttct

SEQ ID NO: 151823 - DNA, 1134 bp, Artificial Sequence
  derived and/or modified sequence
atggccgccgccgcccagagccgggtggtgcgggtgctgagcatgagccggtctgccattaccgccatagccacatctgtgtgccatggcccaccatgtaggcagttgcaccacgctttgatgccgcatggaaaaggtgggcggtccagcgtttctggcatcgtggctacggtgtttggggccactggattcctggggcgttatgtggtaaaccacctcggacgtatgggctcacaggtaatcatcccatacaggtgcgataaatacgacatcatgcacctacgccccatgggagacttgggccagctgctgtttctggaatgggatgcacgcgataaggatagtattcgccgtgtcgttcaacacagcaacgtggtcattaacctgatcggcagggactgggagacgaagaatttcgacttcgaggatgtgtttgtcaagatcccacaggctatagcacagttgagcaaagaagctggcgtggagaagtttattcacgttagtcatcttaatgctaatattaaatcaagtagccgttatctacggaacaaggctgttggggagaaggttgtgcgtgacgctttccctgaggcgatcatcgtgaaacccagtgatatatttggtcgcgaggacagatttctcaattccttcgccagcatgcataggtttggccccattccgttaggatccctgggctggaagaccgtgaagcagccagtctacgttgtggatgtatccaaggggatcgtgaacgcggtcaaggatccagatgctaatggcaaaagcttcgccttcgtcgggccatccagatatctcctatttcaccttgtgaagtacatatttgcggtggctcaccggcttttccttcccttcccactccctttatttgcatacaggtgggttgcccgtgtgttcgaaattagtcctttcgaaccatggatcacaagggacaaggtggagcgcatgcacattacagacatgaagctgccacacctgccgggtcttgaggacctggggattcaggccacaccattagaactcaaggctattgaagttctccgtagacatcgcacctaccgttggttgagcgctgagatcgaagatgtcaaacccgctaagaccgtgaacatctag

SEQ ID NO: 151824 - DNA, 1134 bp, Artificial Sequence
  derived and/or modified sequence
atggccgctgctgctcagtcgcgggtagtgcgagtgttaagcatgagtcggagtgccataaccgcgattgctacgtctgtctgtcacggaccgccttgccgccagctccatcatgcgctgatgccacatgggaagggaggtaggagcagcgtttccgggattgtcgctaccgtttttggcgcaacaggcttcttggggagatacgtcgtgaatcaccttggaaggatggggtctcaagtaatcataccttatcgttgtgataaatacgacatcatgcacctgagaccaatgggggatctgggtcaattactgttcctggaatgggatgctcgggataaggacagtatacgaagagtggtccagcactcgaacgtagttattaatttgatcgggcgagattgggagaccaaaaattttgatttcgaagacgtgttcgtgaaaattccgcaggcaattgcgcagctctccaaggaagcgggagtggaaaagtttatccatgtgtctcatttaaatgctaacatcaaaagctcgtctcgatatctgagaaataaagccgtcggtgaaaaggtggtgcgggatgcctttcccgaggctatcatagtgaaaccgtccgatatctttggtcgcgaagacaggttcctaaatagctttgcttctatgcatagattcggccctatcccgcttggatcgctggggtggaagaccgtcaaacaacctgtttacgtggtggacgtgtcaaaaggaatcgtcaacgccgtgaaagacccggacgctaatggaaagagttttgctttcgtgggaccctccagatacctgttgttccatctagtgaagtatatttttgcagtggcccacaggctgtttctgccattccccctccctctgttcgcctatagatgggtggccagggtgttcgaaataagcccgttcgaaccgtggattacacgggacaaggtcgagagaatgcatattaccgacatgaagctcccacatcttcctggcctggaagatcttgggatccaggcgacgcctttggagctgaaggcgatcgaggttctacggcgtcataggacctatcggtggctaagtgccgaaatagaggatgtcaagcccgcaaaaactgtgaacatctag

SEQ ID NO: 151825 - DNA, 1134 bp, Artificial Sequence
  derived and/or modified sequence
atggccgccgccgcccagagcagagtggtgagagtgctgagcatgagcagaagcgccatcaccgccatcgccaccagcgtgtgccacggccccccctgcagacagctgcaccacgccctgatgccccacggcaagggcggcagaagcagcgtgagcggcatcgtggccaccgtgttcggcgccaccggcttcctgggcagatacgtggtgaaccacctgggcagaatgggcagccaggtgatcatcccctacagatgcgacaagtacgacatcatgcacctgagacccatgggcgacctgggccagctgctgttcctggagtgggacgccagagacaaggacagcatcagaagagtggtgcagcacagcaacgtggtgatcaacctgatcggcagagactgggagaccaagaacttcgacttcgaggacgtgttcgtgaagatcccccaggccatcgcccagctgagcaaggaggccggcgtggagaagttcatccacgtgagccacctgaacgccaacatcaagagcagcagcagatacctgagaaacaaggccgtgggcgagaaggtggtgagagacgccttccccgaggccatcatcgtgaagcccagcgacatcttcggcagagaggacagattcctgaacagcttcgccagcatgcacagattcggccccatccccctgggcagcctgggctggaagaccgtgaagcagcccgtgtacgtggtggacgtgagcaagggcatcgtgaacgccgtgaaggaccccgacgccaacggcaagagcttcgccttcgtgggccccagcagatacctgctgttccacctggtgaagtacatcttcgccgtggcccacagactgttcctgcccttccccctgcccctgttcgcctacagatgggtggccagagtgttcgagatcagccccttcgagccctggatcaccagagacaaggtggagagaatgcacatcaccgacatgaagctgccccacctgcccggcctggaggacctgggcatccaggccacccccctggagctgaaggccatcgaggtgctgagaagacacagaacctacagatggctgagcgccgagatcgaggacgtgaagcccgccaagaccgtgaacatctag

SEQ ID NO: 151826 - protein, 156 aa, Artificial Sequence
  derived and/or modified sequence
MASRVLSAYVSRLPAAFAPLPRVRMLAVARPLSTALCSAGTQTRLGTLQPALVLAQVPGRVTQLCRQYSDMPPLTLEGIQDRVLYVLKLYDKIDPEKLSVNSHFMKDLGLDSLDQVEIIMAMEDEFGFEIPDIDAEKLMCPQEIVDYIADKKDVYE

SEQ ID NO: 151827 - DNA, 471 bp, Artificial Sequence
  derived and/or modified sequence
atggcttctcgggtgctcagcgcctacgtgagccgattgcccgcggcctttgctccactgccgcgcgttagaatgttagctgtcgcccggcccctaagtacagctttgtgcagcgcaggaacgcagacgagactaggaacgcttcagcctgcacttgtcctggcacaggtccccggcagagtgacacagctgtgccggcagtattctgacatgcctcctctgacactggaagggatccaagaccgggtgctttacgtgctgaagctgtacgacaagattgatcctgaaaagcttagcgtgaattctcacttcatgaaggacttaggattagattcccttgatcaggtcgagatcataatggcaatggaagacgagttcgggttcgaaattcccgacattgatgccgaaaagctaatgtgccctcaggaaatagtcgattacattgccgacaagaaagacgtctacgagtag

SEQ ID NO: 151828 - DNA, 471 bp, Artificial Sequence
  derived and/or modified sequence
atggccagccgggtgctgagcgcctacgtgtcccggctgcctgctgcctttgcccccctgccccgggtgaggatgctggccgtggcccggcccctgagcacagccctgtgcagcgctggcacccagacccggctgggcaccctgcagcctgccctggtgctggcccaggtgcccggccgggtgacccagctgtgccggcagtacagcgacatgccacccctgaccctggagggcatccaggacagagtgctgtatgtgctgaagctgtatgacaagattgatcctgagaagctgtctgtgaacagccacttcatgaaggacctgggcctggacagcctggaccaggtggagatcatcatggccatggaggatgaatttggatttgagatcccagacattgatgctgagaagctgatgtgcccccaggagatcgtggactacatcgctgacaagaaggatgtgtatgaatag

SEQ ID NO: 151829 - DNA, 717 bp, Artificial Sequence
  derived and/or modified sequence
gcgcgccgccggaaaggaaccctggtccggaggcggcggcgcagtgcatcctgggttggcgtagccatggcgtctcgtgtcctttcagcctatgtcagccgcctgcccgcggcctttgcgccgctgccccgggtccggatgctggccgtggcccggcctctcagcaccgctctctgctccgcggggacccagacgaggctcgggactttgcagccggccttagtgctcgcgcaggttcctggtagagttacacagttgtgccgccagtatagcgacatgcctcctttgacgttagagggcatccaggaccgtgttctttacgtattgaaactctatgacaagattgacccagagaagctttcagtaaattctcattttatgaaagacctgggcttagacagtttggaccaagtggagattatcatggccatggaagacgaatttgggtttgaaattcctgatatagatgctgaaaagttaatgtgtccacaagaaattgtagattacattgcagataagaaggatgtatatgaataaagtatcagaccctttggctttgctgagagaggactcagatgatagtgacgaatgtctggcagtgaggacacattttggcattcttgctgactctgacagagtgattctgatggacttgtatttaaattgtatgtgttttactctttgaaaataaatctataaaaccaacattttccccca

SEQ ID NO: 151830 - DNA, 471 bp, Artificial Sequence
  derived and/or modified sequence
atggccagccgggtgctgagcgcctacgtgagccggctgcccgccgcctttgctcctctgccccgcgtgagaatgttagccgtagccagacctttgagcacagcactgtgcagcgccggtactcagaccagactcggaacccttcagccagccctggtcctggcccaggtgccagggcgagtgacacagctgtgcaggcagtatagcgacatgccccctctgaccctggagggaattcaggacagagtgctctacgtgctgaagctctatgacaaaattgaccccgagaagttgtcagtgaactcccatttcatgaaggatctcggtctggacagcctcgatcaggtcgaaataatcatggccatggaagatgagttcggattcgagatcccggatatcgacgccgagaagctgatgtgcccacaggagattgtggactacatcgcggataagaaagacgtgtacgaatag

SEQ ID NO: 151831 - DNA, 471 bp, Artificial Sequence
  derived and/or modified sequence
atggccagccgagtactgtcagcatatgtcagtagactcccagctgctttcgctcctctccccagggtcaggatgttagccgtcgccagaccattgtccacagctctgtgcagcgcaggcacacaaacccggttggggactctccaaccggctcttgtgcttgcgcaggtgcccggacgggtgacacagctctgccggcagtactctgatatgcccccacttactttagaaggaatccaggatcgcgtcctttatgtactgaagctttatgataagatcgatcccgagaaactctctgtgaatagccactttatgaaagacctcggcctggatagtctggatcaagtggaaatcattatggccatggaagatgaatttgggtttgagattccagacattgacgccgagaagctgatgtgcccgcaggagatcgttgactacatcgctgacaagaaggacgtctatgagtag

SEQ ID NO: 151832 - DNA, 471 bp, Artificial Sequence
  derived and/or modified sequence
atggcttccagagttctttcggcatatgttagtagacttcctgccgcattcgccccgctacccagagtgagaatgctcgctgtggctcggcccttatccacagctctgtgctcagccggaactcagactcgcctagggaccctgcagcccgcactcgtgctggcccaggtgccaggacgcgtgacacaactctgtaggcagtacagcgatatgccacccctgaccctggaaggaatccaagatcgcgtcctctatgtgcttaaactttacgataaaatcgatcctgagaagctttctgtaaactcccacttcatgaaagaccttggcctcgattctcttgaccaggtcgaaatcattatggctatggaggacgagttcggcttcgagatccccgacatcgatgctgagaaactgatgtgcccacaggagatcgtggactacattgctgataaaaaagacgtttatgaatag

SEQ ID NO: 151833 - DNA, 471 bp, Artificial Sequence
  derived and/or modified sequence
atggcttcccgagtgttgagtgcttacgtcagccgcctgcccgccgcctttgctccattgccaagagtaaggatgctggctgtagcccgaccattaagtaccgctttgtgctcagcaggaactcagacacgccttgggactctccagcccgccttggtgttggcccaagtaccaggcagggtcacacaactatgtcgacagtattccgatatgcccccactgacactcgagggaatccaggaccgggtgctgtatgtccttaaattatacgataaaatcgatccagagaagctttccgtgaacagtcacttcatgaaggacctgggactagactcattggaccaagtagaaataattatggcaatggaagacgaattcgggttcgagattcctgacatcgacgccgagaaactgatgtgtcctcaagagattgtggattacatagctgacaaaaaggacgtttacgagtag

SEQ ID NO: 151834 - DNA, 471 bp, Artificial Sequence
  derived and/or modified sequence
atggccagcagagtgctgagcgcctacgtgagcagactgcccgccgccttcgcccccctgcccagagtgagaatgctggccgtggccagacccctgagcaccgccctgtgcagcgccggcacccagaccagactgggcaccctgcagcccgccctggtgctggcccaggtgcccggcagagtgacccagctgtgcagacagtacagcgacatgccccccctgaccctggagggcatccaggacagagtgctgtacgtgctgaagctgtacgacaagatcgaccccgagaagctgagcgtgaacagccacttcatgaaggacctgggcctggacagcctggaccaggtggagatcatcatggccatggaggacgagttcggcttcgagatccccgacatcgacgccgagaagctgatgtgcccccaggagatcgtggactacatcgccgacaagaaggacgtgtacgagtag

SEQ ID NO: 151835 - protein, 186 aa, Artificial Sequence
  derived and/or modified sequence
MAVARAGVLGVQWLQRASRNVMPLGARTASHMTKDMFPGPYPRTPEERAAAAKKYNMRVEDYEPYPDDGMGYGDYPKLPDRSQHERDPWYSWDQPGLRLNWGEPMHWHLDMYNRNRVDTSPTPVSWHVMCMQLFGFLAFMIFMCWVGDVYPVYQPVGPKQYPYNNLYLERGGDPSKEPERVVHYEI

SEQ ID NO: 151836 - protein, 155 aa, Artificial Sequence
  derived and/or modified sequence
MTKDMFPGPYPRTPEERAAAAKKYNMRVEDYEPYPDDGMGYGDYPKLPDRSQHERDPWYSWDQPGLRLNWGEPMHWHLDMYNRNRVDTSPTPVSWHVMCMQLFGFLAFMIFMCWVGDVYPVYQPVGPKQYPYNNLYLERGGDPSKEPERVVHYEI

SEQ ID NO: 151837 - DNA, 561 bp, Artificial Sequence
  derived and/or modified sequence
atggccgtagctcgtgcgggggtcttgggggtgcaatggctccagcgagccagcaggaacgtcatgcctttaggcgctaggaccgccagccacatgacaaaagacatgtttccgggcccatatcccagaacacctgaggagcgggcggccgccgccaaaaaatacaacatgcgcgtcgaagactacgagccctaccctgatgatggcatgggctacggcgactatccgaaactcccagacagaagtcaacacgagcgggacccctggtacagttgggatcagcccggcctgagactgaactggggggagccaatgcactggcatctcgatatgtacaatagaaaccgggtggacacaagtcccactcctgtcagttggcacgtgatgtgcatgcagctcttcggatttctcgccttcatgatcttcatgtgctgggtcggcgatgtgtaccccgtttaccaacccgtggggcccaaacaatacccctataacaacctgtatcttgagcgtggaggcgatccctcaaaggaaccggagcgggttgtacactatgagatttag

SEQ ID NO: 151838 - DNA, 561 bp, Artificial Sequence
  derived and/or modified sequence
atggctgtggcccgggccggcgtgctgggcgtgcagtggctgcagagggccagcagaaatgtgatgcccctgggcgccaggacagccagccacatgaccaaggacatgtttcctggcccctaccccaggaccccagaggagagagctgctgctgccaagaagtacaacatgagggtggaggactatgagccctacccagatgatggcatgggctacggggactaccccaagctgcctgacaggagccagcacgagcgggacccctggtacagctgggaccagcccggcctgcggctgaactggggcgagcccatgcactggcacctggacatgtacaacagaaacagagtggacaccagccccacccctgtgtcctggcacgtgatgtgcatgcagctgtttggcttcctggccttcatgatcttcatgtgctgggtgggagatgtgtaccctgtgtaccagcctgtgggccccaagcagtacccctacaacaacctgtacctggagcggggcggggaccccagcaaggagcctgagcgggtggtgcactatgagatctag

SEQ ID NO: 151839 - DNA, 671 bp, Artificial Sequence
  derived and/or modified sequence
gaagaaggtgaagatggcggtggccagggccggggtcttgggagtccagtggctgcaaagggcatcccggaacgtgatgccgctgggcgcacggacagcctcccacatgaccaaggacatgttcccggggccctatcctaggaccccagaagaacgggccgccgccgccaagaagtataatatgcgtgtggaagactacgaaccttacccggatgatggcatggggtatggcgactacccgaagctccctgaccgctcacagcatgagagagatccatggtatagctgggaccagccgggcctgaggttgaactggggtgaaccgatgcactggcacctagacatgtacaacaggaaccgtgtggatacatcccccacacctgtttcttggcatgtcatgtgtatgcagctcttcggtttcctggctttcatgatattcatgtgctgggtgggggacgtgtaccctgtctaccagcctgtgggaccaaagcagtatccttacaataatctgtacctggaacgaggcggtgatccctccaaagaaccagagcgggtggttcactatgagatctgaggaggcttcgtgggcttttgggtcctctaactaggactccctcattcctagaaatttaaccttaatgaaatccctaataaaactcagtgctgtgtta

SEQ ID NO: 151840 - DNA, 713 bp, Artificial Sequence
  derived and/or modified sequence
ttggcttcccaactgcgtatttaaaccccgcccctgttgaacccttcggcttttcttcactcccggcttcctccgtcacgtttggcccggctcagccgccgtgacaggcctttgcgcatgtgcagaagggaaacgtgaagaagcctcccacatgaccaaggacatgttcccggggccctatcctaggaccccagaagaacgggccgccgccgccaagaagtataatatgcgtgtggaagactacgaaccttacccggatgatggcatggggtatggcgactacccgaagctccctgaccgctcacagcatgagagagatccatggtatagctgggaccagccgggcctgaggttgaactggggtgaaccgatgcactggcacctagacatgtacaacaggaaccgtgtggatacatcccccacacctgtttcttggcatgtcatgtgtatgcagctcttcggtttcctggctttcatgatattcatgtgctgggtgggggacgtgtaccctgtctaccagcctgtgggaccaaagcagtatccttacaataatctgtacctggaacgaggcggtgatccctccaaagaaccagagcgggtggttcactatgagatctgaggaggcttcgtgggcttttgggtcctctaactaggactccctcattcctagaaatttaaccttaatgaaatccctaataaaactcagtgctgtg

SEQ ID NO: 151841 - DNA, 561 bp, Artificial Sequence
  derived and/or modified sequence
atggccgtggcccgggccggcgtgctgggcgtgcagtggctgcagcgggcaagtagaaatgtcatgcccttaggagcccgcaccgcatctcatatgacaaaagatatgtttccaggaccttatccaagaacccctgaagagagagcagcggccgcaaagaaatacaacatgagagttgaagattacgagccatacccggacgacggcatggggtacggagactatcctaagctgccagacagaagtcagcacgagagagacccctggtatagctgggaccaaccaggtctgagattgaattggggcgaaccaatgcactggcacttggatatgtataatagaaaccgcgtggataccagccccacacctgtgtcgtggcacgtcatgtgcatgcagcttttcggttttctggccttcatgatctttatgtgctgggtcggggacgtatatcctgtctaccagccagtcggccctaaacagtatccatacaataacctgtacttagagaggggcggcgaccctagtaaggaacctgaaagagtggtgcattacgagatttag

SEQ ID NO: 151842 - DNA, 561 bp, Artificial Sequence
  derived and/or modified sequence
atggccgtggccagagccggagtcctgggcgtgcaatggctccagcgcgcaagcagaaacgtaatgcctctgggggcaagaaccgcatcacatatgactaaggatatgttcccagggccatacccccgtacccccgaggaaagggcagctgctgcgaaaaagtataatatgcgcgtggaggactacgaaccatacccagatgacggcatggggtatggagactaccccaagttgccggatagatcacaacacgaacgcgacccctggtatagttgggaccagcctggtctacggttgaattggggggaaccaatgcactggcatttagatatgtacaacaggaaccgtgtagatacaagtcccactccagtgtcctggcacgtcatgtgcatgcagctgtttggattcctggcctttatgattttcatgtgttgggtaggagatgtgtacccagtctaccagcccgttgggcctaaacaatacccatacaataacctgtatctggaaaggggtggggacccaagcaaggagcccgagagggtcgtgcactacgagatttag

SEQ ID NO: 151843 - DNA, 561 bp, Artificial Sequence
  derived and/or modified sequence
atggccgtggccagagccggcgtgctgggcgtgcagtggctgcagagagccagcagaaacgtgatgcccctgggcgccagaaccgccagccacatgaccaaggacatgttccccggcccctaccccagaacccccgaggagagagccgccgccgccaagaagtacaacatgagagtggaggactacgagccctaccccgacgacggcatgggctacggcgactaccccaagctgcccgacagaagccagcacgagagagacccctggtacagctgggaccagcccggcctgagactgaactggggcgagcccatgcactggcacctggacatgtacaacagaaacagagtggacaccagccccacccccgtgagctggcacgtgatgtgcatgcagctgttcggcttcctggccttcatgatcttcatgtgctgggtgggcgacgtgtaccccgtgtaccagcccgtgggccccaagcagtacccctacaacaacctgtacctggagagaggcggcgaccccagcaaggagcccgagagagtggtgcactacgagatctag

SEQ ID NO: 151844 - protein, 179 aa, Artificial Sequence
  derived and/or modified sequence
MAFLASGPYLTHQQKVLRLYKRALRHLESWCVQRDKYRYFACLMRARFEEHKNEKDMAKATQLLKEAEEEFWYRQHPQPYIFPDSPGGTSYERYDCYKVPEWCLDDWHPSEKAMYPDYFAKREQWKKLRRESWEREVKQLQEETPPGGPLTEALPPARKEGDLPPLWWYIVTRPRERPM

SEQ ID NO: 151845 - DNA, 540 bp, Artificial Sequence
  derived and/or modified sequence
atggcattcttggccagtggcccatatctgactcaccagcagaaggtgctacgactgtacaaacgagcacttcgccatcttgagtcctggtgcgtgcagcgggataaatacagatattttgcttgcttgatgagggcccggtttgaagagcacaaaaacgaaaaggatatggctaaggctacccagctgctgaaggaagccgaggaagaattttggtataggcagcatcctcaaccctacatcttccctgactctccaggaggcacttcctatgaaagatacgactgttacaaggtgcccgaatggtgtctcgatgactggcaccccagtgagaaggcaatgtaccccgactactttgcaaagcgggagcagtggaagaaacttcgcagagagtcatgggagcgagaagtaaagcaacttcaggaggagactccacccgggggtcctctgactgaggcattacctcctgccaggaaagaaggcgatctcccccctctatggtggtatattgtcacccgcccaagggagagacccatgtag

SEQ ID NO: 151846 - DNA, 540 bp, Artificial Sequence
  derived and/or modified sequence
atggccttcctggccagcggcccctacctgacccaccagcagaaggtgctgcggctgtacaagagggccctgcggcacctggagagctggtgtgtgcagagggacaagtaccgctactttgcctgcctgatgagggccaggtttgaggagcacaagaatgagaaggacatggccaaggccacccagctgctgaaggaggccgaggaggagttctggtaccggcagcacccccagccctacatcttcccagacagccctgggggcaccagctatgaaagatatgactgctacaaggtgcctgagtggtgcctggatgactggcaccccagcgagaaggccatgtacccagactactttgccaagcgggagcagtggaagaagctgcggcgggagagctgggagcgggaggtgaagcagctgcaggaggagaccccacctgggggccccctgacagaggccctgcccccagccaggaaggagggggacctgccccccctgtggtggtacatcgtgacccggccccgggagcggcccatgtag

SEQ ID NO: 151847 - DNA, 711 bp, Artificial Sequence
  derived and/or modified sequence
ccttccggctggccccgctcagtcacccgcagcaggcgtgcagtttcccggctctccgcgcggccggggaaggtcagcgccgtaatggcgttcttggcgtcgggaccctacctgacccatcagcaaaaggtgttgcggctttataagcgggcgctacgccacctcgagtcgtggtgcgtccagagagacaaataccgatactttgcttgtttgatgagagcccggtttgaagaacataagaatgaaaaggatatggcgaaggccacccagctgctgaaggaggccgaggaagaattctggtaccgtcagcatccacagccatacatcttccctgactctcctgggggcacctcctatgagagatacgattgctacaaggtcccagaatggtgcttagatgactggcatccttctgagaaggcaatgtatcctgattactttgccaagagagaacagtggaagaaactgcggagggaaagctgggaacgagaggttaagcagctgcaggaggaaacgccacctggtggtcctttaactgaagctttgccccctgcccgaaaggaaggtgatttgcccccactgtggtggtatattgtgaccagaccccgggagcggcccatgtagaaagagagagacctcatctttcatgcttgcaagtgaaatatgttacagaacatgcacttgccctaataaaaaatcagtgaaatggtc

SEQ ID NO: 151848 - DNA, 540 bp, Artificial Sequence
  derived and/or modified sequence
atggccttcctggccagcggcccctacctgacccaccagcagaaggttctgcgcctttataagcgggctctccgccaccttgagtcttggtgtgtgcagcgcgacaaatacagatacttcgcatgcctcatgcgggccaggttcgaagagcacaagaatgaaaaggacatggccaaagctacacagctcttgaaagaagctgaggaggagttttggtatcgtcagcatccacagccatacatcttcccagattcgccaggcggtacatcatacgagcggtacgattgttacaaagtccctgagtggtgcctggacgactggcatcctagtgaaaaggccatgtatcccgactacttcgcaaagcgagaacaatggaagaaactgcgcagggagagttgggagagggaagtgaaacaactacaggaggagacaccaccaggggggccgcttacagaggctttaccaccggctagaaaagaaggggatctgcctccactttggtggtacatagtcacacgtcccagagagcgacctatgtag

SEQ ID NO: 151849 - DNA, 540 bp, Artificial Sequence
  derived and/or modified sequence
atggcgttcctcgcctctggcccatatcttacccaccagcagaaagtcctgagactttacaaaagagcgctgcgccacctcgaatcctggtgtgtccaaagggacaaataccggtactttgcctgtttgatgagggctcgcttcgaggaacataagaatgagaaggatatggcaaaggccacccagttgctgaaggaggccgaggaagaattttggtaccgccagcacccgcaaccatatatctttcccgattcaccgggtggaactagttacgaaaggtatgattgttataaagtgcccgaatggtgtttagacgattggcatccttctgaaaaagccatgtaccccgactacttcgccaaaagggagcagtggaagaaactgcgcagagagtcatgggagcgggaggtgaaacagctgcaggaagagacaccaccgggaggtccactgaccgaagcgcttccgcctgcgagaaaggagggcgaccttcctcctctgtggtggtatatagtaacgagaccacgggagcggccaatgtag

SEQ ID NO: 151850 - DNA, 540 bp, Artificial Sequence
  derived and/or modified sequence
atggccttcctggccagcggcccctacctgacccaccagcagaaggtgctgagactgtacaagagagccctgagacacctggagagctggtgcgtgcagagagacaagtacagatacttcgcctgcctgatgagagccagattcgaggagcacaagaacgagaaggacatggccaaggccacccagctgctgaaggaggccgaggaggagttctggtacagacagcacccccagccctacatcttccccgacagccccggcggcaccagctacgagagatacgactgctacaaggtgcccgagtggtgcctggacgactggcaccccagcgagaaggccatgtaccccgactacttcgccaagagagagcagtggaagaagctgagaagagagagctgggagagagaggtgaagcagctgcaggaggagaccccccccggcggccccctgaccgaggccctgccccccgccagaaaggagggcgacctgccccccctgtggtggtacatcgtgaccagacccagagagagacccatgtag

SEQ ID NO: 151851 - DNA, 393 bp, Artificial Sequence
  derived and/or modified sequence
atgctcaggattcccgtgaggaaggctctcgttggcctgtccaaatcgccaaaaggatgtgtccggaccactgcaaccgccgccagtaacctaattgaagttttcgtcgatggacagtctgtcatggtggaaccgggcactacagtgctgcaggcgtgtgaaaaggtcggcatgcagattccacgattttgctaccatgaacggctctccgtggcgggcaactgccgcatgtgtctggtggaaatagagaaagcacctaaggtggtggctgcctgcgcgatgcccgtcatgaagggatggaacatcctgactaacagtgaaaagtcaaagaaagcgcgcgagggcgtcatggaattcttactggccaatcatcctcttgactgcccaatttag

SEQ ID NO: 151852 - DNA, 393 bp, Artificial Sequence
  derived and/or modified sequence
atgctgcgcatccctgtgaggaaggccctggtgggcctgagcaagagccccaagggctgtgtgaggaccacagccacagctgccagcaacctgattgaggtgtttgtggatggccagagcgtgatggtggagcccggcaccaccgtgctgcaggcctgtgagaaggtgggcatgcagatcccccgcttctgctaccacgagcggctgtctgtggccggcaactgcaggatgtgcctggtggagattgagaaggcccccaaggtggtggccgcctgtgccatgcctgtgatgaagggctggaacatcctgaccaacagcgagaagagcaagaaggcccgggagggcgtgatggagttcctgctggccaaccaccccctggactgccccatctag

SEQ ID NO: 151853 - DNA, 393 bp, Artificial Sequence
  derived and/or modified sequence
atgctgcggatccccgtgcggaaggccctggtgggcctgagcaagagcccaaaaggatgcgtaagaactactgcaaccgccgcctccaatctgatcgaggtgtttgtggatggacagtcagtgatggttgagccggggaccacagttctgcaggcttgcgagaaagtcggaatgcaaatccctcggttctgctatcacgagagactgtccgtcgctggcaattgccgcatgtgcttagtcgagatagaaaaggccccaaaagtggttgccgcatgcgccatgcctgtgatgaagggctggaatatcttgacgaattcggaaaagagcaagaaggccagagagggagtcatggagttcctgctggccaaccatcctctggattgtcccatatag

SEQ ID NO: 151854 - DNA, 393 bp, Artificial Sequence
  derived and/or modified sequence
atgctgcgcatcccagtcagaaaagccttggttgggttgagtaagtcccccaaaggatgtgtgagaaccactgctacagcggcttcgaatttaattgaggtctttgttgacggacaatccgtgatggtggaacctgggactaccgtcctgcaggcttgcgaaaaggtgggcatgcagataccacggttttgttaccacgagcggctctccgtggctgggaactgtaggatgtgcctggttgagattgagaaagcacctaaggtcgtcgctgcctgcgccatgcctgtcatgaagggatggaacattctgaccaactcagagaaatcaaaaaaggccagggaaggcgtgatggaattcctgctggccaaccacccgctggattgccctatctag

SEQ ID NO: 151855 - DNA, 393 bp, Artificial Sequence
  derived and/or modified sequence
atgctgagaatccccgtgagaaaggccctggtgggcctgagcaagagccccaagggctgcgtgagaaccaccgccaccgccgccagcaacctgatcgaggtgttcgtggacggccagagcgtgatggtggagcccggcaccaccgtgctgcaggcctgcgagaaggtgggcatgcagatccccagattctgctaccacgagagactgagcgtggccggcaactgcagaatgtgcctggtggagatcgagaaggcccccaaggtggtggccgcctgcgccatgcccgtgatgaagggctggaacatcctgaccaacagcgagaagagcaagaaggccagagagggcgtgatggagttcctgctggccaaccaccccctggactgccccatctag

SEQ ID NO: 151856 - protein, 358 aa, Artificial Sequence
  derived and/or modified sequence
MASTSRRQRRERRFRRYLSAGRLVRAQALLQRHPGLDVDAGQPPPLHRACARHDAPALCLLLRLGADPAHQDRHGDTALHAAARQGPDAYTDFFLPLLSRCPSAMGIKNKDGETPGQILGWGPPWDSAEEEEEDDASKEREWRQKLQGELEDEWQEVMGRFEGDASHETQEPESFSAWSDRLAREHAQKCQQQQREAEGSRRPPRAEGSSQSWRQQEEEQRLFRERARAKEEELRESRARRAQEALGDREPKPTRAGPREEHPRGAGRGSLWRFGDVPWPCPGGGDPEAMAAALVARGPPLEEQGALRRYLRVQQVRWHPDRFLQRFRSQIETWELGRVMGAVTALSQALNRHAEALK

SEQ ID NO: 151857 - protein, 381 aa, Artificial Sequence
  derived and/or modified sequence
MSNPSPQVPEEEASTSVCRPKSSMASTSRRQRRERRFRRYLSAGRLVRAQALLQRHPGLDVDAGQPPPLHRACARHDAPALCLLLRLGADPAHQDRHGDTALHAAARQGPDAYTDFFLPLLSRCPSAMGIKNKDGETPGQILGWGPPWDSAEEEEEDDASKEREWRQKLQGELEDEWQEVMGRFEGDASHETQEPESFSAWSDRLAREHAQKCQQQQREAEGSRRPPRAEGSSQSWRQQEEEQRLFRERARAKEEELRESRARRAQEALGDREPKPTRAGPREEHPRGAGRGSLWRFGDVPWPCPGGGDPEAMAAALVARGPPLEEQGALRRYLRVQQVRWHPDRFLQRFRSQIETWELGRVMGAVTALSQALNRHAEALK

SEQ ID NO: 151858 - protein, 358 aa, Artificial Sequence
  derived and/or modified sequence
MASTSRRQRRERRFRRYLSAGRLVRAQALLQRHPGLDVDAGQPPPLHRACARHDAPALCLLLRLGADPAHQDRHGDTALHAAARQGPDAYTDFFLPLLSRCPSAMGIKNKDGETPGQILGWGPPWDSAEEEEEDDASKEREWRQKLQGELEDEWQEVMGRFEGDASHETQEPESFSAWSDRLAREHAQKCQQQQREAEGSCRPPRAEGSSQSWRQQEEEQRLFRERARAKEEELRESRARRAQEALGDREPKPTRAGPREEHPRGAGRGSLWRFGDVPWPCPGGGDPEAMAAALVARGPPLEEQGALRRYLRVQQVRWHPDRFLQRFRSQIETWELGRVMGAVTALSQALNRHAEALK

SEQ ID NO: 151859 - protein, 381 aa, Artificial Sequence
  derived and/or modified sequence
MSNPSPQVPEEEASTSVCRPKSSMASTSRRQRRERRFRRYLSAGRLVRAQALLQRHPGLDVDAGQPPPLHRACARHDAPALCLLLRLGADPAHQDRHGDTALHAAARQGPDAYTDFFLPLLSRCPSAMGIKNKDGETPGQILGWGPPWDSAEEEEEDDASKEREWRQKLQGELEDEWQEVMGRFEGDASHETQEPESFSAWSDRLAREHAQKCQQQQREAEGSCRPPRAEGSSQSWRQQEEEQRLFRERARAKEEELRESRARRAQEALGDREPKPTRAGPREEHPRGAGRGSLWRFGDVPWPCPGGGDPEAMAAALVARGPPLEEQGALRRYLRVQQVRWHPDRFLQRFRSQIETWELGRVMGAVTALSQALNRHAEALK

SEQ ID NO: 151860 - protein, 232 aa, Artificial Sequence
  derived and/or modified sequence
MASTSRRQRRERRFRRYLSAGRLVRAQALLQRHPGLDVDAGQPPPLHRACARHDAPALCLLLRLGADPAHQDRHGDTALHAAARQGPDAYTDFFLPLLSRCPSAMGIKNKDGETPGQILGWGPPWDSAEEEEEDDASKEREWRQKLQGELEDEWQEVMGRFEGDASHETQEPESFSAWSDRLAREHAQKCQQQQREAEGSRRPPRAEGSSQSWRQQEEEQRLFRERARAKEE

SEQ ID NO: 151861 - protein, 232 aa, Artificial Sequence
  derived and/or modified sequence
MASTSRRQRRERRFRRYLSAGRLVRAQALLQRHPGLDVDAGQPPPLHRACARHDAPALCLLLRLGADPAHQDRHGDTALHAAARQGPDAYTDFFLPLLSRCPSAMGIKNKDGETPGQILGWGPPWDSAEEEEEDDASKEREWRQKLQGELEDEWQEVMGRFEGDASHETQEPESFSAWSDRLAREHAQKCQQQQREAEGSCRPPRAEGSSQSWRQQEEEQRLFRERARAKEE

SEQ ID NO: 151862 - DNA, 1510 bp, Artificial Sequence
  derived and/or modified sequence
gcgccatttcctccagcctggagtgtctccgcccttcccgcctcccgtctccgagcttcttaaacacaggccttgggcctacggctctgggggtacttgggggggcgggggcaggtctgatgagtaacccctccccccaggttccagaggaagaagcctccacatctgtctgccggcccaagagttccatggcctccacttcccgccgccaacgccgagaacgtcgctttcgtcgttacttgtctgcaggacggctggtccgggcccaggccctcctccagcgacacccaggcctcgatgtagatgctgggcagcccccaccactgcaccgggcctgtgcccgccacgatgcccctgccctgtgcctgctgcttcggctcggggctgaccctgcccaccaggaccgccatggggacacggcactgcatgctgctgcccgccagggcccagatgcctacaccgatttcttcctcccgctgctaagccgctgtccctccgccatgggaataaagaataaggatggggagacccctggccaaattttgggctggggacccccctgggattctgctgaagaggaggaagaagatgatgcctccaaggagcgggaatggagacagaagctccagggtgagctggaggacgagtggcaggaagtcatggggaggtttgaaggtgatgcctcccatgaaacccaggaacctgagtccttctcagcctggtcagatcgcctggcccgggaacatgcccagaagtgccagcagcagcagcgagaagcagagggatcccgtcgacccccacgtgctgagggctccagccagagctggcgacagcaggaggaggagcagcggctcttcagggagcgagcccgggccaaggaggaagagctgcgtgagagccgagccaggagggcgcaggaggctctaggggaccgagaacccaagccaaccagggccgggcccagggaagagcaccccagaggagcggggaggggcagcctctggcgatttggtgatgtgccctggccctgccctgggggaggggacccagaggccatggctgcagccctggtggccaggggcccccctttggaggaacagggggctctgaggaggtacttgagggtccagcaggtccgctggcaccctgaccgcttcctgcagcgattccgaagccagattgagacctgggagctgggccgtgtgatgggagcagtgacagccctttctcaggccctgaatcgccatgcagaggccctcaagtgaccctagggaagaagcaagaaacttcggggctgcagcctcaggatgaggcagaaggaagggtaagggaaaggatggggaccacaaggaagagccaggtgctgctcagcagaggatatgggtgggagcgaaagttgtaacaagtgggggtggggggtgcgggccgccaccactgctccttgactctgccgtttcctaataagacctggttccacatctcaaaaaaaaaaaaaaaaaaaaaaaaaaaa

SEQ ID NO: 151863 - DNA, 1146 bp, Artificial Sequence
  derived and/or modified sequence
atgtctaaccctagtccccaggtgcctgaggaagaggcctcgacctcggtgtgccgccccaagtccagcatggcatccacgtccaggagacagaggagagagcgcagatttagaagatacctctctgcaggtaggctggttcgcgcgcaggccttgctgcaaagacaccctgggctagacgtcgacgccgggcagccccccccacttcacagggcctgcgctcggcacgacgctccagcactctgtcttttgttgcgactgggggccgacccggcccaccaagataggcatggggataccgcgctacacgcagctgctcggcagggacctgacgcctacaccgacttttttctcccactcctttctaggtgccctagcgccatggggatcaagaacaaggatggagagaccccaggccagatcctggggtggggcccaccatgggattcagctgaggaagaagaggaggatgatgcatcgaaagaacgggaatggcggcagaagttacagggtgaattggaggatgaatggcaggaagtaatgggacgattcgagggagatgcttctcatgagacgcaagagccagagagcttttcagcatggagtgaccgactggcacgagaacacgctcaaaagtgtcagcagcagcagagggaggccgaggggtcgcgcaggccacctagagcagaaggttcctcgcagtcttggagacagcaggaggaggaacagcgtctgtttcgggaacgcgccagagctaaggaagaggaactgagagaatcacgagcacgcagggcgcaggaggccttgggcgacagggaacctaaacctactagggcaggcccaagagaggagcatcctcgaggagccggacgaggatcactgtggcgattcggggatgtcccctggccttgccccggtggcggcgatcctgaggcgatggcggcagcccttgttgcacgggggccaccgttagaggagcaaggagctctgaggcggtatcttagggtacaacaagttaggtggcaccctgatcgctttcttcaacgcttccgatcccagatcgagacatgggagttgggtcgcgtaatgggtgccgtgaccgcattatcacaagctctgaaccgtcatgctgaggcactgaagtag

SEQ ID NO: 151864 - DNA, 1146 bp, Artificial Sequence
  derived and/or modified sequence
atgagcaaccccagtccccaggtgccagaggaggaggcttctacatcagtgtgtaggcctaagagttcgatggcttcgacgtccagacgccagaggagagagcgacggtttcgcagatatttatctgcaggccggttggtgagggctcaggccttgctacagcgtcacccaggtctggacgttgacgctggccagcccccccctctgcaccgggcatgtgctcgccacgacgcgccagccctgtgtctgctactgcgactgggcgcggaccccgcacaccaggacagacacggggacaccgccctgcacgcagccgcacgacagggcccagatgcctataccgatttctttctccctctcctgtcccggtgcccctccgcgatgggaatcaagaacaaagacggagaaacccccggccaaatacttggatgggggcctccatgggactctgctgaggaagaggaggaagacgatgcctctaaagagagggagtggcgccagaagctccagggtgagctggaggatgagtggcaggaagttatgggacgattcgaaggggatgcatcacacgaaacccaggaacctgaaagcttctccgcatggagcgacagactcgccagggagcacgcacagaagtgtcaacaacaacagcgtgaagcggaagggtcttgtcgaccacctcgggcggaaggaagtagccagagttggcgtcagcaggaagaggaacagaggttgtttcgggagcgcgcccgggccaaagaagaggaattgcgcgagagcagagctagaagggcccaggaggcgctcggcgacagggagccgaagcccacgagagccgggcccagggaggagcatcctcgcggtgctgggagagggtcgctctggcgatttggagatgtgccatggccctgtccgggtggaggcgatcctgaagcgatggctgctgcattagtggcacggggtcccccgctcgaagaacaaggcgcattgcgccggtatctgagggtgcagcaggttcgttggcacccagatcgttttcttcaacgattccgtagccagattgagacctgggaactgggccgagtgatgggagcggtgacagccctgagccaggcgttgaaccgccacgctgaggctctcaaatag

SEQ ID NO: 151865 - DNA, 1146 bp, Artificial Sequence
  derived and/or modified sequence
atgtctaaccccagcccacaggtaccggaggaggaagcctcgacctccgtgtgccgacccaaaagcagcatggcatcaacaagccgacgccagcgtagagaacgcagattccggagatacttaagcgcaggaaggctggtgcgcgcccaagcattgttgcagcgtcacccgggtctagatgttgacgccggacagcctcctccgctgcaccgggcctgcgccagacatgacgcccccgcgctgtgcttattactgcgcctaggtgccgaccctgcacatcaggacagacatggcgataccgcccttcatgcagcggcccgacaagggcctgacgcatacacggattttttcctaccgctattgagccgctgcccaagcgctatgggaatcaagaacaaggatggggagaccccgggccagatactgggctggggtcccccctgggatagtgctgaggaggaggaagaggacgacgcttccaaggaaagggaatggcggcaaaagctgcaaggcgaactcgaagacgagtggcaggaggtaatggggaggttcgaaggcgatgcctcacacgagactcaagagcctgagtccttttccgcttggagtgatcggcttgccagagaacatgctcagaaatgccaacaacaacagcgcgaagccgagggatcttgtaggccccctcgggccgagggctcctcacagtcatggcgtcagcaggaggaggagcagagactgttccgagagcgcgccagggccaaagaggaggaactgagggaatcccgggcaaggcgcgcacaggaagctctcggcgaccgggagccaaaacctacgagagccggtcctcgtgaagagcatcctcgaggcgctgggcgcggctcactctggaggtttggagacgtgccttggccctgcccaggcggaggggacccagaggccatggctgccgcattagtcgctaggggtcccccactagaggaacagggcgctctgcggcgttatctccgagtccagcaggttcgctggcaccccgaccgctttctgcagcgatttcgctctcagatagaaacttgggagcttggtagagttatgggagccgtaaccgcactctcgcaggcactgaatagacacgccgaggcactgaagtag

SEQ ID NO: 151866 - DNA, 1146 bp, Artificial Sequence
  derived and/or modified sequence
atgtctaatccaagtccacaggtgccggaagaggaggcaagtacatcggtgtgtcgacccaaaagttccatggctagcaccagtaggcggcagcggcgcgagcggagatttaggcggtacttgtccgctgggcggctggtccgggcacaggccctgctgcagcgccatccaggtctagacgttgacgccgggcaacctccaccactccatcgcgcatgtgcccggcatgacgctccggccctttgtcttttgctcaggttaggggcggatcctgcacaccaggacaggcatggagacacagccctgcatgcagccgcccggcagggacccgacgcctatactgacttcttcctacctctcttgagtcgctgcccttcagctatgggaattaagaacaaggatggagagactcctggccagattctgggctggggaccaccatgggattccgccgaggaggaagaggaggacgacgcctcaaaggagagagagtggcgtcagaaactccaaggcgagcttgaggacgaatggcaggaggtgatgggtagattcgagggggacgcaagccacgagactcaagaacccgaatctttcagcgcctggagcgacaggcttgccagggaacacgcacagaaatgtcagcaacaacagagggaggccgagggtagctgccgaccgccgcgggcggaagggagctcccagagttggcgccagcaagaggaggagcagcgtctgttcagggaacgagcacgggctaaggaagaagagctgcgggaaagtagagcaagaagagctcaagaggctctgggagatcgggaacccaagcccactcgtgccgggcctagggaggaacaccccagaggcgccggaagaggcagcttgtggcgcttcggtgacgttccttggccgtgtcctggaggcggagacccggaagccatggctgcagctctcgtggctcgcgggccacccttagaggagcagggagccctgagacgatatctgagagtacagcaggtccgctggcatcccgaccgatttctgcagaggttcaggagtcagatcgagacttgggaactagggcgggtgatgggtgcagtaacagccctgtctcaagctctgaatcgccatgcggaagccctcaaatag

SEQ ID NO: 151867 - DNA, 1146 bp, Artificial Sequence
  derived and/or modified sequence
atgagcaacccaagcccccaggtgcctgaggaggaggcatccacgagcgtctgtagacctaagagctcaatggcttccacttcaaggcgccaaagacgtgagagacggttccgccgctacctgtcagcagggcggctggtgagggctcaggctcttctgcaacggcacccggggttggatgttgatgcaggccaaccaccgccattacaccgagcgtgcgccaggcatgatgctcccgctttatgtttactcctgagactcggagccgatccggcacatcaggacaggcacggagataccgctctgcacgctgcagctagacagggcccggatgcttacaccgatttttttcttcctctgctgagcaggtgtccctcagctatgggcattaagaacaaggacggagaaactcccggccagatactcgggtggggaccaccctgggactcggcagaagaggaggaggaggatgatgcgagtaaagagcgcgagtggcgccagaaactgcaaggggaactggaggacgagtggcaggaagttatgggtaggtttgaaggtgatgcaagtcacgagacgcaggaacccgagtcattttccgcttggagcgatcgtctggctcgcgagcacgcacagaagtgccagcagcagcagagagaagctgagggaagctgtcggcccccccgagctgaaggatcatcccagtcctggagacaacaggaggaagaacagcgcttgtttcgggaacgagcccgggccaaggaagaagaactgcgggagtcccgtgcaaggcgggcacaggaagctctcggggatcgcgagcccaagccaacccgcgcagggccgcgggaagagcatccgcgaggtgcaggcagaggctcattatggcgcttcggagacgtgccctggccttgcccaggaggcggcgaccctgaggcaatggctgcggctctggtggcccgaggtcctcctctggaggagcagggagccctccgcagatacttgcgggtccagcaggtgcgttggcacccagaccggtttctgcaacggttccgaagccagatcgagacatgggaactaggtcgagtgatgggtgcggtgactgctctgtcccaagccttaaaccgccacgcagaagctcttaagtag

SEQ ID NO: 151868 - DNA, 1146 bp, Artificial Sequence
  derived and/or modified sequence
atgtccaacccgtccccgcaggtgcctgaggaggaggcaagcacctccgtatgtcggccaaagtcctctatggcctcaacttctagaagacagaggagagagagacgcttcaggcggtatctgtctgccggaagactcgtgcgcgcacaggcattgctgcagcgacaccctgggctggacgtggatgcaggccagccaccccccttgcaccgagcttgcgcacggcatgatgcccccgctctgtgtttacttttgcgcctcggagccgaccccgcccaccaggaccgacacggtgatacagcacttcatgcagctgcgaggcagggccccgatgcgtatactgatttcttccttcctcttctgagccgctgcccctctgccatggggattaagaacaaggatggcgagacgccaggccagatcctgggatggggacccccttgggactctgccgaagaagaggaggaagatgatgcctcaaaggagcgagaatggcggcagaagctccagggggagctggaagatgagtggcaggaggtgatgggcagatttgagggcgatgctagccatgagactcaggagcccgagtcttttagcgcctggtctgaccggttggccagggaacatgcccaaaaatgccagcagcaacagcgagaggccgaaggatcttgtcgcccgccacgggcggaaggctcctcacaatcttggcggcagcaggaggaagaacaaagactctttcgtgagagggccagagccaaggaggaagagctgagagagtcacgggcccgccgagcccaggaagcactgggggaccgtgagccaaagccaactagagctgggccgcgcgaagagcaccccagaggtgctggccgaggaagtctgtggagattcggcgatgttccctggccctgccctgggggtggcgaccccgaggcaatggccgccgctctcgtggcgcggggaccccccctggaagaacaaggcgcccttagacgttatctgagagttcagcaggtccgctggcaccctgacaggtttttgcagaggtttaggtcacaaatagaaacatgggagttagggcgggtcatgggtgccgtcaccgccctgagccaggcactcaaccgccatgccgaggcgctgaagtag

SEQ ID NO: 151869 - DNA, 1146 bp, Artificial Sequence
  derived and/or modified sequence
atgagcaatccatctcctcaagtccctgaggaggaagcaagcacctccgtgtgccgacctaaatccagcatggcgtcgacttccaggagacagaggagagagcgtcgattcaggaggtacctgtccgccggcagactggtgcgggcacaggccctcctgcagcgacatcccggcctggatgtcgatgcaggccagcctcctcctctacaccgagcatgtgcacggcatgacgcacctgccctgtgcctgctactgcgactgggagctgatccggcgcaccaggatcgccacggggatacggctcttcatgccgcagctcgtcaggggccagatgcatacactgacttcttcttgcccctcctgagccgatgtccatccgctatgggcataaagaacaaagacggagagacccctggacagattctgggatggggtcctccttgggactctgcggaggaggaggaggaagacgatgcctcaaaggagcgcgagtggcggcagaaacttcagggggagttggaggacgaatggcaggaagtcatgggacgcttcgagggggacgcttcacacgagacacaggagcccgagtctttttcagcttggtctgaccgcctggccagggagcacgcacaaaagtgccaacagcagcaacgtgaggccgaagggagctgtaggcccccccgggctgaagggagttcacagagctggagacagcaggaagaggagcagcgtttgttccgagaacgtgcacgcgcaaaggaagaagagctcagggagtcacgggcaagaagagcacaggaggcactgggtgatcgcgagccaaaacctacaagggccggccctcgggaagaacacccgcgtggcgctggtagaggcagtctgtggagatttggcgacgtgccttggccatgtccaggaggtggggacccagaagctatggctgccgccctggtggcaagagggccacccctggaggagcaaggcgctctgagaagatatctacgggttcagcaggtcaggtggcatcccgataggtttctgcagcgtttccgatcccaaattgagacttgggagttgggccgggttatgggcgccgttactgcactatcccaggcccttaaccgccatgccgaagccctgaagtag

SEQ ID NO: 151870 - DNA, 1146 bp, Artificial Sequence
  derived and/or modified sequence
atgagcaaccccagcccccaggtgcctgaggaggaggccagcacctctgtgtgccggcccaagagctccatggccagcaccagccggcggcagaggcgggagcggcgcttccgccgctacctgtctgctggccgcctggtgcgggcccaggccctgctgcagaggcaccctggcctggatgtggatgctggccagcccccacccctgcaccgggcctgtgcccggcatgatgccccagccctgtgcctgctgctgcggctgggcgctgaccctgcccaccaggacagacatggagacacagccctgcacgccgccgcccggcagggcccagatgcctacacagacttcttcctgcccctgctgagccgctgccccagcgccatgggcatcaagaacaaggatggagagaccccaggccagatcctgggctggggccccccctgggacagcgctgaggaggaggaggaggatgatgccagcaaggagcgggagtggaggcagaagctgcagggcgagctggaggatgagtggcaggaggtgatgggccgctttgaaggagatgccagccatgagacccaggagcctgagagcttcagcgcctggagcgaccggctggcccgggagcacgcccagaagtgccagcagcagcagcgggaggccgagggcagccggcggccccccagggctgagggcagcagccagagctggaggcagcaggaggaggagcagaggctcttccgggagcgggcccgggccaaggaggaggagctgcgggagagccgggcccggcgggcccaggaggccctgggggaccgggagcccaagcccaccagggctggcccccgggaggagcaccccagaggagctggccggggcagcctgtggaggtttggagatgtgccctggccctgccctgggggcggggaccctgaggccatggctgctgccctggtggcccggggcccccccctggaggagcagggcgccctgcggcgctacctgcgggtgcagcaggtgcgctggcacccagaccgcttcctgcagcgcttccgcagccagatcgagacctgggagctgggccgggtgatgggcgctgtgacagccctgagccaggccctgaacagacatgctgaggccctgaagtag

SEQ ID NO: 151871 - DNA, 1146 bp, Artificial Sequence
  derived and/or modified sequence
atgagcaaccccagcccccaggtgcctgaggaggaggccagcacctctgtgtgccggcccaagagctccatggccagcaccagccggcggcagaggcgggagcggcgcttccgccgctacctgtctgctggccgcctggtgcgggcccaggccctgctgcagaggcaccctggcctggatgtggatgctggccagcccccacccctgcaccgggcctgtgcccggcatgatgccccagccctgtgcctgctgctgcggctgggcgctgaccctgcccaccaggacagacatggagacacagccctgcacgccgccgcccggcagggcccagatgcctacacagacttcttcctgcccctgctgagccgctgccccagcgccatgggcatcaagaacaaggatggagagaccccaggccagatcctgggctggggccccccctgggacagcgctgaggaggaggaggaggatgatgccagcaaggagcgggagtggaggcagaagctgcagggcgagctggaggatgagtggcaggaggtgatgggccgctttgaaggagatgccagccatgagacccaggagcctgagagcttcagcgcctggagcgaccggctggcccgggagcacgcccagaagtgccagcagcagcagcgggaggccgagggcagctgccggccccccagggctgagggcagcagccagagctggaggcagcaggaggaggagcagaggctcttccgggagcgggcccgggccaaggaggaggagctgcgggagagccgggcccggcgggcccaggaggccctgggggaccgggagcccaagcccaccagggctggcccccgggaggagcaccccagaggagctggccggggcagcctgtggaggtttggagatgtgccctggccctgccctgggggcggggaccctgaggccatggctgctgccctggtggcccggggcccccccctggaggagcagggcgccctgcggcgctacctgcgggtgcagcaggtgcgctggcacccagaccgcttcctgcagcgcttccgcagccagatcgagacctgggagctgggccgggtgatgggcgctgtgacagccctgagccaggccctgaacagacatgctgaggccctgaagtag

SEQ ID NO: 151872 - DNA, 1146 bp, Artificial Sequence
  derived and/or modified sequence
atgagcaaccccagcccccaggtgcccgaggaggaggccagcaccagtgtttgtagaccaaagtcttccatggcctccacttctcggaggcaacgccgtgagcggcgttttcgacgctatctgtctgctggtaggctcgtcagagcgcaagctctgctgcagcgacacccggggctggacgtcgacgcagggcagccacctcctctccacagagcctgtgcaagacacgatgcgcccgcgctctgcctcctgctccggctcggagctgaccccgcgcaccaagataggcacggcgacactgcactgcatgccgctgcacgccagggacccgacgcctataccgacttctttctgccactgctgtcaaggtgtcctagcgcaatgggtatcaaaaataaagacggtgaaacccccggtcaaatactgggctgggggcccccttgggactctgccgaggaagaggaagaagacgacgcctccaaagagagagagtggagacagaagctgcaaggcgagttggaggacgaatggcaggaggtgatgggaaggtttgaaggggacgccagccacgagacccaggagccagagagcttttctgcatggtctgacagactggccagagagcacgcccagaagtgccagcagcagcagagggaagctgagggttctcggcggccaccgcgcgctgaagggagcagtcagagttggagacaacaggaggaagaacagagactgttcagagaacgagcccgagctaaggaggaagaactgagggagtcccgggcacgtagagcccaggaagctctgggcgacagggaacctaagcccacaagggcggggccgcgggaggaacatcccaggggggcgggacgcggctccctatggagattcggcgatgtcccatggccctgccctggcggcggcgacccagaggctatggctgctgctctcgttgctagagggcccccacttgaggaacagggtgcattgcggagatatctgcgggttcagcaagtgagatggcacccagacaggtttctgcagcgctttcgatcacagattgagacctgggaactcggacgcgtgatgggggccgtgaccgcgcttagccaggccctgaacagacatgccgaggctcttaagtag

SEQ ID NO: 151873 - DNA, 1146 bp, Artificial Sequence
  derived and/or modified sequence
atgagcaaccccagcccccaggtgcccgaggaggaggccagcaccagtgtctgtcggccgaagagttcaatggcctctaccagccgcagacagagacgcgaacgtcgtttccggcgatatctcagcgcgggaagactggtcagggctcaggctctgctgcagagacaccctggcttggacgtggacgctggacagccccccccgctgcaccgggcatgtgccagacatgacgcacccgccctgtgcctgcttctgaggttaggcgccgatccggcccatcaggaccgccatggggacacagcattacacgccgccgctcggcagggccccgatgcctataccgacttctttttacctctgctctcccgctgcccgagtgcgatgggtatcaagaataaagacggagagactcccggccaaatcctcggatggggccctccctgggacagtgcggaggaagaggaggaggatgatgctagtaaagaacgggagtggcggcagaaactgcagggggagctggaagacgaatggcaggaggtgatggggcgctttgaaggcgatgcctcccacgagacccaggagccagagtctttctctgcctggtctgataggctggctcgggagcatgcccagaagtgtcagcagcagcaaagggaggccgagggctcatgtcgaccacctcgggcagaaggttcttcccagtcctggcgtcaacaagaggaggagcaacggctttttcgagagcgcgcccgcgctaaggaggaagaactacgggaaagtagggcccgccgggcgcaggaggctctgggcgaccgggagccaaaacctactcgtgccggcccccgtgaagaacaccctcgcggagccggacgaggatccttatggagattcggtgatgtgccgtggccctgccctgggggaggggatcctgaggctatggccgcggcactcgttgctagaggcccaccacttgaggaacaaggggcccttaggcgctatctgagggtacaacaggtcaggtggcacccagatcgtttcctgcagaggttcagaagccagattgaaacctgggagttggggagagtgatgggagcagtgaccgctctgtctcaggctttaaatcgacacgccgaggcacttaaatag

SEQ ID NO: 151874 - DNA, 1146 bp, Artificial Sequence
  derived and/or modified sequence
atgagcaaccccagcccccaggtgcccgaggaggaggccagcacctcagtctgcaggcccaagtccagtatggcctccacgtctagaagacagcggcgggagagaagattccggaggtacttgtctgcaggcagattagttcgggcccaggcattgctgcagcgacatcccggcctggatgtcgacgccggtcaaccaccacctctacacagagcttgcgcacgccacgacgctcctgccctatgcctattgctgcgcctgggcgctgaccccgcccatcaagatcgccatggcgataccgctctccacgccgctgccagacagggacccgacgcttacacagattttttcctcccattgctgagcagatgtccgtcagccatgggtattaaaaataaggatggtgagacacccggccaaatactgggctgggggccaccttgggactcagcagaggaagaagaggaagatgacgcctctaaggaacgggagtggcgccaaaaactgcagggcgagttagaagatgagtggcaggaagtgatggggaggtttgaaggtgatgcatctcatgaaacccaggaacccgaatcattctccgcttggagtgatagattagcccgggagcatgcccaaaaatgtcaacagcagcagcgtgaagctgagggttcctgtaggcctccccgggctgagggctcttcccaatcatggcggcagcaagaggaagagcagcggttgtttcgcgagcgggctcgggcaaaggaggaggaactgagggagagcagggcccggcgcgctcaggaagctctgggcgatcgcgagcccaaacccacacgagctgggcccagggaggagcaccctagaggcgcaggacgtggatcattatggagattcggagacgtcccatggccctgtcctggcggtggcgacccggaggcaatggccgcggccctggtggccagaggaccccctctggaagagcaaggagcacttaggcgctacctccgggttcaacaggtccggtggcacccagatcgtttccttcaaaggttccggtcgcagatcgagacttgggagctcggcagagtcatgggggctgtaaccgctctcagccaggctctgaaccgacatgcggaggctttaaagtag

SEQ ID NO: 151875 - DNA, 1146 bp, Artificial Sequence
  derived and/or modified sequence
atgagcaaccccagcccccaggtgcccgaggaggaggccagcaccagtgtgtgtcggcccaagagctccatggcaagcaccagccggcgtcaacgtagagagaggcgtttcaggcgatatctttccgctgggaggcttgtaagagcccaggctttactgcagaggcacccaggcttagatgttgacgccggacagccccctcctctgcaccgggcctgtgcacgccacgacgcgcctgcactgtgcctcctgttgcgtctcggcgccgacccagcccaccaggatcggcatggcgacacagctctccatgccgctgcccggcagggcccagacgcatacacagatttctttcttccgctgctttctcgctgcccttccgcaatgggcataaagaacaaggacggcgaaaccccaggtcaaatcttgggctggggtcctccttgggacagcgccgaggaagaagaagaagacgatgcatctaaggagcgcgagtggcggcagaagctgcagggcgagctggaagacgagtggcaggaagttatgggcagattcgaaggtgacgcatcccatgagactcaggaaccggagagcttcagcgcctggtccgatcgcctagctagggagcacgcacagaagtgtcagcagcaacagcgagaagccgagggctcctgtcggcctccgagagcagaagggtctagccagtcctggaggcagcaagaagaggaacaacgcctgtttcgggaaagagctcgggctaaggaggaagagctcagggagtcccgggcacggagggcccaggaagcattaggcgaccgcgaacccaaacctacccgggccggccctagagaagagcaccctaggggggcaggcagaggtagcctatggagatttggagatgtcccttggccctgtccaggtggtggcgatccggaagctatggcagctgcacttgttgctcgtggccccccattggaggaacagggcgctctgcgacgttacttaagggtgcagcaggtccggtggcacccagatcgttttctgcagcgcttccgctcacagatcgaaacctgggagcttggcagagtgatgggcgcagtcaccgccctatctcaggcccttaaccggcacgcggaagcgttaaagtag

SEQ ID NO: 151876 - DNA, 1146 bp, Artificial Sequence
  derived and/or modified sequence
atgagcaaccccagcccccaggtgcccgaggaggaggccagcaccagtgtgtgccgacccaagagctctatggcctccaccagtcgcagacaaagaagggagcggcgctttcgtcggtatctttcagccggaagactggttcgggctcaggcactgttgcagcgtcacccgggcctggatgtcgacgccgggcagcctcctcctcttcacagggcctgcgcaagacacgatgcccctgccctctgcttgctgctgagattgggcgcagatcctgcccaccaagatcgccatggcgatactgccctgcatgccgccgccagacagggccccgacgcctatactgattttttcctgccgttgctgtctcgttgcccttccgccatgggtattaagaataaggatggagaaaccccggggcaaatcctgggctggggcccaccctgggattctgccgaggaggaagaagaggatgacgcgtctaaagagagagagtggcgccagaaactccagggggagctcgaggatgagtggcaggaggtcatggggcgtttcgagggcgatgcttctcatgaaacccaagagcccgagagctttagtgcctggagcgatagacttgcgcgggagcacgctcagaagtgccagcagcagcaacgagaggccgagggttcatgcaggccaccccgagctgaagggtccagtcagagctggcggcagcaggaagaagagcagcggctatttagagagcgcgcgcgggctaaagaagaagaactgcgcgagagtagagcgcgcagagcccaggaagcactgggcgaccgggagcctaagcccacaagggcaggtccgagggaggaacacccacgaggggcaggaagaggaagcctttggcgctttggagatgtcccatggccgtgtcctggtggaggggaccccgaagcaatggccgcggccttggtggcccgtggacctccgctcgaagagcagggagctctgcggcgatatttaagagtacagcaggtgcggtggcatcctgaccgcttcctgcagcgattccgtagccagatcgagacttgggagctgggaagagtgatgggtgctgtcactgccctgagccaggctctcaacagacatgctgaggcactgaagtag

SEQ ID NO: 151877 - DNA, 1146 bp, Artificial Sequence
  derived and/or modified sequence
atgagcaaccccagcccccaggtgcccgaggaggaggccagcacctctgtctgtcggcccaaatcctccatggcatccacctcccggcgtcagcggcgtgaaaggagattccgacggtacctgtctgccggtcggcttgtgcgggctcaagcattactccagcgacaccctggactcgacgtagacgccggccagccccctcctctgcaccgagcctgcgctagacatgatgcgccagctttatgtctgctcctgcgtctgggagctgatcctgctcaccaggataggcacggtgacacggccctccatgcggccgcaaggcaaggacccgacgcgtatactgatttcttcctgccattgctgtcacgatgtccaagcgccatgggcataaaaaataaggatggagagactccgggacagattctgggttggggccccccttgggacagcgctgaggaggaagaggaagacgatgcctccaaggagcgggagtggcgacaaaagctccagggtgagctggaggatgaatggcaggaggtgatggggagattcgaaggtgatgcaagccacgagactcaggaacccgagagcttttcagcgtggtcagataggcttgctcgcgagcacgcccagaagtgccagcaacagcaacgtgaggccgaaggtagttgccggcccccgagagccgagggcagctctcaatcatggagacagcaagaggaagagcagcgtttatttcgcgaacgggcacgagctaaagaagaagagctcagggaaagcagggcaagacgagcacaggaagccctaggtgatagggaaccgaagcctacacgtgcaggaccgagggaggagcacccgaggggggcgggacgcggctccctctggcggttcggcgatgtgccatggccttgtccaggtggaggggatcccgaagcaatggctgcggctctggtggcgcgaggccctcctctggaagagcaaggcgcactgagacggtacctgcgagtacagcaggtgcgatggcaccccgatcggtttctgcagagattccggagtcaaatcgaaacatgggagctgggaagggtgatgggggccgtgacagccctgagccaggctcttaatagacacgccgaggcgctaaaatag

SEQ ID NO: 151878 - DNA, 1146 bp, Artificial Sequence
  derived and/or modified sequence
atgagcaaccccagcccccaggtgcccgaggaggaggccagcacctccgtatgccggccgaagtcaagcatggcatcgacgtcacggcggcagcggcgcgaaaggagatttagacgatatctgtctgcaggccgtctcgtcagagcgcaggctctgctgcaacgccacccggggttggacgtggacgctggccagccacctcccctccacagagcctgcgccagacatgacgcccccgccctgtgtcttcttctccgtctcggtgccgacccagctcaccaggatcgtcacggggacacggcactgcacgctgccgcccggcaaggtccagacgcctacaccgacttctttcttccactgctgagccgttgcccatcagcaatgggaattaagaataaagacggcgagacacccgggcagatcctggggtggggacctccgtgggatagtgcagaggaggaggaggaagatgatgctagtaaagaacgggagtggcggcagaaactgcagggcgaactggaagatgaatggcaagaggttatgggaagattcgaaggagatgcttcccacgaaactcaggaacctgagtctttctctgcttggagtgacaggctggcccgagaacacgcacaaaaatgccagcaacaacagagagaagcagaaggaagttgtagaccccctcgtgccgaaggcagtagtcaatcctggcgccagcaggaagaggagcaaaggttgtttagggagcgggctcgggcaaaggaggaagaactcagggaatcgcgcgcccgtcgcgctcaggaggccctcggggatcgcgagcctaaaccaactcgcgcgggacctcgcgaagaacatcctcggggcgcaggaagaggatcactctggagattcggggacgtcccgtggccatgtcctgggggtggagatcctgaagctatggctgctgcgctcgtagcccgcggaccacccctagaagagcaaggtgccctccgcagataccttagggtccagcaggtccgctggcatccagacaggttcttgcagagatttcgctctcagatcgaaacatgggagcttggtagagtcatgggagcagttacggccctcagccaggccttgaaccggcacgccgaggccctcaagtag

SEQ ID NO: 151879 - DNA, 1411 bp, Artificial Sequence
  derived and/or modified sequence
agggatgaggcaggggcggagacgggggagtactgaggtgagagaaggagaacttgattggtggtaacagaggaagcataaagggttgtgaatgcggtgaaaagcccaagagttccatggcctccacttcccgccgccaacgccgagaacgtcgctttcgtcgttacttgtctgcaggacggctggtccgggcccaggccctcctccagcgacacccaggcctcgatgtagatgctgggcagcccccaccactgcaccgggcctgtgcccgccacgatgcccctgccctgtgcctgctgcttcggctcggggctgaccctgcccaccaggaccgccatggggacacggcactgcatgctgctgcccgccagggcccagatgcctacaccgatttcttcctcccgctgctaagccgctgtccctccgccatgggaataaagaataaggatggggagacccctggccaaattttgggctggggacccccctgggattctgctgaagaggaggaagaagatgatgcctccaaggagcgggaatggagacagaagctccagggtgagctggaggacgagtggcaggaagtcatggggaggtttgaaggtgatgcctcccatgaaacccaggaacctgagtccttctcagcctggtcagatcgcctggcccgggaacatgcccagaagtgccagcagcagcagcgagaagcagagggatcccgtcgacccccacgtgctgagggctccagccagagctggcgacagcaggaggaggagcagcggctcttcagggagcgagcccgggccaaggaggaagagctgcgtgagagccgagccaggagggcgcaggaggctctaggggaccgagaacccaagccaaccagggccgggcccagggaagagcaccccagaggagcggggaggggcagcctctggcgatttggtgatgtgccctggccctgccctgggggaggggacccagaggccatggctgcagccctggtggccaggggcccccctttggaggaacagggggctctgaggaggtacttgagggtccagcaggtccgctggcaccctgaccgcttcctgcagcgattccgaagccagattgagacctgggagctgggccgtgtgatgggagcagtgacagccctttctcaggccctgaatcgccatgcagaggccctcaagtgaccctagggaagaagcaagaaacttcggggctgcagcctcaggatgaggcagaaggaagggtaagggaaaggatggggaccacaaggaagagccaggtgctgctcagcagaggatatgggtgggagcgaaagttgtaacaagtgggggtggggggtgcgggccgccaccactgctccttgactctgccgtttcctaataagacctggttccacatctca

SEQ ID NO: 151880 - DNA, 1478 bp, Artificial Sequence
  derived and/or modified sequence
atttcctccagcctggagtgtctccgcccttcccgcctcccgtctccgagcttcttaaacacaggccttgggcctacggctctgggggtacttgggggggcgggggcaggtctgatgagtaacccctccccccaggttccagaggaagaagcctccacatctgtctgccggcccaagagttccatggcctccacttcccgccgccaacgccgagaacgtcgctttcgtcgttacttgtctgcaggacggctggtccgggcccaggccctcctccagcgacacccaggcctcgatgtagatgctgggcagcccccaccactgcaccgggcctgtgcccgccacgatgcccctgccctgtgcctgctgcttcggctcggggctgaccctgcccaccaggaccgccatggggacacggcactgcatgctgctgcccgccagggcccagatgcctacaccgatttcttcctcccgctgctaagccgctgtccctccgccatgggaataaagaataaggatggggagacccctggccaaattttgggctggggacccccctgggattctgctgaagaggaggaagaagatgatgcctccaaggagcgggaatggagacagaagctccagggtgagctggaggacgagtggcaggaagtcatggggaggtttgaaggtgatgcctcccatgaaacccaggaacctgagtccttctcagcctggtcagatcgcctggcccgggaacatgcccagaagtgccagcagcagcagcgagaagcagagggatcccgtcgacccccacgtgctgagggctccagccagagctggcgacagcaggaggaggagcagcggctcttcagggagcgagcccgggccaaggaggaagagctgcgtgagagccgagccaggagggcgcaggaggctctaggggaccgagaacccaagccaaccagggccgggcccagggaagagcaccccagaggagcggggaggggcagcctctggcgatttggtgatgtgccctggccctgccctgggggaggggacccagaggccatggctgcagccctggtggccaggggcccccctttggaggaacagggggctctgaggaggtacttgagggtccagcaggtccgctggcaccctgaccgcttcctgcagcgattccgaagccagattgagacctgggagctgggccgtgtgatgggagcagtgacagccctttctcaggccctgaatcgccatgcagaggccctcaagtgaccctagggaagaagcaagaaacttcggggctgcagcctcaggatgaggcagaaggaagggtaagggaaaggatggggaccacaaggaagagccaggtgctgctcagcagaggatatgggtgggagcgaaagttgtaacaagtgggggtggggggtgcgggccgccaccactgctccttgactctgccgtttcctaataagacctggttccacatctca

SEQ ID NO: 151881 - DNA, 1411 bp, Artificial Sequence
  derived and/or modified sequence
agggatgaggcaggggcggagacgggggagtactgaggtgagagaaggagaacttgattggtggtaacagaggaagcataaagggttgtgaatgcggtgaaaagcccaagagttccatggcctccacttcccgccgccaacgccgagaacgtcgctttcgtcgttacttgtctgcaggacggctggtccgggcccaggccctcctccagcgacacccaggcctcgatgtagatgctgggcagcccccaccactgcaccgggcctgtgcccgccacgatgcccctgccctgtgcctgctgcttcggctcggggctgaccctgcccaccaggaccgccatggggacacggcactgcatgctgctgcccgccagggcccagatgcctacaccgatttcttcctcccgctgctaagccgctgtccctccgccatgggaataaagaataaggatggggagacccctggccaaattttgggctggggacccccctgggattctgctgaagaggaggaagaagatgatgcctccaaggagcgggaatggagacagaagctccagggtgagctggaggacgagtggcaggaagtcatggggaggtttgaaggtgatgcctcccatgaaacccaggaacctgagtccttctcagcctggtcagatcgcctggcccgggaacatgcccagaagtgccagcagcagcagcgagaagcagagggatcctgtcgacccccacgtgctgagggctccagccagagctggcgacagcaggaggaggagcagcggctcttcagggagcgagcccgggccaaggaggaagagctgcgtgagagccgagccaggagggcgcaggaggctctaggggaccgagaacccaagccaaccagggccgggcccagggaagagcaccccagaggagcggggaggggcagcctctggcgatttggtgatgtgccctggccctgccctgggggaggggacccagaggccatggctgcagccctggtggccaggggcccccctttggaggaacagggggctctgaggaggtacttgagggtccagcaggtccgctggcaccctgaccgcttcctgcagcgattccgaagccagattgagacctgggagctgggccgtgtgatgggagcagtgacagccctttctcaggccctgaatcgccatgcagaggccctcaagtgaccctagggaagaagcaagaaacttcggggctgcagcctcaggatgaggcagaaggaagggtaagggaaaggatggggaccacaaggaagagccaggtgctgctcagcagaggatatgggtgggagcgaaagttgtaacaagtgggggtggggggtgcgggccgccaccactgctccttgactctgccgtttcctaataagacctggttccacatctca

SEQ ID NO: 151882 - DNA, 1478 bp, Artificial Sequence
  derived and/or modified sequence
atttcctccagcctggagtgtctccgcccttcccgcctcccgtctccgagcttcttaaacacaggccttgggcctacggctctgggggtacttgggggggcgggggcaggtctgatgagtaacccctccccccaggttccagaggaagaagcctccacatctgtctgccggcccaagagttccatggcctccacttcccgccgccaacgccgagaacgtcgctttcgtcgttacttgtctgcaggacggctggtccgggcccaggccctcctccagcgacacccaggcctcgatgtagatgctgggcagcccccaccactgcaccgggcctgtgcccgccacgatgcccctgccctgtgcctgctgcttcggctcggggctgaccctgcccaccaggaccgccatggggacacggcactgcatgctgctgcccgccagggcccagatgcctacaccgatttcttcctcccgctgctaagccgctgtccctccgccatgggaataaagaataaggatggggagacccctggccaaattttgggctggggacccccctgggattctgctgaagaggaggaagaagatgatgcctccaaggagcgggaatggagacagaagctccagggtgagctggaggacgagtggcaggaagtcatggggaggtttgaaggtgatgcctcccatgaaacccaggaacctgagtccttctcagcctggtcagatcgcctggcccgggaacatgcccagaagtgccagcagcagcagcgagaagcagagggatcctgtcgacccccacgtgctgagggctccagccagagctggcgacagcaggaggaggagcagcggctcttcagggagcgagcccgggccaaggaggaagagctgcgtgagagccgagccaggagggcgcaggaggctctaggggaccgagaacccaagccaaccagggccgggcccagggaagagcaccccagaggagcggggaggggcagcctctggcgatttggtgatgtgccctggccctgccctgggggaggggacccagaggccatggctgcagccctggtggccaggggcccccctttggaggaacagggggctctgaggaggtacttgagggtccagcaggtccgctggcaccctgaccgcttcctgcagcgattccgaagccagattgagacctgggagctgggccgtgtgatgggagcagtgacagccctttctcaggccctgaatcgccatgcagaggccctcaagtgaccctagggaagaagcaagaaacttcggggctgcagcctcaggatgaggcagaaggaagggtaagggaaaggatggggaccacaaggaagagccaggtgctgctcagcagaggatatgggtgggagcgaaagttgtaacaagtgggggtggggggtgcgggccgccaccactgctccttgactctgccgtttcctaataagacctggttccacatctca

SEQ ID NO: 151883 - DNA, 1411 bp, Artificial Sequence
  derived and/or modified sequence
agggatgaggcaggggcggagacgggggagtactgaggtgagagaaggagaacttgattggtggtaacagaggaagcataaagggttgtgaatgcggtgaaaagcccaagagttccatggcctccacttcccgccgccaacgccgagaacgtcgctttcgtcgttacttgtctgcaggacggctggtccgggcccaggccctcctccagcgacacccaggcctcgatgtagatgctgggcagcccccaccactgcaccgggcctgtgcccgccacgatgcccctgccctgtgcctgctgcttcggctcggggctgaccctgcccaccaggaccgccatggggacacggcactgcatgctgctgcccgccagggcccagatgcctacaccgatttcttcctcccgctgctaagccgctgtccctctgccatgggaataaagaataaggatggggagacccctggccaaattttgggctggggacccccctgggattctgctgaagaggaggaagaagatgatgcctccaaggagcgggaatggagacagaagctccagggtgagctggaggacgagtggcaggaagtcatggggaggtttgaaggtgatgcctcccatgaaacccaggaacctgagtccttctcagcctggtcagatcgcctggcccgggaacatgcccagaagtgccagcagcagcagcgagaagcagagggatcctgtcgacccccacgtgctgagggctccagccagagctggcgacagcaggaggaggagcagcggctcttcagggagcgagcccgggccaaggaggaagagctgcgtgagagccgagccaggagggcgcaggaggctctaggggaccgagaacccaagccaaccagggccgggcccagggaagagcaccccagaggagcggggaggggcagcctctggcgatttggtgatgtgccctggccctgccctgggggaggggacccagaggccatggctgcagccctggtggccaggggcccccctttggaggaacagggggctctgaggaggtacttgagggtccagcaggtccgctggcaccctgaccgcttcctgcagcgattccgaagccagattgagacctgggagctgggccgtgtgatgggagcagtgacagccctttctcaggccctgaatcgccatgcagaggccctcaagtgaccctagggaagaagcaagaaacttcggggctgcagcctcaggatgaggcagaaggaagggtaagggaaaggatggggaccacaaggaagagccaggtgctgctcagcagaggatatgggtgggagcgaaagttgtaacaagtgggggtggggggtgcgggccgccaccactgctccttgactctgccgtttcctaataagacctggttccacatctca

SEQ ID NO: 151884 - DNA, 1478 bp, Artificial Sequence
  derived and/or modified sequence
atttcctccagcctggagtgtctccgcccttcccgcctcccgtctccgagcttcttaaacacaggccttgggcctacggctctgggggtacttgggggggcgggggcaggtctgatgagtaacccctccccccaggttccagaggaagaagcctccacatctgtctgccggcccaagagttccatggcctccacttcccgccgccaacgccgagaacgtcgctttcgtcgttacttgtctgcaggacggctggtccgggcccaggccctcctccagcgacacccaggcctcgatgtagatgctgggcagcccccaccactgcaccgggcctgtgcccgccacgatgcccctgccctgtgcctgctgcttcggctcggggctgaccctgcccaccaggaccgccatggggacacggcactgcatgctgctgcccgccagggcccagatgcctacaccgatttcttcctcccgctgctaagccgctgtccctctgccatgggaataaagaataaggatggggagacccctggccaaattttgggctggggacccccctgggattctgctgaagaggaggaagaagatgatgcctccaaggagcgggaatggagacagaagctccagggtgagctggaggacgagtggcaggaagtcatggggaggtttgaaggtgatgcctcccatgaaacccaggaacctgagtccttctcagcctggtcagatcgcctggcccgggaacatgcccagaagtgccagcagcagcagcgagaagcagagggatcctgtcgacccccacgtgctgagggctccagccagagctggcgacagcaggaggaggagcagcggctcttcagggagcgagcccgggccaaggaggaagagctgcgtgagagccgagccaggagggcgcaggaggctctaggggaccgagaacccaagccaaccagggccgggcccagggaagagcaccccagaggagcggggaggggcagcctctggcgatttggtgatgtgccctggccctgccctgggggaggggacccagaggccatggctgcagccctggtggccaggggcccccctttggaggaacagggggctctgaggaggtacttgagggtccagcaggtccgctggcaccctgaccgcttcctgcagcgattccgaagccagattgagacctgggagctgggccgtgtgatgggagcagtgacagccctttctcaggccctgaatcgccatgcagaggccctcaagtgaccctagggaagaagcaagaaacttcggggctgcagcctcaggatgaggcagaaggaagggtaagggaaaggatggggaccacaaggaagagccaggtgctgctcagcagaggatatgggtgggagcgaaagttgtaacaagtgggggtggggggtgcgggccgccaccactgctccttgactctgccgtttcctaataagacctggttccacatctca

SEQ ID NO: 151885 - DNA, 1260 bp, Artificial Sequence
  derived and/or modified sequence
agaacttgattggtggtaacagaggaagcataaagggttgtgaatgcggtgaaaagcccaagagttccatggcctccacttcccgccgccaacgccgagaacgtcgctttcgtcgttacttgtctgcaggacggctggtccgggcccaggccctcctccagcgacacccaggcctcgatgtagatgctgggcagcccccaccactgcaccgggcctgtgcccgccacgatgcccctgccctgtgcctgctgcttcggctcggggctgaccctgcccaccaggaccgccatggggacacggcactgcatgctgctgcccgccagggcccagatgcctacaccgatttcttcctcccgctgctaagccgctgtccctccgccatgggaataaagaataaggatggggagacccctggccaaattttgggctggggacccccctgggattctgctgaagaggaggaagaagatgatgcctccaaggagcgggaatggagacagaagctccagggtgagctggaggacgagtggcaggaagtcatggggaggtttgaaggtgatgcctcccatgaaacccaggaacctgagtccttctcagcctggtcagatcgcctggcccgggaacatgcccagaagtgccagcagcagcagcgagaagcagagggatcccgtcgacccccacgtgctgagggctccagccagagctggcgacagcaggaggaggagcagcggctcttcagggagcgagcccgggccaaggaggaagagctgcgtgagagccgagccaggagggcgcaggaggctctaggggaccgagaacccaagccaaccagggccgggcccagggaagagcaccccagaggagcggggaggggcagcctctggcgatttggtgatgtgccctggccctgccctgggggaggggacccagaggccatggctgcagccctggtggccaggggcccccctttggaggaacagggggctctgaggaggtacttgagggtccagcaggtccgctggcaccctgaccgcttcctgcagcgattccgaagccagattgagacctgggagctgggccgtgtgatgggagcagtgacagccctttctcaggccctgaatcgccatgcagaggccctcaagtgaccctagggaagaagcaagaaacttcggggctgcagcctcaggatgaggcagaaggaagggttttgagcccagttctctacaggagaatcccaggagtggaagtggaaggcagtag

SEQ ID NO: 151886 - DNA, 1260 bp, Artificial Sequence
  derived and/or modified sequence
agaacttgattggtggtaacagaggaagcataaagggttgtgaatgcggtgaaaagcccaagagttccatggcctccacttcccgccgccaacgccgagaacgtcgctttcgtcgttacttgtctgcaggacggctggtccgggcccaggccctcctccagcgacacccaggcctcgatgtagatgctgggcagcccccaccactgcaccgggcctgtgcccgccacgatgcccctgccctgtgcctgctgcttcggctcggggctgaccctgcccaccaggaccgccatggggacacggcactgcatgctgctgcccgccagggcccagatgcctacaccgatttcttcctcccgctgctaagccgctgtccctccgccatgggaataaagaataaggatggggagacccctggccaaattttgggctggggacccccctgggattctgctgaagaggaggaagaagatgatgcctccaaggagcgggaatggagacagaagctccagggtgagctggaggacgagtggcaggaagtcatggggaggtttgaaggtgatgcctcccatgaaacccaggaacctgagtccttctcagcctggtcagatcgcctggcccgggaacatgcccagaagtgccagcagcagcagcgagaagcagagggatcctgtcgacccccacgtgctgagggctccagccagagctggcgacagcaggaggaggagcagcggctcttcagggagcgagcccgggccaaggaggaagagctgcgtgagagccgagccaggagggcgcaggaggctctaggggaccgagaacccaagccaaccagggccgggcccagggaagagcaccccagaggagcggggaggggcagcctctggcgatttggtgatgtgccctggccctgccctgggggaggggacccagaggccatggctgcagccctggtggccaggggcccccctttggaggaacagggggctctgaggaggtacttgagggtccagcaggtccgctggcaccctgaccgcttcctgcagcgattccgaagccagattgagacctgggagctgggccgtgtgatgggagcagtgacagccctttctcaggccctgaatcgccatgcagaggccctcaagtgaccctagggaagaagcaagaaacttcggggctgcagcctcaggatgaggcagaaggaagggttttgagcccagttctctacaggagaatcccaggagtggaagtggaaggcagtag

SEQ ID NO: 151887 - DNA, 1260 bp, Artificial Sequence
  derived and/or modified sequence
agaacttgattggtggtaacagaggaagcataaagggttgtgaatgcggtgaaaagcccaagagttccatggcctccacttcccgccgccaacgccgagaacgtcgctttcgtcgttacttgtctgcaggacggctggtccgggcccaggccctcctccagcgacacccaggcctcgatgtagatgctgggcagcccccaccactgcaccgggcctgtgcccgccacgatgcccctgccctgtgcctgctgcttcggctcggggctgaccctgcccaccaggaccgccatggggacacggcactgcatgctgctgcccgccagggcccagatgcctacaccgatttcttcctcccgctgctaagccgctgtccctctgccatgggaataaagaataaggatggggagacccctggccaaattttgggctggggacccccctgggattctgctgaagaggaggaagaagatgatgcctccaaggagcgggaatggagacagaagctccagggtgagctggaggacgagtggcaggaagtcatggggaggtttgaaggtgatgcctcccatgaaacccaggaacctgagtccttctcagcctggtcagatcgcctggcccgggaacatgcccagaagtgccagcagcagcagcgagaagcagagggatcctgtcgacccccacgtgctgagggctccagccagagctggcgacagcaggaggaggagcagcggctcttcagggagcgagcccgggccaaggaggaagagctgcgtgagagccgagccaggagggcgcaggaggctctaggggaccgagaacccaagccaaccagggccgggcccagggaagagcaccccagaggagcggggaggggcagcctctggcgatttggtgatgtgccctggccctgccctgggggaggggacccagaggccatggctgcagccctggtggccaggggcccccctttggaggaacagggggctctgaggaggtacttgagggtccagcaggtccgctggcaccctgaccgcttcctgcagcgattccgaagccagattgagacctgggagctgggccgtgtgatgggagcagtgacagccctttctcaggccctgaatcgccatgcagaggccctcaagtgaccctagggaagaagcaagaaacttcggggctgcagcctcaggatgaggcagaaggaagggttttgagcccagttctctacaggagaatcccaggagtggaagtggaaggcagtag

SEQ ID NO: 151888 - DNA, 1146 bp, Artificial Sequence
  derived and/or modified sequence
atgagtaatccttccccacaggtacccgaagaagaggcttccacctctgtgtgtcggccaaaaagtagtatggcgtctactagtcgccgtcagcggcgtgaacgacggttccggaggtacctgagtgccggtagactggtgagggcccaggctttactgcagagacaccccggactagacgtggacgccggtcagcccccaccactgcaccgcgcatgcgctcggcatgacgctcctgctttgtgcctgctgctgcgcctaggcgctgacccagcccaccaggacagacacggagatactgctctgcacgccgctgctcggcaaggtccagatgcctacacggacttcttcctgcctcttctgagcaggtgcccgtcagctatgggcatcaaaaataaggacggcgaaactccgggacagattctgggatggggcccaccttgggatagcgcagaggaagaggaagaggacgatgcctctaaagagcgagagtggcgtcagaagttgcagggagagcttgaggacgaatggcaagaggtgatggggaggttcgagggggacgctagtcatgaaacccaagaacccgagtccttttccgcatggtccgatcgcctggcacgcgagcacgctcagaagtgtcagcagcagcagagagaagctgaaggcagcaggagaccgccaagggccgagggtagtagtcagtcatggaggcagcaggaagaagagcagcggctgtttagggagcgagcgcgtgcgaaagaagaagagctacgtgagagtcgggcaaggagggcgcaggaggcattgggggatcgagagccaaagcctacgcgggctggtccccgagaagagcatccgagaggtgcgggacgtggctccctgtggcggtttggcgatgttccctggccctgccctggaggcggtgatcccgaggccatggcggctgccctggtggcacgcggaccacccctggaggagcagggtgccctgagacgatacttgcgggttcagcaagtgagatggcatccagatagattcctgcagaggttccgttcccaaattgagacctgggagctgggaagagtcatgggggctgtcactgcactctctcaggcccttaaccgccatgccgaggcactgaaatag

SEQ ID NO: 151889 - DNA, 1146 bp, Artificial Sequence
  derived and/or modified sequence
atgagtaatccctcccctcaagttccagaggaggaagcatcaacttctgtttgccgtcccaaatcctcaatggcctctacctctagaaggcagcgcagagagaggaggtttcgccgttatcttagcgccggacgcctcgttcgggctcaggctctgctgcagcgccacccaggattagacgtggacgctggacagccgcctccactgcaccgcgcttgtgcccgacacgatgctccggctctctgcctgctgctgaggcttggggctgatccggctcatcaggatcgccacggggatacggcattgcacgccgctgccagacaaggtccagatgcatacacggactttttcctccctctgctatctcggtgcccctcagctatgggaatcaagaacaaggatggggagactccaggacagatcttgggctgggggcctccgtgggacagcgcggaggaggaggaagaggatgacgcgagtaaggaacgtgagtggcggcaaaaactccagggagagctggaagatgagtggcaggaagtcatgggccgatttgagggcgatgcatcccacgagacgcaagagcccgagtcattctcagcgtggtctgacaggctggcacgagagcatgcccagaagtgccagcagcagcagagagaggcagagggcagctgccgcccacctagggctgaagggagttctcagagctggcgccaacaagaagaggaacaacgcctgttcagggaacgagctagagctaaggaagaggagttgagagaatctagagccagacgggctcaggaggcacttggcgatcgggagccaaaacccacgagagcaggtcctcgtgaggaacatcctcggggagccggtagaggctcactttggcggtttggcgacgttccctggccctgccccggaggcggagacccagaggccatggcagccgctctagtagcccgtggcccaccactggaggagcagggagccctcaggcgctatttacgagtccagcaggtgaggtggcaccctgacaggtttttgcagcggttccggagccagatcgaaacttgggaattgggccgtgtgatgggtgctgttacagcgctgtcacaggccctcaataggcacgctgaggcccttaagtag

SEQ ID NO: 151890 - DNA, 1146 bp, Artificial Sequence
  derived and/or modified sequence
atgagtaatccttccccccaagtacccgaggaggaagcaagcactagcgtctgtcgccctaaatcctctatggcctccacatcccggaggcaaaggagagagcgcagatttaggagatacctctccgctgggaggctagtacgggcacaggccctgctgcagagacatccgggactggacgtggacgcaggccagccacctcccctgcaccgcgcttgcgcaagacatgatgcaccggcactttgcttgctgcttcgcctgggcgctgacccagctcatcaggacagacatggcgatactgcactgcatgcagccgcacggcagggtcccgacgcatacacggacttcttccttccgctactgagccgatgccccagcgctatgggtattaagaataaggatggagaaacgccgggtcaaatccttgggtggggccctccctgggacagcgcagaagaagaagaggaggacgacgcctccaaggaacgcgagtggcggcagaagcttcagggagaacttgaagacgagtggcaggaggtcatgggcaggtttgagggagatgcgtctcacgagacccaagaacctgaatccttcagcgcatggagcgatagattagcacgtgaacacgcccagaaatgtcagcagcagcagcgggaggccgaagggagttgccgccctcctcgggcagaaggctccagtcagtcgtggagacaacaggaggaggaacagcgcctttttcgagagcgggcaagagctaaggaagaggagctgcgagagagcagggccaggcgagcgcaggaagccctcggggacagggagccaaagccaacccgagctggcccacgggaggaacaccctcggggagccggtagagggtcactgtggcgcttcggtgacgtcccatggccatgcccaggcggtggggatcctgaggcaatggccgctgcgcttgtagcccgagggcctccccttgaagagcagggagccctccgtcggtaccttagggtgcagcaggtgagatggcatccggaccgatttctccagaggtttaggtcccagattgagacttgggaactgggtcgggttatgggggcagttacggcgttaagtcaagctcttaaccgacacgccgaggcattgaaatag

SEQ ID NO: 151891 - DNA, 1146 bp, Artificial Sequence
  derived and/or modified sequence
atgtctaacccttcgccccaggtaccggaagaagaggcaagcaccagcgtttgccggccaaagtccagtatggcctcaacgagccgtcgccagcgtcgtgagcgaagatttcggcgttacctctcagctggccgactggttcgggcacaggcgctgctgcagcggcatccaggactggatgttgacgcagggcagcctcctcctctccatcgggcatgtgcccgtcacgatgctccggctctgtgtctgttattgcgtcttggcgcagatccggcacaccaggaccgccacggcgacacggccctgcatgccgctgcgagacaaggtcctgacgcttataccgatttctttctgccattactgtctcgatgcccgagtgcgatgggaattaaaaacaaggacggcgagacacccggacagatcctgggttggggccctccctgggattctgcagaagaggaagaggaagatgatgcctctaaggaaagggagtggcggcagaaactgcaaggtgaactcgaagacgagtggcaggaagttatgggccgtttcgagggtgatgccagccatgagacacaggagcctgaaagcttttcggcctggagcgaccggttggctagggagcatgcccagaaatgccagcaacagcagcgagaagcagaaggctcctgtcgtccccctcgagccgagggctccagccagagctggcggcagcaagaagaggagcagcggctgttcagggagagggccagggcgaaagaggaggagctgcgcgaatcccgcgctcgcagggcgcaggaggccttgggggaccgggagcccaaacccacacgcgctgggccaagggaggagcacccgagaggcgcaggcaggggctcgttatggagattcggggatgtgccgtggccctgccccggaggaggggatcctgaggccatggctgcagcgctggtagccagaggaccacccttggaagagcagggggctctgaggaggtacctccgcgtgcagcaagtaaggtggcatccagataggttcctgcagcgttttagatcgcagattgagacatgggagctgggcagagttatgggtgcagtcaccgctttgtctcaggccctgaaccggcatgctgaagcattaaaatag

SEQ ID NO: 151892 - DNA, 1146 bp, Artificial Sequence
  derived and/or modified sequence
atgtctaacccctcacctcaggtgcccgaagaggaggctagtacgtcagtctgccggcctaagtcctccatggccagcacaagcagaagacagcggagggaacgcagatttcgcaggtacctttccgctggtaggctagtgagagcacaggcattactccagaggcatcccggtctcgatgtggatgcaggacagcctcctcccctgcatcgagcttgtgcaagacatgacgcccctgccttatgcctcctgctgcgcctaggggcagacccggcacatcaggatcggcatggcgacactgctttgcatgccgcagcgcgacaaggacccgatgcctacactgacttttttcttcctctgctcagccgttgtccttcagcgatgggcatcaaaaataaggatggagaaacgccgggtcaaatcctgggatggggaccaccttgggattctgctgaagaggaagaggaggacgatgcatccaaagaaagagagtggaggcagaagctgcagggcgagctggaggacgagtggcaggaagtgatgggaagatttgagggtgacgcctcccacgaaacccaggagccggaatccttttccgcttggtccgataggcttgccagagagcacgcccagaagtgtcagcagcagcaaagagaagccgaaggctcatgtcggccaccgagagccgaagggtctagccaaagctggcggcagcaggaagaggagcagcgactttttagagagcgtgcaagagcaaaggaggaggagctgagggagtcccgcgctagacgggcacaggaggcgctgggcgatcgagagccaaagcccacaagagcaggcccacgcgaggagcatcccaggggggctgggcgtggaagtctctggaggtttggggacgtaccgtggccctgtcctggaggtggcgatcctgaagctatggccgctgccctggtcgctcggggacctcccttggaggaacagggtgcactgcgccgttaccttcgtgtgcagcaggtccggtggcatcccgatcgttttctccagaggttccgaagtcagatcgaaacctgggagttaggcagagttatgggcgcagtaaccgcactctcccaggcgttgaatcgccacgccgaggcattgaaatag

SEQ ID NO: 151893 - DNA, 1146 bp, Artificial Sequence
  derived and/or modified sequence
atgtctaatccaagcccgcaggtgcccgaggaggaggcatcaaccagtgtgtgtagacccaagagctccatggccagtacatccagaagacagcgcagggaaagacgatttcgcaggtacttgagtgcaggcagactagttagagctcaggctctactccagaggcaccctggtctggacgtcgatgcgggacaaccccctcccctccaccgagcctgcgctcggcacgatgcaccagcactgtgtttgcttcttcgactgggcgctgatcccgcacaccaggatcggcacggtgatactgcactgcacgccgctgccagacagggccctgatgcgtataccgattttttcttgccactgctgagccgttgcccgagcgccatgggaatcaagaataaagatggcgagacgcctgggcaaattcttggctggggcccaccttgggatagcgctgaagaggaggaggaggacgacgcctccaaggagagggaatggcggcagaagctccagggggagctggaagacgagtggcaggaagtaatgggcagattcgagggagacgcctcacacgaaactcaagagcctgagtctttttccgcttggtctgaccgactagcacgggagcacgcacaaaagtgccaacagcaacaacgggaagccgaggggtcttgcagacccccaagagctgagggatctagccagtcctggcgacagcaagaggaggagcagcgcctcttccgagaaagggcacgagccaaagaagaagaactgcgagagtctcgggctcgaagagctcaagaggcactgggggacagggaaccaaagccaacccgggcaggtccaagggaggagcatccgaggggagcaggccgagggagcctctggagattcggtgatgtgccttggccctgccctggaggcggagaccccgaggcgatggccgctgctctggtcgccagggggccacctcttgaagaacagggggcactgcgcaggtacttgagggtccagcaggtgcgctggcatcccgatcggtttctgcagcggtttcggtcccagatcgagacctgggagctcgggcgtgtcatgggcgctgttactgctctcagtcaagctcttaacagacatgccgaagcgttgaaatag

SEQ ID NO: 151894 - DNA, 1146 bp, Artificial Sequence
  derived and/or modified sequence
atgagcaacccatctccccaagtgccagaggaagaagcttcgacatcagtgtgtagacctaagtccagcatggcgagcaccagccgcagacagcgtcgggagcgtagattccggagatacctgtccgctgggaggttggtgcgcgcacaagctctgctgcagcgccaccccggactggatgtggacgccggtcagccgcctccacttcacagagcgtgcgcacgccacgatgctcctgctctctgtctgctgttaagactgggcgctgatcccgctcaccaggatcgtcacggcgacactgcattgcatgcggcagcgcgacagggaccagatgcctataccgatttctttttgccactcttgtcaagatgtccaagtgccatggggattaagaataaagatggggaaacccctggccagatcctgggctgggggcctccctgggacagcgccgaggaggaagaagaggatgacgcaagcaaagaacgggagtggagacagaagttgcagggtgagctggaagatgagtggcaagaggtgatgggacgctttgagggggatgccagccatgagacccaagagcccgaatcattttccgcctggtctgatagacttgcccgagagcacgctcaaaagtgtcagcagcagcagagagaagcagaagggtcctgtcgaccacctcgtgccgaaggttcttcccaatcatggcgtcagcaggaagaggaacagcggctgttcagggaacgggctcgtgccaaagaagaagagctgcgtgagagccgcgctcggagggcccaggaggctttgggggacagggaaccaaagcctaccagggctggtcctcgtgaagaacatccccgtggcgctggtagagggagcctttggcgatttggagatgtgccatggccctgcccagggggaggggatcccgaggcaatggcggctgccctcgtggcccgagggccaccgttagaggagcagggcgcattgagacgatatttgcgagtacagcaggtgcgctggcatcccgacagatttctgcagaggttccggagccagatcgaaacatgggagcttggcagggttatgggagcagtcaccgccttaagccaggctttgaatagacacgcggaggcgctgaaatag

SEQ ID NO: 151895 - DNA, 1146 bp, Artificial Sequence
  derived and/or modified sequence
atgagcaaccccagcccccaggtgcccgaggaggaggccagcaccagcgtgtgcagacccaagagcagcatggccagcaccagcagaagacagagaagagagagaagattcagaagatacctgagcgccggcagactggtgagagcccaggccctgctgcagagacaccccggcctggacgtggacgccggccagcccccccccctgcacagagcctgcgccagacacgacgcccccgccctgtgcctgctgctgagactgggcgccgaccccgcccaccaggacagacacggcgacaccgccctgcacgccgccgccagacagggccccgacgcctacaccgacttcttcctgcccctgctgagcagatgccccagcgccatgggcatcaagaacaaggacggcgagacccccggccagatcctgggctggggccccccctgggacagcgccgaggaggaggaggaggacgacgccagcaaggagagagagtggagacagaagctgcagggcgagctggaggacgagtggcaggaggtgatgggcagattcgagggcgacgccagccacgagacccaggagcccgagagcttcagcgcctggagcgacagactggccagagagcacgcccagaagtgccagcagcagcagagagaggccgagggcagcagaagaccccccagagccgagggcagcagccagagctggagacagcaggaggaggagcagagactgttcagagagagagccagagccaaggaggaggagctgagagagagcagagccagaagagcccaggaggccctgggcgacagagagcccaagcccaccagagccggccccagagaggagcaccccagaggcgccggcagaggcagcctgtggagattcggcgacgtgccctggccctgccccggcggcggcgaccccgaggccatggccgccgccctggtggccagaggcccccccctggaggagcagggcgccctgagaagatacctgagagtgcagcaggtgagatggcaccccgacagattcctgcagagattcagaagccagatcgagacctgggagctgggcagagtgatgggcgccgtgaccgccctgagccaggccctgaacagacacgccgaggccctgaagtag

SEQ ID NO: 151896 - DNA, 1146 bp, Artificial Sequence
  derived and/or modified sequence
atgagcaaccccagcccccaggtgcccgaggaggaggccagcaccagcgtgtgcagacccaagagcagcatggccagcaccagcagaagacagagaagagagagaagattcagaagatacctgagcgccggcagactggtgagagcccaggccctgctgcagagacaccccggcctggacgtggacgccggccagcccccccccctgcacagagcctgcgccagacacgacgcccccgccctgtgcctgctgctgagactgggcgccgaccccgcccaccaggacagacacggcgacaccgccctgcacgccgccgccagacagggccccgacgcctacaccgacttcttcctgcccctgctgagcagatgccccagcgccatgggcatcaagaacaaggacggcgagacccccggccagatcctgggctggggccccccctgggacagcgccgaggaggaggaggaggacgacgccagcaaggagagagagtggagacagaagctgcagggcgagctggaggacgagtggcaggaggtgatgggcagattcgagggcgacgccagccacgagacccaggagcccgagagcttcagcgcctggagcgacagactggccagagagcacgcccagaagtgccagcagcagcagagagaggccgagggcagctgcagaccccccagagccgagggcagcagccagagctggagacagcaggaggaggagcagagactgttcagagagagagccagagccaaggaggaggagctgagagagagcagagccagaagagcccaggaggccctgggcgacagagagcccaagcccaccagagccggccccagagaggagcaccccagaggcgccggcagaggcagcctgtggagattcggcgacgtgccctggccctgccccggcggcggcgaccccgaggccatggccgccgccctggtggccagaggcccccccctggaggagcagggcgccctgagaagatacctgagagtgcagcaggtgagatggcaccccgacagattcctgcagagattcagaagccagatcgagacctgggagctgggcagagtgatgggcgccgtgaccgccctgagccaggccctgaacagacacgccgaggccctgaagtag

SEQ ID NO: 151897 - protein, 128 aa, Artificial Sequence
  derived and/or modified sequence
MTEADVNPKAYPLADAHLTKKLLDLVQQSCNYKQLRKGANEATKTLNRGISEFIVMAADAEPLEIILHLPLLCEDKNVPYVFVRSKQALGRACGVSRPVIACSVTIKEGSQLKQQIQSIQQSIERLLV

SEQ ID NO: 151898 - protein, 132 aa, Artificial Sequence
  derived and/or modified sequence
MLLVQTEADVNPKAYPLADAHLTKKLLDLVQQSCNYKQLRKGANEATKTLNRGISEFIVMAADAEPLEIILHLPLLCEDKNVPYVFVRSKQALGRACGVSRPVIACSVTIKEGSQLKQQIQSIQQSIERLLV

SEQ ID NO: 151899 - DNA, 387 bp, Artificial Sequence
  derived and/or modified sequence
atgacggaagccgatgtcaatcccaaagcttacccactggcagacgctcacctgaccaagaagctgctggacttagtccaacaaagttgcaattataagcaattacggaaaggtgctaatgaggcaaccaagactctcaatagaggaatctcggagtttattgtgatggctgccgacgccgagcctttagaaataatcctccacctgcccctgctctgcgaggataagaatgtcccctatgtattcgtgcggagcaagcaagccctagggcgggcctgtggcgttagccgcccagtaatcgcttgcagcgtgactataaaggaggggtcacagctgaagcagcagattcaaagcatccagcagtcaatcgagagactcctggtgtag

SEQ ID NO: 151900 - DNA, 387 bp, Artificial Sequence
  derived and/or modified sequence
atgacagaagcagatgtgaaccccaaggcctaccccctggctgatgcccacctgaccaagaagctgctggacctggtgcagcagagctgcaactacaagcagctgaggaaaggagccaatgaggccaccaagaccctgaacagaggcatcagcgagttcatcgtgatggccgcagatgctgagcccctggagatcatcctgcacctgcccctgctgtgtgaggacaagaatgtgccctacgtgtttgtgcgcagcaagcaggccctgggccgggcctgtggggtgtccaggcctgtgattgcctgcagcgtgaccatcaaggagggcagccagctgaagcagcagatccagagcatccagcagagcattgagcggctgctggtgtag

SEQ ID NO: 151901 - DNA, 387 bp, Artificial Sequence
  derived and/or modified sequence
atgaccgaggccgacgtgaaccccaaggcctaccccctggccgacgcacacctgaccaaaaaactgcttgacctcgtgcagcaatcgtgtaattataagcagctgcgaaagggcgcaaatgaggccactaaaactctgaatagaggcattagcgagttcattgttatggccgccgatgcagagcctttggaaattattctgcacctgccgctcctgtgtgaggacaagaatgtcccctacgttttcgtgagatctaagcaagccctaggaagggcctgcggtgtgtcaagaccagttattgcctgttctgtgaccatcaaagaaggaagccaactgaagcagcagattcagtccatccaacagtcaatcgaacgccttttagtgtag

SEQ ID NO: 151902 - DNA, 387 bp, Artificial Sequence
  derived and/or modified sequence
atgacagaagctgacgttaaccctaaggcctatcctttggccgatgcccatctcaccaagaagctgttggatcttgtgcagcagagctgtaattacaagcagctgcgcaaaggtgccaacgaggctaccaagaccttaaacagaggaatttcggaattcatcgtcatggcagcggatgcagagccgttggaaatcatcctgcacctccccctgctttgtgaggataagaacgtaccatacgtttttgtccgatcgaagcaggcgctggggcgagcatgcggggtgtcacgcccagtcattgcctgctctgtcaccataaaggaggggagccagctaaagcagcagattcagtcgatccaacagtcaatcgagcgcctgctcgtgtag

SEQ ID NO: 151903 - DNA, 387 bp, Artificial Sequence
  derived and/or modified sequence
atgaccgaggccgacgtgaaccccaaggcctaccccctggccgacgcccacctgaccaagaagctgctggacctggtgcagcagagctgcaactacaagcagctgagaaagggcgccaacgaggccaccaagaccctgaacagaggcatcagcgagttcatcgtgatggccgccgacgccgagcccctggagatcatcctgcacctgcccctgctgtgcgaggacaagaacgtgccctacgtgttcgtgagaagcaagcaggccctgggcagagcctgcggcgtgagcagacccgtgatcgcctgcagcgtgaccatcaaggagggcagccagctgaagcagcagatccagagcatccagcagagcatcgagagactgctggtgtag

SEQ ID NO: 151904 - DNA, 387 bp, Artificial Sequence
  derived and/or modified sequence
atgacagaggccgacgtaaatccaaaagcttacccactcgccgacgcacatctcacgaaaaagttactggacctagttcagcagtcctgcaattacaagcagctcagaaagggcgcgaatgaggcaaccaagacactgaatagaggcatttccgaattcatcgtcatggccgccgacgccgaacccctcgaaattatattacacttacccctgttgtgtgaggacaaaaatgttccatacgtcttcgttcggtctaagcaggcactggggcgagcctgcggcgtgagcagaccagtgatcgcatgctccgtcacgatcaaggaaggaagtcaattgaagcagcagatccagagcattcaacagagcatcgagagactgttagtctag

SEQ ID NO: 151905 - DNA, 387 bp, Artificial Sequence
  derived and/or modified sequence
atgaccgaggctgacgtgaatcctaaggcttatccattggcagatgcccaccttacgaagaaattgctggatcttgtgcagcaatcatgcaattacaagcaattgcgcaaaggggccaacgaggccactaaaacactgaatagagggatatcggagttcattgtaatggccgcggatgcagagccactggagatcatactgcacctgcctttattatgtgaagataagaatgtgccctacgtcttcgttcggtccaaacaagccctgggaagggcctgtggagtgagccgcccagttattgcctgtagtgtcacgattaaagaaggctcacagttaaagcagcagattcagtccatccagcaaagtatagaaagactcctggtttag

SEQ ID NO: 151906 - DNA, 399 bp, Artificial Sequence
  derived and/or modified sequence
atgttgcttgtgcagacagaagccgacgtgaatcctaaggcgtatccactcgcagatgcacatttgactaagaagctgcttgacctcgttcagcagtcttgtaactataaacaactccgtaagggcgccaacgaggccacaaagaccctgaaccgaggaatcagcgagttcatcgtgatggctgcagatgccgagccccttgaaattattctccacctgcctctcctttgcgaggacaagaatgtgccctatgtttttgtgagaagcaagcaagccctggggagggcctgcggagtgtctaggccagtgattgcttgctcagtgacaatcaaagagggcagccagctgaagcaacagattcaaagcatacagcaatcaatagaaaggctgctcgtgtag

SEQ ID NO: 151907 - DNA, 399 bp, Artificial Sequence
  derived and/or modified sequence
atgctgctggtgcagacagaagcagatgtgaaccccaaggcctaccccctggctgatgcccacctgaccaagaagctgctggacctggtgcagcagagctgcaactacaagcagctgaggaaaggagccaatgaggccaccaagaccctgaacagaggcatcagcgagttcatcgtgatggccgcagatgctgagcccctggagatcatcctgcacctgcccctgctgtgtgaggacaagaatgtgccctacgtgtttgtgcgcagcaagcaggccctgggccgggcctgtggggtgtccaggcctgtgattgcctgcagcgtgaccatcaaggagggcagccagctgaagcagcagatccagagcatccagcagagcattgagcggctgctggtgtag

SEQ ID NO: 151908 - DNA, 387 bp, Artificial Sequence
  derived and/or modified sequence
atgaccgaggccgacgtgaaccccaaggcctaccccctggccgacgcccatcttaccaagaagctccttgatctggtgcagcaaagctgtaactacaagcaactgcgaaagggtgccaacgaggctacgaaaaccctcaaccgcgggatctctgaattcatagtaatggccgccgacgcggaacccctggaaatcatccttcacctgccactgctttgtgaagataaaaacgttccttacgttttcgttagatccaagcaggctctggggagagcttgcggcgtaagccgcccagtgatcgcctgttccgttactattaaagagggttcgcaactgaagcagcagatacagtctattcagcagtccattgaaaggttgctcgtatag

SEQ ID NO: 151909 - DNA, 387 bp, Artificial Sequence
  derived and/or modified sequence
atgaccgaggccgacgtgaaccccaaggcctaccccctggccgacgctcacctcaccaaaaagttgttagatctggtgcaacagtcgtgcaactacaaacagctacggaagggagccaatgaggcaacgaaaacgcttaaccgcggaatatccgaattcattgtcatggctgccgatgcggagcctctggaaatcatcttacaccttccactactgtgcgaagacaagaatgtgccctatgtttttgtaagatctaaacaggcgcttggcagagcctgcggagttagcaggccagtgattgcttgctccgtcaccatcaaagagggcagccaactcaagcagcaaatacagtctatccagcagtctatcgaacgcctcttagtgtag

SEQ ID NO: 151910 - DNA, 399 bp, Artificial Sequence
  derived and/or modified sequence
atgctgctggtgcagaccgaggccgacgtgaaccccaaggcctaccctttggcagacgcacacctgaccaaaaaactcttagacctcgtgcaacagtcctgtaattacaagcagttgaggaagggagcgaatgaggcaaccaagacactgaacagaggaatctctgagttcatcgtgatggccgccgatgcagagcccctcgagatcattttgcacctcccgctgctttgtgaggataagaatgtcccatacgtttttgttaggtccaagcaggctttaggcagggcatgtggcgtgagccgcccagttatcgcatgttctgtgactatcaaggagggcagccagctcaaacagcaaatacagtcaatccagcaatcaattgagcggctgctagtctag

SEQ ID NO: 151911 - DNA, 1630 bp, Artificial Sequence
  derived and/or modified sequence
gagaactcctccatccttcacctaattcttcctagttgtcctgggaccaagacaaattcgcctaagataaggagttacgtagaagacagggcgtcctggtgtacgggctggccctggacgtcacttccgctggcggcagtggcgtcacttcctgctcttgggggcggggcatccgtgtccttgcggtgctgggcagcagaccgtccaaaccgacacgcgtggtatcctcgcggtgtccggcaagagactaccaagacagacgctatgactgaggctgatgtgaatccaaaggcctatccccttgccgatgcccacctcaccaagaagctactggacctcgttcagcagtcatgtaactataagcagcttcggaaaggagccaatgaggccaccaaaaccctcaacaggggcatctctgagttcatcgtgatggctgcagacgccgagccactggagatcattctgcacctgccgctgctgtgtgaagacaagaatgtgccctacgtgtttgtgcgctccaagcaggccctggggagagcctgtggggtctccaggcctgtcatcgcctgttctgtcaccatcaaagaaggctcgcagctgaaacagcagatccaatccattcagcagtccattgaaaggctcttagtctaaacctgtggcctctgccacgtgctccctgccagcttcccccctgaggttgtgtatcatattatctgtgttagcatgtagtattttcagctactctctattgttataaaatgtagtactaaatctggtttctggatttttgtgttgtttttgttctgttttacagggttgctatcccccttcctttcctccctccctctgccatccttcatccttttatcctccctttttggaacaagtgttcagagcagacagaagcagggtggtggcaccgttgaaaggcagaaagagccaggagaaagctgatggagccaggacagagatctggttccagctttcagccactagcttcctgttgtgtgcggggtgtggtggaattaaacagcattcattgtgtgtccctgtgcctggcacacagaatcattcatacgtgttcaagtgatcaaggggtttcatttgctcttgggggattaggtatcatttggggaggaagcatgtgttctgtgaggttgttcggctatgtccaagtgtcgtttactaatgtacccctgctgtttgcttttggtaatgtgatgttgatgttctccccctacccacaaccatgcccttgagggtagcagggcagcagcataccaaagagatgtgctgcaggactccggaggcagcctgggtgggtgagccatggggcagttgacctgggtcttgaaagagtcgggagtgacaagctcagagagcatgaactgatgctggcatgaaggattccaggaagatcatggagacctggctggtagctgtaacagagatggtggagtccaaggaaacagcctgtctctggtgaatgggactttctttggtggacacttggcaccagctctgagagcccttcccctgtgtcctgccaccatgtgggtcagatgtactctctgtcacatgaggagagtgctagttcatgtgttctccattcttgtgagcatcctaataa

SEQ ID NO: 151912 - DNA, 1503 bp, Artificial Sequence
  derived and/or modified sequence
gccgcgcggggccatttccgctgctgcttctgtgagtttttccggtgcacgcgagtgcttctgaaacgtcagctgcgctcccctaggagtgctgagcccgcggaaccgcagccatgactgaggctgatgtgaatccaaaggcctatccccttgccgatgcccacctcaccaagaagctactggacctcgttcagcagtcatgtaactataagcagcttcggaaaggagccaatgaggccaccaaaaccctcaacaggggcatctctgagttcatcgtgatggctgcagacgccgagccactggagatcattctgcacctgccgctgctgtgtgaagacaagaatgtgccctacgtgtttgtgcgctccaagcaggccctggggagagcctgtggggtctccaggcctgtcatcgcctgttctgtcaccatcaaagaaggctcgcagctgaaacagcagatccaatccattcagcagtccattgaaaggctcttagtctaaacctgtggcctctgccacgtgctccctgccagcttcccccctgaggttgtgtatcatattatctgtgttagcatgtagtattttcagctactctctattgttataaaatgtagtactaaatctggtttctggatttttgtgttgtttttgttctgttttacagggttgctatcccccttcctttcctccctccctctgccatccttcatccttttatcctccctttttggaacaagtgttcagagcagacagaagcagggtggtggcaccgttgaaaggcagaaagagccaggagaaagctgatggagccaggacagagatctggttccagctttcagccactagcttcctgttgtgtgcggggtgtggtggaattaaacagcattcattgtgtgtccctgtgcctggcacacagaatcattcatacgtgttcaagtgatcaaggggtttcatttgctcttgggggattaggtatcatttggggaggaagcatgtgttctgtgaggttgttcggctatgtccaagtgtcgtttactaatgtacccctgctgtttgcttttggtaatgtgatgttgatgttctccccctacccacaaccatgcccttgagggtagcagggcagcagcataccaaagagatgtgctgcaggactccggaggcagcctgggtgggtgagccatggggcagttgacctgggtcttgaaagagtcgggagtgacaagctcagagagcatgaactgatgctggcatgaaggattccaggaagatcatggagacctggctggtagctgtaacagagatggtggagtccaaggaaacagcctgtctctggtgaatgggactttctttggtggacacttggcaccagctctgagagcccttcccctgtgtcctgccaccatgtgggtcagatgtactctctgtcacatgaggagagtgctagttcatgtgttctccattcttgtgagcatcctaataaatctgttccattttgatgacagaa

SEQ ID NO: 151913 - DNA, 1670 bp, Artificial Sequence
  derived and/or modified sequence
tctgtgagtttttccggtgcacgcgagtgcttctgaaacgtcagctgcgctcccctaggagtgctgagcccgcggaaccgcagccatgttgtcctgggaccaagacaaattcgcctaagataaggagttacgtagaagacagggcgtcctggtgtacgggctggccctggacgtcacttccgctggcggcagtggcgtcacttcctgctcttgggggcggggcatccgtgtccttgcggtgctgggcagcagaccgtccaaaccgacacgcgtggtatcctcgcggtgtccggcaagagactaccaagacagacgctatgactgaggctgatgtgaatccaaaggcctatccccttgccgatgcccacctcaccaagaagctactggacctcgttcagcagtcatgtaactataagcagcttcggaaaggagccaatgaggccaccaaaaccctcaacaggggcatctctgagttcatcgtgatggctgcagacgccgagccactggagatcattctgcacctgccgctgctgtgtgaagacaagaatgtgccctacgtgtttgtgcgctccaagcaggccctggggagagcctgtggggtctccaggcctgtcatcgcctgttctgtcaccatcaaagaaggctcgcagctgaaacagcagatccaatccattcagcagtccattgaaaggctcttagtctaaacctgtggcctctgccacgtgctccctgccagcttcccccctgaggttgtgtatcatattatctgtgttagcatgtagtattttcagctactctctattgttataaaatgtagtactaaatctggtttctggatttttgtgttgtttttgttctgttttacagggttgctatcccccttcctttcctccctccctctgccatccttcatccttttatcctccctttttggaacaagtgttcagagcagacagaagcagggtggtggcaccgttgaaaggcagaaagagccaggagaaagctgatggagccaggacagagatctggttccagctttcagccactagcttcctgttgtgtgcggggtgtggtggaattaaacagcattcattgtgtgtccctgtgcctggcacacagaatcattcatacgtgttcaagtgatcaaggggtttcatttgctcttgggggattaggtatcatttggggaggaagcatgtgttctgtgaggttgttcggctatgtccaagtgtcgtttactaatgtacccctgctgtttgcttttggtaatgtgatgttgatgttctccccctacccacaaccatgcccttgagggtagcagggcagcagcataccaaagagatgtgctgcaggactccggaggcagcctgggtgggtgagccatggggcagttgacctgggtcttgaaagagtcgggagtgacaagctcagagagcatgaactgatgctggcatgaaggattccaggaagatcatggagacctggctggtagctgtaacagagatggtggagtccaaggaaacagcctgtctctggtgaatgggactttctttggtggacacttggcaccagctctgagagcccttcccctgtgtcctgccaccatgtgggtcagatgtactctctgtcacatgaggagagtgctagttcatgtgttctccattcttgtg

SEQ ID NO: 151914 - DNA, 462 bp, Artificial Sequence
  derived and/or modified sequence
aaagggggctgatgccccagcctcaactctgaccctggtgccaggcctggttagcatgctcttggtgcagactgaggctgatgtgaatccaaaggcctatccccttgccgatgcccacctcaccaagaagctactggacctcgttcagcagtcatgtaactataagcagcttcggaaaggagccaatgaggccaccaaaaccctcaacaggggcatctctgagttcatcgtgatggctgcagacgccgagccactggagatcattctgcacctgccgctgctgtgtgaagacaagaatgtgccctacgtgtttgtgcgctccaagcaggccctggggagagcctgtggggtctccaggcctgtcatcgcctgttctgtcaccatcaaagaaggctcgcagctgaaacagcagatccaatccattcagcagtccattgaaaggctcttagtctaaacctgtgg

SEQ ID NO: 151915 - DNA, 387 bp, Artificial Sequence
  derived and/or modified sequence
atgacagaggccgatgtaaaccccaaggcatatcctctcgccgatgcacacttgaccaagaaactcttggatctggtccaacagagttgcaattacaagcagcttaggaagggcgcaaacgaagcaacaaaaactctcaatagaggtatttctgagtttatcgtcatggcagccgatgccgaaccactagaaataattctacatctcccgttattgtgcgaagacaagaacgtaccctatgtatttgtaaggtcgaagcaggctctgggtcgtgcttgcggtgtttcgagacctgttattgcatgctccgttacaatcaaagagggctctcagctgaaacagcagattcaatccatacagcagtcaatcgagcgcttgttagtgtag

SEQ ID NO: 151916 - DNA, 387 bp, Artificial Sequence
  derived and/or modified sequence
atgactgaggccgacgtaaatcccaaagcgtacccactcgctgatgctcacctgaccaagaaattgttggatcttgtccagcaaagctgtaactataaacagttgagaaaaggcgctaatgaagccaccaagacactgaaccgcggaatttccgaattcattgtgatggccgctgacgctgagccgctagaaattatccttcacctacccctcctgtgtgaggacaagaacgtgccctatgtcttcgtacggtccaagcaagccctgggtcgggcttgtggtgtgtcgcgtccagtcatcgcgtgctcagtcactatcaaggaaggctcccagctgaagcagcagatacagtctattcaacagtcaatcgagagattgcttgtttag

SEQ ID NO: 151917 - DNA, 399 bp, Artificial Sequence
  derived and/or modified sequence
atgctcctggttcaaactgaagctgacgttaaccccaaggcctatcccctcgctgacgcccaccttacgaagaagctccttgacctcgtgcaacagtcttgcaactacaagcagttaaggaagggtgccaatgaggctacaaagactctgaacagaggcatctctgaattcatcgtaatggccgctgatgccgaaccattggaaatcattttgcatctccctctgctgtgcgaggataagaacgtcccgtatgtctttgttcggtcgaagcaggcattaggcagagcttgtggggtctctcgtccagtgatcgcctgttcagttacaataaaggagggcagccagctcaagcaacaaatccagtccatccagcaatccatagaacgattgcttgtgtag

SEQ ID NO: 151918 - DNA, 399 bp, Artificial Sequence
  derived and/or modified sequence
atgctgctggtgcagaccgaggccgacgtgaaccccaaggcctaccccctggccgacgcccacctgaccaagaagctgctggacctggtgcagcagagctgcaactacaagcagctgagaaagggcgccaacgaggccaccaagaccctgaacagaggcatcagcgagttcatcgtgatggccgccgacgccgagcccctggagatcatcctgcacctgcccctgctgtgcgaggacaagaacgtgccctacgtgttcgtgagaagcaagcaggccctgggcagagcctgcggcgtgagcagacccgtgatcgcctgcagcgtgaccatcaaggagggcagccagctgaagcagcagatccagagcatccagcagagcatcgagagactgctggtgtag

SEQ ID NO: 151919 - protein, 187 aa, Artificial Sequence
  derived and/or modified sequence
MGGLFWRSALRGLRCGPRAPGPSLLVRHGSGGPSWTRERTLVAVKPDGVQRRLVGDVIQRFERRGFTLVGMKMLQAPESVLAEHYQDLRRKPFYPALIRYMSSGPVVAMVWEGYNVVRASRAMIGHTDSAEAAPGTIRGDFSVHISRNVIHASDSVEGAQREIQLWFQSSELVSWADGGQHSSIHPA

SEQ ID NO: 151920 - protein, 195 aa, Artificial Sequence
  derived and/or modified sequence
MGGLFWRSALRGLRCGPRAPGPSLLVRHGSGLPPSALKRGPSWTRERTLVAVKPDGVQRRLVGDVIQRFERRGFTLVGMKMLQAPESVLAEHYQDLRRKPFYPALIRYMSSGPVVAMVWEGYNVVRASRAMIGHTDSAEAAPGTIRGDFSVHISRNVIHASDSVEGAQREIQLWFQSSELVSWADGGQHSSIHPA

SEQ ID NO: 151921 - protein, 233 aa, Artificial Sequence
  derived and/or modified sequence
MGGLFWRSALRGLRCGPRAPGPSLLVRHGSGGPSWTRERTLVAVKPDGVQRRLVGDVIQRFERRGFTLVGMKMLQAPESVLAEHYQDLRRKPFYPALIRYMSSGPVVAMVWEGYNVVRASRAMIGHTDSAEAAPGTIRGDFSVHISRNVIHASDSVEGAQREIQLWFQSSELSPTGAPWPSRRPTWRGTTVSPRTATSSARTCCGTKWPSSQEAALGLGSGLLRFSCGTAAIR

SEQ ID NO: 151922 - DNA, 564 bp, Artificial Sequence
  derived and/or modified sequence
atgggcggcctgttctggagaagcgccctgagaggcctgagatgcggccccagagcccccggccccagcctgctggtgagacacggcagcggcggccccagctggaccagagagagaaccctggtggccgtgaagcccgacggcgtgcagagaagactggtgggcgacgtgatccagagattcgagagaagaggcttcaccctggtgggcatgaagatgctgcaggcccccgagagcgtgctggccgagcactaccaggacctgagaagaaagcccttctaccccgccctgatcagatacatgagcagcggccccgtggtggccatggtgtgggagggctacaacgtggtgagagccagcagagccatgatcggccacaccgacagcgccgaggccgcccccggcaccatcagaggcgacttcagcgtgcacatcagcagaaacgtgatccacgccagcgacagcgtggagggcgcccagagagagatccagctgtggttccagagcagcgagctggtgagctgggccgacggcggccagcacagcagcatccaccccgcctag

SEQ ID NO: 151923 - DNA, 564 bp, Artificial Sequence
  derived and/or modified sequence
atggggggactgttttggcggtctgctcttaggggcctacggtgtgggccaagagcaccaggtcctagcttgctcgtgcgtcatggatccggcgggcccagctggacaagggagagaacgcttgtggctgttaagcctgatggcgttcagagacgcctggtaggcgacgtcatacagcgcttcgaacgtagggggttcacgctcgtcggaatgaagatgctccaagcgcctgagtctgtgctggctgagcactaccaggacctcagaagaaagcctttttaccccgctcttatccgatacatgtcaagcgggccagtggtggctatggtgtgggaggggtacaatgtggttagggcatcacgggcgatgattggtcatacagactccgcggaggccgccccgggcacaatccggggtgatttcagcgtgcatatctccagaaatgtgattcacgcgagcgactccgtggagggggcccagagagaaattcagctttggtttcagtcatcggaactcgtctcgtgggccgacgggggtcagcatagctctatacaccccgcgtag

SEQ ID NO: 151924 - DNA, 564 bp, Artificial Sequence
  derived and/or modified sequence
atgggcggcctcttctggaggtctgccctgcggggcctgcgctgtggcccccgggcccctggccccagcctgctggtgcgccacggcagcggcggccccagctggacccgggagaggaccctggtggccgtgaagccagatggagtgcagaggcggctggtgggagatgtgatccagagatttgaaagaagaggcttcaccctggtgggcatgaagatgctgcaggcccctgagagcgtgctggccgagcactaccaggacctgcggaggaagcccttctacccagccctgatccgctacatgagcagcggccctgtggtggccatggtgtgggagggctacaacgtggtgcgggccagccgggccatgattggccacacagattctgctgaggccgcccctggcaccatccggggggacttctctgtgcacatcagcagaaatgtcatccacgccagtgacagcgtggagggcgcccagcgggagatccagctgtggttccagagcagcgagctggtgtcctgggcagatggcggccagcacagcagcatccacccagcctag

SEQ ID NO: 151925 - DNA, 564 bp, Artificial Sequence
  derived and/or modified sequence
atgggcggcctgttctggcggagcgccctgcggggcctgcggtgcggccctcgtgctcctgggcctagtctcctggtcagacatgggagtgggggtccttcgtggacacgcgagcgcactcttgtggccgtgaagccagacggagtgcagagaaggctggttggggatgtgattcagcggtttgagagaaggggctttactctagtcgggatgaaaatgttgcaggctcccgaaagtgtgctcgctgagcactatcaggatctccggcgaaagccattctaccccgccttgatcagatacatgtcctccggaccagtagttgccatggtctgggaaggttacaacgtggtgagagctagccgggcaatgatcggacacacagattcagcagaagcagctcccggtacaatcagaggcgatttctctgtacatatctctcgtaatgttatccacgcctccgattcagttgaaggggctcagagggaaatccagctgtggtttcagtcgtcggaactcgttagctgggcagatggcggccagcacagtagcattcatccagcatag

SEQ ID NO: 151926 - DNA, 564 bp, Artificial Sequence
  derived and/or modified sequence
atgggcggactcttctggcgatctgccctcaggggacttcgctgcggacccagggctcccggaccatccctcctggttcgccatggctctggagggccttcttggacaagggaacggacacttgtggctgttaaaccggacggcgttcagagacgcctggtgggggatgtgatccagaggtttgaacggagagggttcacactggtaggcatgaaaatgttacaggcacccgagtcagtacttgccgagcactatcaggatttgaggcgcaaaccattctatcctgccctgataagatacatgtcttcaggcccagtggtggctatggtctgggaaggctacaatgtggttcgggcatcaagggccatgatcggccatacagactcagccgaggcagctccaggcacaataagaggggatttctcagtccatatctcgcgcaatgttatccatgcctctgattctgtagaaggcgctcagagggaaatacagctgtggtttcaatcctctgaattagtctcctgggccgacggagggcagcactcttccattcatcctgcatag

SEQ ID NO: 151927 - DNA, 588 bp, Artificial Sequence
  derived and/or modified sequence
atgggcggcctgttctggagaagcgccctgagaggcctgagatgcggccccagagcccccggccccagcctgctggtgagacacggcagcggcctgccccccagcgccctgaagagaggccccagctggaccagagagagaaccctggtggccgtgaagcccgacggcgtgcagagaagactggtgggcgacgtgatccagagattcgagagaagaggcttcaccctggtgggcatgaagatgctgcaggcccccgagagcgtgctggccgagcactaccaggacctgagaagaaagcccttctaccccgccctgatcagatacatgagcagcggccccgtggtggccatggtgtgggagggctacaacgtggtgagagccagcagagccatgatcggccacaccgacagcgccgaggccgcccccggcaccatcagaggcgacttcagcgtgcacatcagcagaaacgtgatccacgccagcgacagcgtggagggcgcccagagagagatccagctgtggttccagagcagcgagctggtgagctgggccgacggcggccagcacagcagcatccaccccgcctag

SEQ ID NO: 151928 - DNA, 702 bp, Artificial Sequence
  derived and/or modified sequence
atgggcggcctgttctggagaagcgccctgagaggcctgagatgcggccccagagcccccggccccagcctgctggtgagacacggcagcggcggccccagctggaccagagagagaaccctggtggccgtgaagcccgacggcgtgcagagaagactggtgggcgacgtgatccagagattcgagagaagaggcttcaccctggtgggcatgaagatgctgcaggcccccgagagcgtgctggccgagcactaccaggacctgagaagaaagcccttctaccccgccctgatcagatacatgagcagcggccccgtggtggccatggtgtgggagggctacaacgtggtgagagccagcagagccatgatcggccacaccgacagcgccgaggccgcccccggcaccatcagaggcgacttcagcgtgcacatcagcagaaacgtgatccacgccagcgacagcgtggagggcgcccagagagagatccagctgtggttccagagcagcgagctgagccccaccggcgccccctggcccagcagaagacccacctggagaggcaccaccgtgagccccagaaccgccaccagcagcgccagaacctgctgcggcaccaagtggcccagcagccaggaggccgccctgggcctgggcagcggcctgctgagattcagctgcggcaccgccgccatcagatag

SEQ ID NO: 151929 - DNA, 588 bp, Artificial Sequence
  derived and/or modified sequence
atgggcggtcttttttggcgttctgctctccgaggccttagatgcggacctagagcccccggcccaagccttctagtgagacatggcagtggtctgcccccctccgccctcaaacgagggcccagttggacaagagagagaacactcgtggctgtcaagccggacggggtgcagagaaggctcgtcggggacgtgatccagcgcttcgagaggcgtggctttacactggtgggaatgaaaatgctccaggcccccgagtccgtgcttgcagagcactaccaggacttgagaaggaagcccttctaccccgctctgattagatacatgagtagcggacctgtagtcgccatggtctgggaaggctacaacgtagttagagcctcgagggctatgattgggcacaccgacagcgccgaggccgcccctggaacaatcagaggggacttcagcgttcatataagcagaaatgtgatccacgcgtccgattccgttgagggagctcagcgcgagatccaactgtggtttcagtcatctgagctggtgagctgggcagatgggggccaacattcctctatccatcctgcttag

SEQ ID NO: 151930 - DNA, 702 bp, Artificial Sequence
  derived and/or modified sequence
atgggcggcttgttttggcgcagcgctctgcggggcctgagatgtggcccaagggcccccgggcctagtctgctcgtgaggcacgggagtggcgggcctagctggactcgtgaacgtaccctggtggccgtaaagccagacggcgtgcagagacggctggtaggagatgtaatccagcggtttgagcggcgcggcttcaccctggtgggcatgaagatgctacaggcaccagagtcagtgctggccgaacattaccaagatcttcgcagaaagccattctaccccgccttgattcgttatatgtcttccggaccagtggtggcaatggtgtgggaaggctacaatgtcgtgcgagcctccagggcgatgatagggcacaccgactccgcagaagcagcgcctggaacaatcaggggcgatttcagtgtccatatcagccggaacgttatccacgcatccgattccgtcgagggcgcgcaacgcgaaatccagctgtggttccagtcatctgagctgtcacccaccggcgccccatggcctagtagaagacctacctggcgcggcactactgtgtctccacgtaccgcgacgtccagcgccagaacctgttgcggaactaagtggccctcatctcaggaggccgcactggggctcggatccggactccttagattttcctgcggcacggccgcaattaggtag

SEQ ID NO: 151931 - DNA, 588 bp, Artificial Sequence
  derived and/or modified sequence
atgggcggcctcttctggaggtctgccctgcggggcctgcgctgtggcccccgggcccctggccccagcctgctggtgcgccacggcagcggcctgcccccatctgccctgaagaggggccccagctggacccgggagaggaccctggtggccgtgaagccagatggagtgcagaggcggctggtgggagatgtgatccagagatttgaaagaagaggcttcaccctggtgggcatgaagatgctgcaggcccctgagagcgtgctggccgagcactaccaggacctgcggaggaagcccttctacccagccctgatccgctacatgagcagcggccctgtggtggccatggtgtgggagggctacaacgtggtgcgggccagccgggccatgattggccacacagattctgctgaggccgcccctggcaccatccggggggacttctctgtgcacatcagcagaaatgtcatccacgccagtgacagcgtggagggcgcccagcgggagatccagctgtggttccagagcagcgagctggtgtcctgggcagatggcggccagcacagcagcatccacccagcctag

SEQ ID NO: 151932 - DNA, 702 bp, Artificial Sequence
  derived and/or modified sequence
atgggcggcctcttctggaggtctgccctgcggggcctgcgctgtggcccccgggcccctggccccagcctgctggtgcgccacggcagcggcggccccagctggacccgggagaggaccctggtggccgtgaagccagatggagtgcagaggcggctggtgggagatgtgatccagagatttgaaagaagaggcttcaccctggtgggcatgaagatgctgcaggcccctgagagcgtgctggccgagcactaccaggacctgcggaggaagcccttctacccagccctgatccgctacatgagcagcggccctgtggtggccatggtgtgggagggctacaacgtggtgcgggccagccgggccatgattggccacacagattctgctgaggccgcccctggcaccatccggggggacttctctgtgcacatcagcagaaatgtcatccacgccagtgacagcgtggagggcgcccagcgggagatccagctgtggttccagagcagcgagctgagccccactggagccccctggcccagccggcggcccacctggaggggcaccaccgtgagccccaggacagccaccagcagcgcccggacctgctgcggcaccaagtggcccagcagccaggaggccgccctgggcctgggcagcggcctgctgcgcttcagctgtggcacagctgccatcagatag

SEQ ID NO: 151933 - DNA, 588 bp, Artificial Sequence
  derived and/or modified sequence
atgggcggcctgttctggcggagcgccctgcggggcctgcggtgcgggcccagggcaccaggaccatctctgctagtgcggcacggtagtgggctgcctccaagcgccctgaagcgaggtccgagttggacaagggagcggactctggtggcagtgaaaccagacggtgtgcagcgtaggctagtcggggacgtaatccaaaggttcgagcggcggggcttcactcttgtgggaatgaaaatgctccaggcacccgaatccgtgttggccgaacattaccaggacctccgacggaagccattttatcccgcactgataaggtatatgtcatcgggtcctgtggtggcaatggtttgggagggatataacgtggtccgagcgtcaagggcaatgataggtcacacggactccgctgaggccgcccctggaactataaggggcgacttctccgtccacatttcccgaaacgtcatacatgccagtgattccgtcgaaggtgcccaaagagagatccaactttggtttcagtcctcagagctggtgtcctgggctgacggcgggcagcacagcagcattcaccccgcctag

SEQ ID NO: 151934 - DNA, 702 bp, Artificial Sequence
  derived and/or modified sequence
atgggcggcctgttctggcggagcgccctgcggggcctgcggtgcggcccccgggcccctggaccctctcttcttgtgaggcacggcagtggcgggccaagctggactcgggaaagaactttagtggctgtcaagccagatggtgttcagcgacgcctcgtgggtgatgtaatccagcggttcgagcgccggggcttcaccctggtcgggatgaaaatgctgcaagctcccgagagtgtgttggcagaacactatcaggacctgagaagaaaacccttctaccccgctctcattagatatatgtcttctggtccagttgtggccatggtttgggaaggttacaacgttgtccgtgctagtagggccatgattgggcacactgactcggccgaggccgcccccgggactattagaggggatttctctgtccacatttcaagaaatgtcattcatgcgtccgatagcgtggaaggggcgcagcgggagatccagctgtggtttcaaagcagcgaacttagtcccaccggcgctccatggccatccagaagacccacctggagaggcacgactgtttctccacgtactgccacctcttctgcacggacatgttgtggaactaagtggccttcctcacaagaggctgcacttggcctgggaagcggcttgcttcgcttctcctgtgggaccgctgctattcgttag

SEQ ID NO: 151935 - DNA, 995 bp, Artificial Sequence
  derived and/or modified sequence
gcgggccgggcgtcatgggcggcctcttctggcgctccgcgctgcgggggctgcgctgcggcccgcgggccccgggcccgagcctgctagtgcgccacggctcgggagggccctcctggacccgggagcggaccctggtggcggtgaagcccgatggcgtgcaacggcggctcgttggggacgtgatccagcgctttgagaggcggggcttcacgctggtggggatgaagatgctgcaggcaccagagagcgtccttgccgagcactaccaggacctgcggaggaagcccttctaccctgccctcatccgctacatgagctctgggcctgtggtggccatggtctgggaagggtacaatgtcgtccgcgcctcgagggccatgattggacacaccgactcggctgaggctgccccaggaaccataaggggtgacttcagcgtccacatcagcaggaatgtcatccacgccagcgactccgtggagggggcccagcgggagatccagctgtggttccagagcagtgagctggtgagctgggcagacgggggccagcacagcagcatccacccagcctgaggctcaagctgcccttaccaccccatcccccacgcaggaccaactacctccgtcagcaagaacccaagcccacatccaaacctgcctgtcccaaaccacttacttccctgttcacctctgccccaccccagcccagaggagtttgagccaccaacttcagtgcctttctgtaccccaagccagcacaagattggaccaatcctttttgcaccaaagtgccggacaacctttgtggtgggggggggtcttcacattatcataacctctcctctaaaggggaggcattaaaattcactgtgcccagcacatgggtggtacactaattatgacttcccccagctctgaggtagaaatgacgcctttatgcaagttgtaaggagttgaacagtaaagaggaagttttgcacacccagttcc

SEQ ID NO: 151936 - DNA, 766 bp, Artificial Sequence
  derived and/or modified sequence
gcgggccgggcgtcatgggcggcctcttctggcgctccgcgctgcgggggctgcgctgcggcccgcgggccccgggcccgagcctgctagtgcgccacggctcggggctccctccatcggctctgaaaagagggccctcctggacccgggagcggaccctggtggcggtgaagcccgatggcgtgcaacggcggctcgttggggacgtgatccagcgctttgagaggcggggcttcacgctggtggggatgaagatgctgcaggcaccagagagcgtccttgccgagcactaccaggacctgcggaggaagcccttctaccctgccctcatccgctacatgagctctgggcctgtggtggccatggtctgggaagggtacaatgtcgtccgcgcctcgagggccatgattggacacaccgactcggctgaggctgccccaggaaccataaggggtgacttcagcgtccacatcagcaggaatgtcatccacgccagcgactccgtggagggggcccagcgggagatccagctgtggttccagagcagtgagctggtgagctgggcagacgggggccagcacagcagcatccacccagcctgaggctcaagctgcccttaccaccccatcccccacgcaggaccaactacctccgtcagcaagaacccaagcccacatccaaacctgcctgtcccaaaccacttacttccctgttcacctctgccccaccccagcccagaggagtttgagccaccaacttcagtgcc

SEQ ID NO: 151937 - DNA, 1232 bp, Artificial Sequence
  derived and/or modified sequence
cctccttctcccgccctggggctcacgtgggaatttcaccctccattggagggggctcagaccagggcttctagacctccttttggtccgtgaatttatttttgagacagagtcttgctctattgctcaggctggagtgcagcggtgcagtcacagctcactgcagcctcaatctcctgggctcacgcgatcctcctgcctcagcctcccgagtgggccttcctccgtgggaaagcgttaaaacgatagttaacggttgcgtcggtgtaaagacgaatgcaattcgagaaggattcattattattttgttttttcttctgatttttaacagaaattggcgttgaacatttcccccgagggccctcctggacccgggagcggaccctggtggcggtgaagcccgatggcgtgcaacggcggctcgttggggacgtgatccagcgctttgagaggcggggcttcacgctggtggggatgaagatgctgcaggcaccagagagcgtccttgccgagcactaccaggacctgcggaggaagcccttctaccctgccctcatccgctacatgagctctgggcctgtggtggccatggtctgggaagggtacaatgtcgtccgcgcctcgagggccatgattggacacaccgactcggctgaggctgccccaggaaccataaggggtgacttcagcgtccacatcagcaggaatgtcatccacgccagcgactccgtggagggggcccagcgggagatccagctgtggttccagagcagtgagctggtgagctgggcagacgggggccagcacagcagcatccacccagcctgaggctcaagctgcccttaccaccccatcccccacgcaggaccaactacctccgtcagcaagaacccaagcccacatccaaacctgcctgtcccaaaccacttacttccctgttcacctctgccccaccccagcccagaggagtttgagccaccaacttcagtgcctttctgtaccccaagccagcacaagattggaccaatcctttttgcaccaaagtgccggacaacctttgtggtgggggggggtcttcacattatcataacctctcctctaaaggggaggcattaaaattcactgtgcccagcacatgggtggtacactaattatgacttcccccagctctgaggtagaaatgacgcctttatgcaagttgtaaggagttgaacagtaaagaggaagttttg

SEQ ID NO: 151938 - DNA, 1111 bp, Artificial Sequence
  derived and/or modified sequence
cagcggcccgcgggccgggcgtcatgggcggcctcttctggcgctccgcgctgcgggggctgcgctgcggcccgcgggccccgggcccgagcctgctagtgcgccacggctcgggagggccctcctggacccgggagcggaccctggtggcggtgaagcccgatggcgtgcaacggcggctcgttggggacgtgatccagcgctttgagaggcggggcttcacgctggtggggatgaagatgctgcaggcaccagagagcgtccttgccgagcactaccaggacctgcggaggaagcccttctaccctgccctcatccgctacatgagctctgggcctgtggtggccatggtctgggaagggtacaatgtcgtccgcgcctcgagggccatgattggacacaccgactcggctgaggctgccccaggaaccataaggggtgacttcagcgtccacatcagcaggaatgtcatccacgccagcgactccgtggagggggcccagcgggagatccagctgtggttccagagcagtgagctgtccccgacgggagcgccatggcccagccgccgcccgacgtggagggggacgactgtctccccgcgtaccgccacctcttctgcccggacctgctgcgggacaaagtggccttcatcacaggaggcggctctgggattgggttccggattgctgagattttcatgcggcacggctgccatacggtgattgccagtaggagcctgccgcgagtgctgacgagatgggttttcaccacgttgaccaggctggtctcgaattcctgacctcaggtgatccgcccacctcagcctcccaaagtgccaggattacaggccgccaggaagctggctggggccaccggccggcgctgcctccctctctctatggacgtccgagcgcccccagctgtcatggccgccgtggaccaggctctgaaggagtttggcagaatcgacattctcattaactgtgcggccgggaacttcctgtgccccgctggcgccttgtccttcaacgccttcaagaccgtgatggacatcgataccagcggcaccttcaatgtgtctcgtgtgctctatgagaagttcttccgg

SEQ ID NO: 151939 - DNA, 985 bp, Artificial Sequence
  derived and/or modified sequence
ggggagccgctccgctggggcgttcgctgaaggccaagttaggccagaatctgactgggacgtcaggccccaagtccccggccccgccgctgcccggcccccccagctgccacctcacaggacgatccatgtcccagggctccctccatcggctctgaaaagtgagccgccgcctgcaatgcccgcaccagccgcagcagagccccaggctacacaaggcgccctgcaaactgggttttgggggaacaaaccaaccagggggtcttcctcccgtgggcttcagccgcctgctggggttaacttttcctcctggcctggcggagcccctttggctctgtccagattctgtgggacatacagggtctgggctcctctggaaaccagggacccgatgccggagggtagcttggctctggagcagcctgggactataggaaggagggccctcctggacccgggagcggaccctggtggcggtgaagcccgatggcgtgcaacggcggctcgttggggacgtgatccagcgctttgagaggcggggcttcacgctggtggggatgaagatgctgcaggcaccagagagcgtccttgccgagcactaccaggacctgcggaggaagcccttctaccctgccctcatccgctacatgagctctgggcctgtggtggccatggtctgggaagggtacaatgtcgtccgcgcctcgagggccatgattggacacaccgactcggctgaggctgccccaggaaccataaggggtgacttcagcgtccacatcagcaggaatgtcatccacgccagcgactccgtggagggggcccagcgggagatccagctgtggttccagagcagtgagctggtgagctgggcagacgggggccagcacagcagcatccacccagcctgaggctcaagctgcccttaccaccccatcccccacgcaggaccaactacctccgtcagcaagaacccaagcccaca

SEQ ID NO: 151940 - DNA, 588 bp, Artificial Sequence
  derived and/or modified sequence
atgggaggcttgttctggcgtagtgcactacggggactgcgctgcggccctcgcgctcctggcccatctctcctggttaggcatggctccgggcttcccccatctgccttaaaacgagggccaagctggacaagagaaaggacccttgtggccgttaaaccggatggcgtgcaaaggcggctcgttggggatgtgatacaacggttcgagcgcagaggatttactcttgtgggaatgaaaatgttgcaagcgcctgagagcgttttagccgaacactatcaggatttacgcagaaagcctttttacccagcgctgattaggtacatgagttcaggtcccgtggtagccatggtctgggagggctataatgtcgtgcgggcatctagagccatgatcggccacaccgacagcgcagaggccgctccaggcaccattcggggagacttcagcgtccacattagcagaaacgtgattcatgcgagtgacagtgtggaaggcgcacaaagagagatacagctctggttccagtcttccgaacttgtgtcatgggcagacggtgggcagcacagctcaatccatcctgcttag

SEQ ID NO: 151941 - DNA, 702 bp, Artificial Sequence
  derived and/or modified sequence
atgggagggcttttctggcgctccgccctgcgcggtctccgatgtggaccaagagcaccgggtccctccctcctggtgcgccacggctccggcggaccttcctggacacgagagcgcaccttagtggccgtcaagcccgacggagtgcagaggcggctggtaggtgacgtgatccagaggttcgaacgcaggggattcacactggtcggcatgaaaatgctccaagcaccggagagcgtcctggcagagcattatcaggacctgagacggaaaccgttttatccagccctcatccgatatatgagctccggtcctgttgtggccatggtatgggaaggatacaacgtggttcgcgcatctagagctatgatcgggcataccgactccgctgaggctgcacccggaacaatcagaggtgactttagtgtccacatctcacgcaacgtcattcacgcatcggacagcgtggagggggctcagcgagagatccagctctggtttcagtcttcggagctaagccccactggcgctccctggccatctcggaggccaacgtggcgtggtaccaccgtatcaccacgcaccgccacttccagtgcccgtacatgctgtggtacaaaatggcccagttctcaagaggcagcactgggcctcggatccggacttctcagattctcttgcgggaccgcagcaatcagatag

SEQ ID NO: 151942 - protein, 1183 aa, Artificial Sequence
  derived and/or modified sequence
MQLKIMPKKKRLSAGRVPLILFLCQMISALEVPLDLVQPPTITQQSPKDYIIDPRENIVIQCEAKGKPPPSFSWTRNGTHFDIDKDPLVTMKPGTGTLIINIMSEGKAETYEGVYQCTARNERGAAVSNNIVVRPSRSPLWTKEKLEPITLQSGQSLVLPCRPPIGLPPPIIFWMDNSFQRLPQSERVSQGLNGDLYFSNVLPEDTREDYICYARFNHTQTIQQKQPISVKVISVDELNDTIAANLSDTEFYGAKSSRERPPTFLTPEGNASNKEELRGNVLSLECIAEGLPTPIIYWAKEDGMLPKNRTVYKNFEKTLQIIHVSEADSGNYQCIAKNALGAIHHTISVRVKAAPYWITAPQNLVLSPGEDGTLICRANGNPKPRISWLTNGVPIEIAPDDPSRKIDGDTIIFSNVQERSSAVYQCNASNEYGYLLANAFVNVLAEPPRILTPANTLYQVIANRPALLDCAFFGSPLPTIEWFKGAKGSALHEDIYVLHENGTLEIPVAQKDSTGTYTCVARNKLGMAKNEVHLEIKDPTWIVKQPEYAVVQRGSMVSFECKVKHDHTLSLTVLWLKDNRELPSDERFTVDKDHLVVADVSDDDSGTYTCVANTTLDSVSASAVLSVVDVPNPPFDLELTDQLDKSVQLSWTPGDDNNSPITKFIIEYEDAMHKPGLWHHQTEVSGTQTTAQLKLSPYVNYSFRVMAVNSIGKSLPSEASEQYLTKASEPDKNPTAVEGLGSEPDNLVITWKPLNGFESNGPGLQYKVSWRQKDGDDEWTSVVVANVSKYIVSGTPTFVPYLIKVQALNDMGFAPEPAVVMGHSGEDLPMVAPGNVRVNVVNSTLAEVHWDPVPLKSIRGHLQGYRIYYWKTQSSSKRNRRHIEKKILTFQGSKTHGMLPGLEPFSHYTLNVRVVNGKGEGPASPDRVFNTPEGVPSAPSSLKIVNPTLDSLTLEWDPPSHPNGILTEYTLKYQPINSTHELGPLVDLKIPANKTRWTLKNLNFSTRYKFYFYAQTSAGSGSQITEEAVTTVDEAMASRQVDIATQGWFIGLMCAVALLILILLIVCFIRRNKGGKYPVKEKEDAHADPEIQPMKEDDGTFGEYSDAEDHKPLKKGSRTPSDRTVKKEDSDDSLVDYGEGVNGQFNEDGSFIGQYSGKKEKEPAEGNESSEAPSPVNAMNSFV

SEQ ID NO: 151943 - DNA, 3552 bp, Artificial Sequence
  derived and/or modified sequence
atgcagctcaagattatgcccaagaaaaaacgattgtctgctggtcgcgtgccactgattctgttcctgtgccagatgatctccgcccttgaggtcccgctggacttagtgcagccacctacgatcactcaacagtcccctaaggattacattatcgatcccagggaaaacatcgtcattcaatgtgaggccaagggaaaacccccgccatcattcagctggacacggaacgggacccactttgacattgacaaggaccctcttgtgactatgaaacccgggacgggtacacttattataaacatcatgagtgaaggaaaagccgagacatatgagggcgtttatcagtgtacagcccggaatgagcggggggcagctgtgagtaataatatagtcgtacggccaagccgcagccccctgtggaccaaggaaaaactggagccaatcactctgcagagcggccaaagcctcgtgctgccctgtcggccccccattggccttccccccccaatcattttctggatggataactctttccaaagattacctcagtcagaacgagtgagtcagggtctgaatggggatctgtacttctctaatgtgctgcctgaagatacgcgggaagactatatttgctatgcccgtttcaaccatacccagaccattcaacaaaaacagcccattagcgttaaggttatatccgtggatgaactcaatgacactatcgcggctaacctgtccgacaccgagttctatggagcaaagtctagtagggagcggccaccaacttttctgactcccgagggcaatgctagcaataaggaagaactgagaggcaacgtgctaagtctggagtgtatcgccgagggcttgcccacccctatcatctactgggccaaagaggacggtatgctgcccaagaaccggactgtctacaaaaatttcgagaaaaccctgcaaatcatacacgtgtccgaggccgactctggtaattaccagtgtatcgctaagaacgcgttaggagcaatacaccacacgatctctgtgagagtgaaagccgccccatactggatcactgccccccagaacctggtcctgtcccccggcgaagacggcaccctgatttgtagagccaacggcaatcctaagccgagaatttcttggctgacaaacggcgtcccaatagaaattgctcctgatgatccgtcaaggaaaatcgatggagatacaatcatcttttcgaacgtgcaagaaaggtcttcggctgtgtaccagtgtaacgccagtaatgaatacggctatctgctagctaacgctttcgtgaacgttctggccgaacctccccggatcctgacaccagctaacactttgtatcaggtgatcgccaacagacctgctctgcttgattgtgcatttttcgggtctccactgcctactatcgaatggtttaaaggcgctaaaggaagcgctttgcacgaagacatctacgtgctccatgagaacggaacactggaaattccagtggcccagaaggactcaactggaacttacacgtgtgttgcacgtaataagctgggtatggccaaaaacgaggtgcacctggagatcaaggacccaacatggatcgtcaagcagcctgaatacgcagtggtgcagagggggtccatggttagctttgaatgtaaggttaaacacgatcatacccttagcctgaccgtgctgtggctcaaggacaatagggagcttcctagcgatgaacgcttcacggttgacaaagatcaccttgtggtggccgatgtgagcgacgatgactcaggaacctacacgtgcgtcgccaatacgaccctggactcagtgtcggccagcgccgtcctgtccgtagttgatgttcctaatcccccgtttgaccttgaacttacagatcaactggacaaaagtgttcagttgagctggacaccaggagatgataacaactccccaatcaccaagttcatcatagagtatgaagatgcgatgcataagcctggcctgtggcaccaccaaacggaagtgtcgggaacacagaccacagcccagttgaagctatccccttatgtcaattacagttttcgcgtcatggcagtgaattccatcggaaagagcctgccaagcgaagcgagcgagcaatatctaacaaaggcgagcgagcccgataaaaacccgacagccgtcgaggggttggggagcgagcctgacaacttagtaataacatggaagcccttgaacggcttcgaatcaaacgggcctgggcttcagtacaaggtgtcatggcggcaaaaagacggcgatgacgagtggacctctgtggtcgtggctaacgttagcaaatacattgtgtctggaactccgacatttgtgccttatcttattaaagttcaagcactgaacgatatgggatttgctccagagcccgcagtcgtcatgggccatagcggtgaggatctgccaatggtagcgcccggcaacgtgagggtgaacgttgttaacagtactttggctgaagtgcattgggaccccgtcccattgaaatctatccggggacacctgcagggatatcgcatttactattggaagactcagagtagttcaaagcggaatcgacgccacatcgagaaaaagatactgacatttcagggaagcaagacccatggtatgctacccggactcgagccattctctcattacaccctgaatgtcagagttgtgaacgggaaaggggaaggcccagcttctcccgatagggttttcaatacacctgaaggcgtcccttccgcaccctcaagtcttaaaatcgtcaaccccaccctggactccctgaccctggagtgggacccaccaagtcaccccaatggaatcctgactgaatatacactgaagtaccagccaattaatagtacccacgaacttgggcctctagtggatttgaagattccagcgaataagactcgttggacactcaaaaatctcaatttttcaactcgctacaaattttatttctacgcgcagacaagtgccggttcagggagtcagatcacagaggaagccgtgactacggtggatgaggcaatggccagccggcaagtggatatcgctacccagggctggttcatcggccttatgtgtgctgtcgctttactcattctgatactactcatcgtctgcttcataagacgcaataagggaggcaagtatcctgtcaaggagaaggaggatgcccatgccgaccccgagatccagcctatgaaggaagacgacggcacttttggggaatatagcgatgctgaagaccataagcccctgaagaagggctctcgcaccccgagcgatcgtacagtaaagaaggaagacagcgacgatagtctcgtagactacggcgagggagtgaatggacagtttaacgaggacggatcctttattgggcagtactctggaaagaaagagaaggaaccagccgagggtaatgaatcaagcgaggctccatcccctgtcaacgcaatgaactcgtttgtttag

SEQ ID NO: 151944 - DNA, 1296 bp, Artificial Sequence
  derived and/or modified sequence
atgcaactgaagatcatgcccaagaagaaaaggctctctgccggaagagtgccgctcatcctctttttatgccaaatgatttcggcattggaagtaccgctggacctagtgcaaccccccaccatcacccaacagtcgccgaaggactacatcattgatccccgcgagaacatcgttatccagtgcgaggccaaaggtaagccacccccgagtttttcctggacacggaacggcacgcatttcgatattgataaggatccactagttaccatgaagcctggaactgggacactgataattaatatcatgtctgaaggcaaagccgagacatacgaaggggtgtaccagtgcactgcccggaacgaacgaggagcagccgttagtaacaatatcgttgttcggccttcacgaagcccactgtggactaaggagaaactcgagcccatcaccctccagagcggtcagagtctagtgctgccctgtcgaccaccgatcggcctcccaccccccattatcttttggatggacaacagttttcagcggctcccgcagtcagagagggtttcccaagggttaaacggagacctgtacttcagtaatgtgctgcctgaggatacccgtgaggactacatatgctatgcccggttcaaccacactcagacaatacagcagaagcaacctatttcagtcaaagtgatctcagtggatgaactcaacgacacaattgctgccaacctgtcagacacagaattctatggggcgaagagcagccgcgagcggcccccaacttttctgacccccgaggggaacgccagtaacaaggaggaattgcgcggaaatgtgctctcactggaatgcatcgctgaaggcctccccacgcctattatttattgggctaaagaggatggcatgctccccaaaaatcggacggtctacaaaaacttcgaaaagaccttgcagatcattcatgtgtccgaggctgactccggcaattatcaatgcatcgccaagaacgccttgggcgcaatccaccatacaatctctgtgcgggtgaaggcagccccctattggatcactgctcctcagaacttagttttgagtcctggcgaggatggaacactaatctgtcgggcgaatggaaaccccaagcctcggatcagttggttgacaaacggggtccccatcgaaatagcacccgacgatccctcgcgcaagatcgacggggacacgattattttttctaatgttcaggaacgcagtagcgctgtgtaccagtgcaatgcatccaacgagtag

SEQ ID NO: 151945 - DNA, 321 bp, Artificial Sequence
  derived and/or modified sequence
atgcagctgaagatcatgccaaagaaaaaaagattgagcgccggacgggtgccactgatacttttcctgtgccagatgatttccgctctggaggtgccgctcgacttggtgcagccacccactatcacccaacagagtcccaaggactacatcatcgacccaagagaaaatatcgtgattcaatgtgaggccaagggaaaaccccctcccagcttctcatggacacgcaatggaacacacttcgacatcgacaaagaccccctggttacaatgaaacctgggacgggcacccttatcatcaatatcatgagcgagggctag

SEQ ID NO: 151946 - DNA, 321 bp, Artificial Sequence
  derived and/or modified sequence
atgcagcttaaaattatgcccaagaagaaaagactgagtgcaggtcgcgtcccattgatccttttcctatgccagatgatctcggctctggaagttcccctggatctggtgcagccgccaactatcacacagcagtcaccaaaggactatattatcgatcctcgggagaatatagtcatccaatgtgaggctaaaggaaagcctccaccttctttttcctggactcggaacgggacccactttgacatcgataaagatccacttgtcactatgaagcccgggactggaacactgataattaacattatgagcgagggatag

SEQ ID NO: 151947 - DNA, 3552 bp, Artificial Sequence
  derived and/or modified sequence
atgcagctgaagatcatgcccaagaagaagaggctgtctgctggccgggtgcccctcatcctcttcctgtgccagatgatcagcgccctggaggtgcccctggacctggtgcagccccccaccatcacccagcagagccccaaggactacatcatcgacccccgggagaacatcgtcatccagtgtgaggccaagggcaagcccccacccagcttctcctggaccagaaatggcacccactttgatattgacaaggaccccctggtgaccatgaagccaggcaccggcaccctcatcatcaacatcatgtctgagggcaaggccgagacctatgaaggagtgtaccagtgcacagccagaaatgaaagaggagctgctgtgagcaacaacatcgtggtgcggcccagccgcagccccctgtggaccaaggagaagctggagcccatcaccctgcagagcggccagagcctggtgctgccctgcaggcctcccatcggcctgcccccacccatcatcttctggatggacaacagcttccagaggctgccccagagcgagcgggtgtcccagggcctgaatggagacctgtacttcagcaatgtgctgcctgaggacacccgggaggactacatctgctacgcccgcttcaaccacacccagaccatccagcagaagcagcccatctctgtgaaggtgatctctgtggatgagctgaatgacaccatcgccgccaacctgagtgacacagagttctacggggccaagagcagccgggagaggcctcccaccttcctgaccccagagggcaatgccagcaacaaggaggagctgcggggaaatgtgctgagcctggagtgcatcgccgagggcctgcccacccccatcatctactgggccaaggaggatggcatgctgcccaagaacagaacagtgtacaagaactttgagaagaccctgcagatcatccacgtgtctgaggccgacagcggcaactaccagtgcatcgccaagaatgccctgggcgccatccaccacaccatctctgtgcgggtgaaggccgccccctactggatcacagccccccagaacctggtgctgagccctggagaagatggcaccctcatctgccgggccaatggaaaccccaagccccgcatctcctggctgaccaatggagtgcccattgaaattgccccagatgaccccagcaggaagattgatggagacaccatcatcttcagcaatgtgcaggagaggagcagcgctgtgtaccagtgcaatgccagcaatgaatatggctacctgctggccaatgcctttgtgaatgtgctggccgagcccccacgcatcctgaccccagccaacaccctgtaccaggtgattgccaacagacctgccctgctggactgtgccttcttcggcagccccctgcccaccatcgagtggttcaagggggccaagggcagcgccctgcacgaggacatctacgtgctgcatgaaaatggcaccctggagatccctgtggcccagaaggacagcacaggcacctacacctgtgtggccaggaacaagctgggcatggccaagaatgaggtgcacctggagatcaaggaccccacctggatcgtgaagcagccagaatatgctgtggtgcagaggggctccatggtgtcctttgagtgcaaggtgaagcatgaccacaccctgagcctgactgtgctgtggctgaaggacaaccgggagctgcccagtgatgagcgcttcaccgtggacaaggaccacctggtggtggctgatgtgtctgatgatgattctggcacctacacctgtgtggccaacaccaccctggacagcgtgtctgccagcgctgtgctgtctgtggtggatgtgcccaaccccccatttgacctggagctgacagaccagctggacaagtctgtgcagctgtcctggaccccaggagatgacaacaacagccccatcaccaagttcatcatcgagtatgaagatgccatgcacaagccaggcctgtggcaccaccagacagaggtgtctggcacccagaccacagcccagctgaagctgagcccctacgtgaactacagcttccgggtgatggctgtgaacagcatcggcaagagcctgcccagcgaggccagcgagcagtacctgaccaaggccagcgagccagacaagaaccccacagctgtggagggcctgggcagcgagccagacaacctggtgatcacctggaagcccctgaatggatttgagagcaatggacctggcctgcagtacaaggtgtcctggaggcagaaggatggagatgatgagtggacctctgtggtggtggccaacgtgtccaagtacatcgtgtctggcacccccacctttgtgccctacctgatcaaggtgcaggccctgaatgacatgggctttgcccctgagcctgctgtggtgatgggccacagcggggaggacctgcccatggtggcccctggaaatgtgcgggtgaatgtggtgaacagcaccctggccgaggtgcactgggaccctgtgcccctgaagagcatccggggccacctgcagggctaccgcatctactactggaagacccagagcagcagcaagaggaacagaagacacatcgagaagaagatcctgaccttccagggcagcaagacccacggcatgctgcccggcctggagcccttcagccactacaccctgaatgtgcgggtggtgaatggcaagggggagggccctgccagcccagacagagtcttcaacaccccagagggcgtgcccagcgcccccagcagcctgaagatcgtgaaccccaccctggacagcctgaccctggagtgggacccccccagccaccccaacggcatcctgacagagtacaccctgaagtaccagcccatcaacagcacccatgagctgggccccctggtggacctgaagatcccagccaacaagacccgctggaccctgaagaacctgaacttcagcacccgctacaagttctacttctacgcccagaccagcgctggcagcggcagccagatcacagaggaggccgtgaccaccgtggatgaggccatggccagccggcaggtggacatcgccacccagggctggttcatcggcctgatgtgtgctgtggccctgctgatcctgatcctgctgattgtgtgcttcatcagaagaaataaaggaggcaagtaccctgtgaaggagaaggaggatgcccatgctgaccctgagatccagcccatgaaggaggatgatggcacctttggagagtacagtgatgctgaggaccacaagcccctgaagaagggcagcaggacccccagcgacagaacagtgaagaaggaggacagtgatgacagcctggtggactatggagagggcgtgaatggccagttcaatgaagatggcagcttcatcggccagtacagcggcaagaaggagaaggagcctgctgagggcaatgaaagcagcgaggcccccagccctgtgaatgccatgaacagctttgtgtag

SEQ ID NO: 151948 - DNA, 1296 bp, Artificial Sequence
  derived and/or modified sequence
atgcagctgaagatcatgcccaagaagaagaggctgtctgctggccgggtgcccctcatcctcttcctgtgccagatgatcagcgccctggaggtgcccctggacctggtgcagccccccaccatcacccagcagagccccaaggactacatcatcgacccccgggagaacatcgtcatccagtgtgaggccaagggcaagcccccacccagcttctcctggaccagaaatggcacccactttgatattgacaaggaccccctggtgaccatgaagccaggcaccggcaccctcatcatcaacatcatgtctgagggcaaggccgagacctatgaaggagtgtaccagtgcacagccagaaatgaaagaggagctgctgtgagcaacaacatcgtggtgcggcccagccgcagccccctgtggaccaaggagaagctggagcccatcaccctgcagagcggccagagcctggtgctgccctgcaggcctcccatcggcctgcccccacccatcatcttctggatggacaacagcttccagaggctgccccagagcgagcgggtgtcccagggcctgaatggagacctgtacttcagcaatgtgctgcctgaggacacccgggaggactacatctgctacgcccgcttcaaccacacccagaccatccagcagaagcagcccatctctgtgaaggtgatctctgtggatgagctgaatgacaccatcgccgccaacctgagtgacacagagttctacggggccaagagcagccgggagaggcctcccaccttcctgaccccagagggcaatgccagcaacaaggaggagctgcggggaaatgtgctgagcctggagtgcatcgccgagggcctgcccacccccatcatctactgggccaaggaggatggcatgctgcccaagaacagaacagtgtacaagaactttgagaagaccctgcagatcatccacgtgtctgaggccgacagcggcaactaccagtgcatcgccaagaatgccctgggcgccatccaccacaccatctctgtgcgggtgaaggccgccccctactggatcacagccccccagaacctggtgctgagccctggagaagatggcaccctcatctgccgggccaatggaaaccccaagccccgcatctcctggctgaccaatggagtgcccattgaaattgccccagatgaccccagcaggaagattgatggagacaccatcatcttcagcaatgtgcaggagaggagcagcgctgtgtaccagtgcaatgccagcaatgaatag

SEQ ID NO: 151949 - DNA, 321 bp, Artificial Sequence
  derived and/or modified sequence
atgcagctgaagatcatgcccaagaagaagaggctgtctgctggccgggtgcccctcatcctcttcctgtgccagatgatcagcgccctggaggtgcccctggacctggtgcagccccccaccatcacccagcagagccccaaggactacatcatcgacccccgggagaacatcgtcatccagtgtgaggccaagggcaagcccccacccagcttctcctggaccagaaatggcacccactttgatattgacaaggaccccctggtgaccatgaagccaggcaccggcaccctcatcatcaacatcatgtctgagggctag

SEQ ID NO: 151950 - DNA, 3552 bp, Artificial Sequence
  derived and/or modified sequence
atgcagctgaagatcatgcccaagaagaagcggctgagcgccggcagggtgccgttgatcctgtttctgtgtcagatgatctctgccctggaggtgcccctggacttagttcagccgccaacgattacccaacagtcccctaaggattacatcatcgaccccagagaaaacattgtgatccaatgtgaggccaaggggaagcctcccccgtccttctcttggactcgaaatggaacacattttgacatcgacaaggatcctcttgtcaccatgaagccaggaacaggtactctaataattaacatcatgagtgaagggaaagctgagacctacgaaggtgtatatcagtgtacggccagaaatgagcgaggcgccgcagtctcaaataatatcgtggttcgaccttctcggtcgccgctttggacgaaagagaagctcgaaccaatcacactccagagcggccaatcgctcgtcctgccttgccgccctcctatcgggctcccaccgccaatcatcttctggatggacaactcattccagaggctgccgcagagcgaaagggtatcgcagggtttaaacggcgacctctacttttctaatgttctacccgaggatacaagagaggattacatctgttacgctaggttcaatcatactcagacgattcagcagaagcagccgattagtgtgaaagttatctcggttgatgagttgaacgatacaatagccgccaacttgagtgacacagaattctacggagccaaaagttcaagagaacggccccctacgttcctcaccccggagggaaacgcaagtaataaagaggaactgcgcggaaatgtgctgtctctcgagtgtatcgcagaaggtctgccaactccaattatttactgggccaaagaggatggaatgcttcctaagaatcggacagtgtataagaatttcgagaagacattgcagattatccacgtgtcagaagcggatagtggcaattaccaatgcattgccaagaatgcgctgggcgctatccatcatactatttcagtccgggttaaggcagcaccatactggatcacagcccctcaaaatttggtgctgtccccaggcgaggatggtacactgatatgtcgggcaaatgggaatcctaagccccggattagttggcttaccaatggcgtaccaatcgaaatcgcccccgacgacccatctcgtaagatcgacggagacactattatcttctccaatgtgcaagaaaggagcagtgccgtatatcagtgcaatgccagcaatgagtacgggtacctccttgccaatgccttcgtcaatgtccttgccgagcccccccgcatcctcacccccgctaacactttgtaccaggtcattgcaaacaggcctgctttactcgattgtgccttcttcggctccccactgcctactatcgaatggttcaagggcgcaaagggatccgcactgcatgaagacatctacgtccttcacgagaatggaacacttgaaattcccgtagctcaaaaagacagcaccgggacctatacatgtgtggccaggaataaattaggtatggccaagaatgaggtgcatctcgagatcaaagaccccacgtggatcgtgaaacaacctgagtacgcggtcgtgcagagaggtagcatggtctcctttgagtgtaaggtgaaacatgaccacactttgtccctgacagtattatggctcaaagacaatagagagctgccctctgatgagcgcttcacagtggacaaagaccatctggtggtggctgatgtcagcgatgacgacagcggaacttacacttgcgttgccaatacaaccctggattccgttagcgcatctgccgtcctgtctgttgtggacgtgccaaatccacctttcgatctcgaactgaccgatcagctggacaaatctgtgcaacttagctggacgccaggggatgataataattctcctatcacaaagttcattatcgagtacgaggacgcgatgcataagcccggcctctggcaccatcagactgaggtctcaggcacccagacgacagcccagttaaagctcagtccatatgtgaactattcctttagagttatggcggtcaattctattggcaaatctctcccatccgaggccagcgaacagtatttgacaaaagcaagtgagccagacaaaaatcctaccgccgtcgagggcttggggtctgagcccgataacttagtcataacctggaaaccgctgaatgggtttgagtcgaatggccccggcctacaatacaaggtcagctggcggcagaaggacggagacgatgaatggacatcagttgtcgtggcgaacgtttccaagtacattgttagcggaacaccgacattcgtgccatacctgataaaagtgcaggcattgaatgacatgggttttgcccctgagccggccgtcgtcatggggcacagcggggaggatctgccaatggtggcccccgggaacgtgagagtgaatgttgtgaactccaccctggccgaggttcactgggacccagtcccgctgaaatctattagaggccacctgcagggatacaggatttactactggaagacgcagtcgagcagcaagagaaatcgacggcatatcgaaaaaaagatactgacgtttcagggctctaaaacacatggtatgttaccaggcttggagccattctcccattataccctgaacgtaagagttgtgaacggtaaaggcgaagggcccgccagtccagacagagttttcaacactcccgaaggtgttccttcagcccccagcagcttgaaaatcgtaaacccaacactggatagtctgacattagagtgggatccaccctcacaccctaatggcatcttgaccgagtacactcttaagtatcagcccatcaatagtacccacgaacttgggcctttggtggatttgaagattccagccaataaaacacgatggacactcaaaaacctcaacttctctaccaggtataaattttacttctatgcgcagacatcagccgggtcaggatcacagattacagaagaagcagtgacaactgttgacgaggccatggcaagccgacaggtcgatattgcaacccagggctggttcatcggcctcatgtgtgctgtcgccttactcattttgattcttctgatcgtgtgcttcatccggagaaataagggcggcaagtatccggtgaaggagaaagaagatgctcacgccgacccagaaatacagccaatgaaggaagacgacggcacattcggggaatacagtgatgcggaagatcataaaccactgaagaaggggagtcgtacaccctctgatcgcactgttaaaaaggaggatagtgatgactctcttgtggattatggagaaggggttaatggacagtttaacgaagacgggtcattcattggccagtactcaggaaagaaggagaaagagccagccgagggaaacgaatcaagcgaggccccctcccccgtgaatgccatgaattccttcgtgtag

SEQ ID NO: 151951 - DNA, 1296 bp, Artificial Sequence
  derived and/or modified sequence
atgcagctgaagatcatgcccaagaagaagcggctgagcgccggcagggtccccttgatactgttcctgtgccaaatgatcagcgcactcgaggtgcccctggatcttgttcagccgcccaccatcacccaacagagtccaaaagactacattattgaccctcgggagaacatcgtgatccagtgtgaggctaaagggaagccgcctccatcctttagttggacacgcaatggcactcattttgatatcgataaagatcctttggtcacgatgaaaccaggcacaggaaccttgattatcaacattatgtctgagggcaaagcggaaacctacgaaggggtctatcagtgtactgctcgaaacgagcgcggcgccgctgtctccaataacattgtggtgagaccatctaggagccccctgtggaccaaagagaagctcgaacccatcacactgcaaagtgggcagtccctcgtcctaccatgtcgcccccccatcggactgcctcctccgattattttttggatggataacagttttcaacgcctcccccaatcagaaagggtctcccagggcctcaacggagacttatactttagcaatgtgctgccggaggatacacgagaggattacatatgctacgccagatttaatcatacacagaccatacagcaaaagcagcctatcagcgtgaaagtaatcagcgtcgatgaattaaacgataccatagcagcaaacctgtccgatacagaattctatggggcaaagagcagtcgggagaggcctcctaccttcctgactccagagggcaacgcctctaataaggaagagctgcggggcaatgtgctgagcctcgagtgtatcgcagaagggctaccaaccccaattatatattgggctaaagaggatggtatgttgccgaaaaaccgcacagtctataagaacttcgagaagactctgcaaattattcatgtcagtgaggccgattcgggaaattaccagtgtattgccaagaacgcgctgggggctattcaccatacgatttctgtgcgtgtgaaagccgctccttactggattaccgcgccacagaacctagtactgagcccgggcgaggacggtaccctgatatgcagggccaacggcaaccccaaaccgcggatcagttggctaacaaacggggtgccaatagagattgcccccgatgacccatcccgcaagattgacggtgacaccataatcttcagtaatgtgcaggaacgcagcagcgccgtatatcaatgcaacgcaagtaacgagtag

SEQ ID NO: 151952 - DNA, 321 bp, Artificial Sequence
  derived and/or modified sequence
atgcagctgaagatcatgcccaagaagaagcggctgagcgccggcagggtacctctcattttgttcctctgtcaaatgatttcagcccttgaagtgcccttggaccttgtccagccacccactattactcaacagtcacctaaggattatattatcgacccccgcgagaacatcgtgatccaatgtgaggctaaggggaaacctccgccatcatttagttggacgagaaacggtacccattttgatatcgataaagatcctctagttactatgaagcccggaaccggaaccctgattattaacatcatgagcgagggatag

SEQ ID NO: 151953 - DNA, 321 bp, Artificial Sequence
  derived and/or modified sequence
atgcagctgaagatcatgcccaagaagaagcggctgagcgccggccgcgttcctctgatcttgtttctctgccagatgataagcgccctggaggtgccactggatttagtacagccaccgacaatcacccagcagtcccccaaagattacataatcgatccgcgggagaacatcgtgatccagtgtgaggccaaaggtaagccgccccccagcttctcatggaccaggaatggaacccacttcgatattgacaaggaccctctggtgactatgaaaccaggcacaggaaccctgatcatcaatattatgagtgaggggtag

SEQ ID NO: 151954 - DNA, 6228 bp, Artificial Sequence
  derived and/or modified sequence
agccagaggggatagcttcgtcgagaacggaggacaccggcggtccagggtcctgggcagtcgcgccagagctgagcggagggcgcggcgcgagaacgaatctttgtgacattctctctcagcattctttatcccctgtttgctgaagacttcgacaaaagctggtcttagctgttggcattctcctgagaaaaggatagcttcagaaatcagaaaaacatttgggaggtgtctagcccagtggaccttctgaagagcaatgctaagaagacgtttggtttaaagaattaaaaggaagaacaacttaagagcttcttcaaagtttcccgcatgaaaattacttaaacgttgcacacaacgtttcacaaaatcttttgtgaaagaagaaaaggaaattcagtgtgtgagtctcagcaggagttaagctaatgcagcttaaaataatgccgaaaaagaagcgcttatctgcgggcagagtgcccctgattctcttcctgtgccagatgattagtgcactggaagtacctcttgatctggtacagcctccaaccatcacccaacagtctccaaaagattacattattgaccctcgggagaatattgtaatccagtgtgaagccaaagggaaaccgcccccaagcttttcctggacccgtaatgggactcattttgacatcgataaagaccctctggtcaccatgaagcctggcacaggaacgctcataattaacatcatgagcgaagggaaagctgagacctatgaaggagtctatcagtgtacagcaaggaacgaacgcggagctgcagtttctaataacattgttgtccgcccatccagatcaccattgtggaccaaagaaaaacttgaaccaatcacacttcaaagtggtcagtctttagtacttccctgcagacccccaattggattaccaccacctataatattttggatggataattcctttcaaagacttccacaaagtgagagagtttctcaaggtttgaatggggacctttatttttccaatgtcctcccagaggacacccgcgaagactatatctgttatgctagatttaatcatactcaaaccatacagcagaagcaacctatttctgtgaaggtgatttcagtggatgaattgaatgacactatagctgctaatttgagtgacactgagttttatggtgctaaatcaagtagagagaggccaccaacatttttaactccagaaggcaatgcaagtaacaaagaggaattaagaggaaatgtgctttcactggagtgcattgcagaaggactgcctaccccaattatttactgggcaaaggaagatggaatgctacccaaaaacaggacagtttataagaactttgagaaaaccttgcagatcattcatgtttcagaagcagactctggaaattaccaatgtatagcaaaaaacgcattaggagccatccaccataccatttctgttagagttaaagcggctccatactggatcacagcccctcaaaatcttgtgctgtccccaggagaggatgggaccttgatctgcagagctaatggcaaccccaaacccagaattagctggttaacaaatggagtcccaatagaaattgcccctgatgaccccagcagaaaaatagatggcgataccattattttttcaaatgttcaagaaagatcaagtgcagtctatcagtgcaatgcctctaatgaatatggatatttactggcaaacgcatttgtaaatgtgctggctgagccaccacgaatcctcacacctgcaaacacactctaccaggtcattgcaaacaggcctgctttactagactgtgccttctttgggtctcctctcccaaccatcgagtggtttaaaggagctaaaggaagtgctcttcatgaagatatttatgttttacatgaaaatggaactttggaaattcctgtggcccaaaaggacagtacaggaacttatacgtgtgttgcaaggaataaattagggatggcgaagaatgaagttcacttagaaatcaaagatcctacatggatcgttaaacagcccgaatatgcagttgtgcaaagagggagcatggtgtcctttgaatgcaaagtgaaacatgatcacaccttatccctcactgtcctgtggctgaaggacaacagggaactgcccagtgatgaaaggttcactgttgacaaggatcatctagtggtagctgatgtcagtgacgatgacagcgggacctacacgtgtgtggccaacaccactctggacagcgtctccgccagcgctgtgcttagcgttgttgatgtcccaaatcctccctttgacttagaactgacagatcaacttgacaaaagtgttcagctgtcatggaccccaggcgatgacaacaatagccccattacaaaattcatcatcgaatatgaagatgcaatgcacaagccagggctgtggcaccaccaaactgaagtttctggaacacagaccacagcccagctgaagctgtctccttacgtgaactactccttccgcgtgatggcagtgaacagcattgggaagagcttgcccagcgaggcgtctgagcagtatttgacgaaagcctcagaaccagataaaaaccccacagctgtggaaggactgggatcagagcctgataatttggtgattacgtggaagcccttgaatggtttcgaatctaatgggccaggccttcagtacaaagttagctggcgccagaaagatggtgatgatgaatggacatctgtggttgtggcaaatgtatccaaatatattgtctcaggcacgccaacctttgttccatacctgatcaaagttcaggccctgaatgacatggggtttgcccccgagccagctgtagtcatgggacattctggagaagacctcccaatggtggctcctgggaacgtgcgtgtgaatgtggtgaacagtaccttagccgaggtgcactgggacccagtacctctgaaaagcatccgaggacacctacaaggctatcggatttactattggaagacccagagttcatctaaaagaaacagacgtcacattgagaaaaagatcctcaccttccaaggcagcaagactcatggcatgttgccggggctagagccctttagccactacacactgaatgtccgagtggtcaatgggaaaggggagggcccagccagccctgacagagtctttaatactccagaaggagtccccagtgctccctcgtctttgaagattgtgaatccaacactggactctctcactttggaatgggatccaccgagccacccgaatggcattttgacagagtacaccttaaagtatcagccaattaacagcacacatgaattaggccctctggtagatttgaaaattcctgccaacaagacacggtggactttaaaaaatttaaatttcagcactcgatataagttttatttctatgcacaaacatcagcaggatcaggaagtcaaattacagaggaagcagtaacaactgtggatgaagcgatggcaagccggcaggtggatattgcaactcagggctggttcattggtctgatgtgtgctgttgctctccttatcttaattttgctgattgtttgcttcatcagaagaaacaagggtggtaaatatccagttaaagaaaaggaagatgcccatgctgaccctgaaatccagcctatgaaggaagatgatgggacatttggagaatacagtgatgcagaagaccacaagcctttgaaaaaaggaagtcgaactccttcagacaggactgtgaaaaaagaagatagtgacgacagcctagttgactatggagaaggggttaatggccagttcaatgaggatggctcctttattggacaatacagtggtaagaaagagaaagagccggctgaaggaaacgaaagctcagaggcaccttctcctgtcaacgccatgaattcctttgtttaatttttaagctctttgccaatattccatttctctagaatgtttatcctaagcacttgtttgtcagccctctcatactatgaacatatgggtagagagtatattttctgctgtatgttagtattatgagaatagttacagcaaaaacataactcagtcaaatgatatgttaatatgaactggaatgcaaagtgcatactttttcattcaaaatgggtattcttgatttcctcagaactgataaaaaataatgcaacatcaccaacagatcctgttatttcctctgcaggatacagttcaatatgatgcatgaaaaatgctccacatttaaaggacatacccgtgtatgttatgaaaacatggtttgatactttgtttatactaccctcagctgaacccctatatatgaattccgttttcattgtcaagaatgttactgtagtattctctagaacttcaatgtctttgtggacattgttgtgaaattggtgactatgtatagctgtcgttagtctttttgggagactgttaggaacagtttgtacagtatatacttgctaaatgagttcattatgacagtcacattgctgatgcttactgagaactattacctactcttggctcctgttactccgtaggcttcttaatcttccaggcattacagcagcacagtgttctactttttacatcatttctatgttcggttgtttttaggcataaacaatgtgtattgcagtgcatttcggcatttgtgccatactgaaagaatcaaaaacaaatcatccaaattaaatttcaaacattatttcagagaacacagggcaagacacatacagtgccttcagatattaagcattccacaacatcgtgcattctgtatcagctggtccagtccattctgggtcctagattactgtcattgtctaaaagtaacttttaaaaagcagagttcatgaaaactgcaatgctgggaaaagaaggaaacatgaaaataaaaataagacagtttattagaaatagcatttcctcataagcataaaaagaaaatctttgttgccaactgaagcacatgatgattttgtggtcctttatggtttctattacattcagtaagaaagatgtcaacatgctagaaaattaattttaaaactaagttattccaacactaaaagcatacaacagcatgccaacagtaatatattattctccaagactttacctatgtaagtgttcaaaactctgcagcattaaacaacgtgtatgcaaattgttatggatacatttcagaatctaagaaatcaggcaagtgcttaaaaggccaacggtccaagggattacatctgcagtttaaaaagtaaatatatattctatcgtattcataaacaatatctatcaaatgggttacctccaaatatgaaaatctataacaacctatggttgaaggaatgctcagtttcatttgccaataaattggtttctcataacttgcatcaagtttaattttaagtaaagctttttatatgtagatattttgttgaatttgtaaatacacttaaaatgtagatgctatatgcttataggtgttacatacaaataaacatgcaatgtttatgttgtactgtataagaggtaagctaattaatgcagtgaatgggattggaaagcatctacttaaatatctattgggttcccccctccccccaccttttttgctgtgaaactgaaatagtgaacttttctacgtattgacagcagatttttcgatgaaatcttcagagctttgcctatggggcacagtaggcctagtaacctggcatgtttgatatatgtaggtaaagcataatttaaagtaatcccaggtaaagatggccctaaatactttcatgtctctatattcatttttcacagatccacctgtctcttgaaaatataaaaagacaaaacaggtttgccttggcatcagagagcacaaagattaaaagttactttaaatttgccaatattttgggagaacaataaaactacattttttcctcttccatactggtagatgcgaaatttatctgtgcatgaaagggtcacttctgtaatagtgcaacagatttggtattaaaaattaaatgtggttttaaaagttcctctctcttttgtaatttatgttcccaattgagtgtgaatgtccaagtaatggtgtatgtaatggtacaggcaaatgtgactggatttccctcaaaaaagtaactattaaaca

SEQ ID NO: 151955 - DNA, 1594 bp, Artificial Sequence
  derived and/or modified sequence
gattttccatgggcaggagccagaggacgggctggaccattgcttcgtcctcctctaacagaatctacactagagacgatttgtggctaatggtgcagtttaacttaaaacttctgaggagaacccccatcttcagttatcgtagttcatgacctcccagcagtatgaggatttattaactcatgtctctttaatttcccgcatgaaaattacttaaacgttgcacacaacgtttcacaaaatcttttgtgaaagaagaaaaggaaattcagtgtgtgagtctcagcaggagttaagctaatgcagcttaaaataatgccgaaaaagaagcgcttatctgcgggcagagtgcccctgattctcttcctgtgccagatgattagtgcactggaagtacctcttgatctggtacagcctccaaccatcacccaacagtctccaaaagattacattattgaccctcgggagaatattgtaatccagtgtgaagccaaagggaaaccgcccccaagcttttcctggacccgtaatgggactcattttgacatcgataaagaccctctggtcaccatgaagcctggcacaggaacgctcataattaacatcatgagcgaagggaaagctgagacctatgaaggagtctatcagtgtacagcaaggaacgaacgcggagctgcagtttctaataacattgttgtccgcccatccagatcaccattgtggaccaaagaaaaacttgaaccaatcacacttcaaagtggtcagtctttagtacttccctgcagacccccaattggattaccaccacctataatattttggatggataattcctttcaaagacttccacaaagtgagagagtttctcaaggtttgaatggggacctttatttttccaatgtcctcccagaggacacccgcgaagactatatctgttatgctagatttaatcatactcaaaccatacagcagaagcaacctatttctgtgaaggtgatttcagtggatgaattgaatgacactatagctgctaatttgagtgacactgagttttatggtgctaaatcaagtagagagaggccaccaacatttttaactccagaaggcaatgcaagtaacaaagaggaattaagaggaaatgtgctttcactggagtgcattgcagaaggactgcctaccccaattatttactgggcaaaggaagatggaatgctacccaaaaacaggacagtttataagaactttgagaaaaccttgcagatcattcatgtttcagaagcagactctggaaattaccaatgtatagcaaaaaacgcattaggagccatccaccataccatttctgttagagttaaagcggctccatactggatcacagcccctcaaaatcttgtgctgtccccaggagaggatgggaccttgatctgcagagctaatggcaaccccaaacccagaattagctggttaacaaatggagtcccaatagaaattgcccctgatgaccccagcagaaaaatagatggcgataccattattttttcaaatgttcaagaaagatcaagtgcagtctatcagtgcaatgcctctaatgaat

SEQ ID NO: 151956 - DNA, 583 bp, Artificial Sequence
  derived and/or modified sequence
atttgcaaaggaaacattgaggctgacgagaggagagttggagactgcagaacttgggagctgtccactgctctgcctttgtcacagcccagagcaatgctaagaagacgtttggtttaaagaattaaaaggaagaacaacttaagagcttcttcaaagtttcccgcatgaaaattacttaaacgttgcacacaacgtttcacaaaatcttttgtgaaagaagaaaaggaaattcagtgtgtgagtctcagcaggagttaagctaatgcagcttaaaataatgccgaaaaagaagcgcttatctgcgggcagagtgcccctgattctcttcctgtgccagatgattagtgcactggaagtacctcttgatctggtacagcctccaaccatcacccaacagtctccaaaagattacattattgaccctcgggagaatattgtaatccagtgtgaagccaaagggaaaccgcccccaagcttttcctggacccgtaatgggactcattttgacatcgataaagaccctctggtcaccatgaagcctggcacaggaacgctcataattaacatcatgagcgaaggg

SEQ ID NO: 151957 - DNA, 726 bp, Artificial Sequence
  derived and/or modified sequence
attgtattgccacaaagccaggctgatcaccctgggaggcctgggaggtctgagcagctttggattggctgtcaggagcaggactttaacattttactgcacatgggccagccacagcagggttcaattgccagtgcttttatctgcagaaatgtgctgggatgggcactttgtttaaaatttccctttgctactgggaggaaatggaaagcagtaagataacttcatttgtaagagcaatgctaagaagacgtttggtttaaagaattaaaaggaagaacaacttaagagcttcttcaaagtttcccgcatgaaaattacttaaacgttgcacacaacgtttcacaaaatcttttgtgaaagaagaaaaggaaattcagtgtgtgagtctcagcaggagttaagctaatgcagcttaaaataatgccgaaaaagaagcgcttatctgcgggcagagtgcccctgattctcttcctgtgccagatgattagtgcactggaagtacctcttgatctggtacagcctccaaccatcacccaacagtctccaaaagattacattattgaccctcgggagaatattgtaatccagtgtgaagccaaagggaaaccgcccccaagcttttcctggacccgtaatgggactcattttgacatcgataaagaccctctggtcaccatgaagcctggcacaggaacgctcataattaacatcatgagcgaaggg

SEQ ID NO: 151958 - DNA, 3552 bp, Artificial Sequence
  derived and/or modified sequence
atgcagcttaaaattatgcctaagaaaaagaggctgtctgccggtcgtgtgcccctgatcctgttcctgtgccaaatgatttcagccctggaggtccctcttgacctcgtgcaaccccctaccattacacagcagtctcctaaagattacattattgatcctagggagaacattgtgatacagtgtgaggccaaaggaaaacctcccccaagtttttcatggactcgcaacgggacccattttgatattgacaaagatcctttggtgacgatgaagcctggcaccggaaccttgatcattaacattatgtccgagggcaaagcagaaacatacgaaggcgtttaccagtgtacagcaaggaacgagcgaggggcagccgtctcaaacaatatagtcgttcgaccaagtcgtagccccctgtggaccaaggagaaacttgaaccaattactctgcagagcggtcagagtctagtcctgccttgccggccaccaatcggcctcccacccccaattatcttttggatggacaactccttccagcgcctgcctcagtccgaaagagtgtcccaagggctgaatggggacctctatttctcgaatgtcctgccagaggatactcgtgaggattacatctgttacgctcggtttaatcatacccagacgatccagcaaaagcaaccaatttcggtgaaagtgatctcagttgacgaattaaatgatacaatcgcggctaatctttcggacacagaattctacggagcgaaatccagccgcgaacggccaccaactttcctgaccccagagggcaatgctagcaacaaggaggagttacgtgggaacgtactttctctagagtgtattgcagaggggcttcccaccccaataatttactgggcgaaggaagatggcatgttgcctaagaacagaacggtgtacaaaaacttcgagaaaacactgcagatcatccacgtgtccgaggcagactccggaaattatcagtgcatagccaagaacgccttaggcgctattcaccataccatttccgtgcgcgtgaaagctgccccatattggatcacggctccacagaatctggtcctgtcacccggagaagacgggacactgatctgccgcgctaatggcaatcccaagccccgaatctcttggcttacaaatggtgtgccaattgagatcgcacccgacgatccatcacggaaaatcgatggggataccatcatcttctctaatgtgcaggagaggtcttcagcggtgtatcagtgcaatgctagcaacgagtatggctacctacttgctaacgcctttgttaacgttcttgccgaacccccaaggatcctgacgcccgcaaatactctttaccaggtaattgccaatcgcccagccctgctggactgtgccttctttgggtcaccactccccaccatcgaatggtttaaaggagcgaaggggagcgcactgcacgaggatatatacgtcttgcacgagaatggaaccttagagataccagtggcccaaaaggattcaaccggcacctacacctgtgtcgccaggaacaaactgggcatggccaaaaacgaggtgcatctagaaataaaggaccctacttggatcgtgaagcagcccgagtatgctgtggtgcagagggggagcatggtttctttcgaatgcaaagtgaagcacgaccacacactcagcctgactgtactgtggctcaaagacaatagggagctgccttctgatgaacgcttcaccgttgacaaggatcacctcgtggtcgctgatgttagcgacgacgattcaggcacctacacttgcgttgcaaatactacactcgactcggtatcggctagtgcggtcctgagtgtggtcgatgtcccgaacccccctttcgacctcgaactcactgatcaactcgacaagtcagtacaactgagctggaccccaggagatgataacaactcgccaattacaaaattcataatagagtatgaagatgctatgcacaagcctggtctttggcaccaccagactgaggtctctggcactcaaacaacagcccaactgaaattaagcccttatgtgaactatagcttcagagtgatggccgtaaattctatcggtaaatcactgcccagcgaagccagtgagcaatacttgacgaaggcatccgagcctgacaagaaccctactgcagtcgaaggactgggcagcgaaccggataatctggtcatcacctggaagccactgaatggttttgagtccaacggccctgggctccagtacaaagtctcttggagacagaaggacggggacgacgagtggacaagtgtggtggtcgccaacgtcagcaaatatattgtcagcgggaccccaacatttgtcccttatctaatcaaggtgcaagccctgaacgatatgggcttcgcacccgaacctgctgtggtgatgggacacagcggcgaggacctgcctatggtggctccaggaaacgttcgcgtgaatgtggttaactcgacactagccgaagtccactgggatccagtgcccctcaagtcaatcaggggccacctgcagggctacagaatttactattggaagactcagagcagctcaaagagaaaccgccgtcatattgagaagaagatcttgactttccagggtagcaaaactcacggaatgttgccaggccttgagcccttcagccactatactctgaacgtcagggtagtcaatggaaagggggagggccctgcctcacctgaccgggtctttaatacgcctgagggtgtgccttccgctccaagcagtttgaaaattgtgaacccgacactggattccttaactttggaatgggatccacctagtcatcccaatggcattctgactgaatacaccttgaagtatcagccaatcaattctacacatgaacttggacctttggtcgatcttaagatacccgctaataaaacaagatggaccctgaagaacctgaacttcagcacacgctataagttctacttttacgcccagacttccgccggtagtggtagtcaaattaccgaagaagctgtgacaactgtggacgaagctatggcttccaggcaggttgacattgccactcaggggtggttcattggcctcatgtgcgcggtggctctgctgatcctgatcttactgatagtctgcttcatccgcaggaacaagggcggtaaatatcccgtgaaggaaaaggaggacgcacatgccgatcctgaaatacagccaatgaaggaagacgacgggacctttggagagtactcagatgccgaggaccataagccgttgaaaaagggaagcaggacacccagcgacagaaccgtcaagaaagaagatagcgacgacagtctggtggattacggggaaggggtgaatggacaattcaatgaagatgggagcttcattggacaatattctggaaagaaggagaaggaacctgccgaagggaacgaaagctctgaagcgccatcacccgtcaacgccatgaacagttttgtctag

SEQ ID NO: 151959 - DNA, 1296 bp, Artificial Sequence
  derived and/or modified sequence
atgcagttgaagatcatgcctaaaaaaaagaggctcagcgccggtcgggtaccgctgatccttttcctgtgtcagatgataagtgcgctggaggtgcccctagacctggtgcagccccctaccattacccagcagagtcctaaggattatattattgatccaagggagaacattgtgatccagtgcgaagctaagggaaaacccccaccaagttttagctggactcggaatggtacccactttgacattgacaaggatccactggtgaccatgaagcccggaaccggtacactgatcattaacataatgtccgagggaaaagccgagacgtatgagggtgtctaccagtgtacagccagaaacgaaaggggtgctgccgtgtccaacaatatcgttgtgcggccttccagaagtcctttgtggaccaaggagaagcttgaaccaatcacactgcagtccggccagtcactggtactgccatgccgccctccaataggcctccccccaccaattatcttttggatggacaattcttttcagcgtctaccccagagcgagcgggttagccaaggcctgaatggcgacctgtacttttccaatgtgctgcccgaggacacccgtgaagactatatatgctatgctcgcttcaatcatacacaaaccattcagcagaagcagcctatttcggtcaaagtgatctctgttgacgagctgaacgatacgattgccgcaaatcttagcgataccgagttctatggggcaaaaagctccagagagcggcctccaacgttcctgacaccagaaggcaatgccagcaacaaggaagagctgcgaggtaatgtcctgagtctggaatgtatagccgagggcctgccgacgccaatcatttactgggcaaaggaagacggaatgcttcccaagaacagaactgtgtacaaaaattttgagaagactcttcagatcattcacgtttctgaagctgatagcggcaactatcagtgcatcgctaagaatgctctgggagcaatccatcacacaatctctgtgagggtgaaggcagcaccgtactggatcacagccccacagaatctggtcctcagccccggagaggacggcaccttaatctgccgtgctaatggaaaccccaagcccaggattagctggttgactaatggagttcccattgaaatcgccccagatgacccctccaggaagatcgatggggataccatcattttcagcaatgtgcaagaacgttccagcgccgtgtaccagtgcaacgctagcaacgagtag

SEQ ID NO: 151960 - DNA, 321 bp, Artificial Sequence
  derived and/or modified sequence
atgcagctgaagataatgccgaaaaagaaaaggctgagtgctggaagagtacctcttattcttttcttatgccagatgatatctgccctggaagtacccctcgacctggtccagcctcccactattacacagcagtctccaaaggactacatcattgaccccagggaaaatattgttattcagtgcgaagctaagggtaagcccccaccctcgttcagctggacccgtaatggaacgcattttgatattgataaggatccattggtaaccatgaaacccggaacaggcactctgatcataaacatcatgtctgaggggtag

SEQ ID NO: 151961 - DNA, 321 bp, Artificial Sequence
  derived and/or modified sequence
atgcagcttaagattatgccgaaaaagaagcgacttagcgcgggacgggtgccactgattctcttcttgtgtcagatgatatccgcgctcgaggtcccgctagacttggtacagccccctaccatcacccagcagagccctaaagactatataattgatccaagggaaaacatcgtcatccagtgcgaagccaaaggcaaacctccgcctagcttcagttggacccgtaacggaacgcattttgatattgacaaggatcccctggtcaccatgaagcccggaaccggcacccttatcatcaatatcatgtcagaggggtag

SEQ ID NO: 151962 - DNA, 3552 bp, Artificial Sequence
  derived and/or modified sequence
atgcagctgaagatcatgcccaagaagaagagactgagcgccggcagagtgcccctgatcctgttcctgtgccagatgatcagcgccctggaggtgcccctggacctggtgcagccccccaccatcacccagcagagccccaaggactacatcatcgaccccagagagaacatcgtgatccagtgcgaggccaagggcaagcccccccccagcttcagctggaccagaaacggcacccacttcgacatcgacaaggaccccctggtgaccatgaagcccggcaccggcaccctgatcatcaacatcatgagcgagggcaaggccgagacctacgagggcgtgtaccagtgcaccgccagaaacgagagaggcgccgccgtgagcaacaacatcgtggtgagacccagcagaagccccctgtggaccaaggagaagctggagcccatcaccctgcagagcggccagagcctggtgctgccctgcagaccccccatcggcctgcccccccccatcatcttctggatggacaacagcttccagagactgccccagagcgagagagtgagccagggcctgaacggcgacctgtacttcagcaacgtgctgcccgaggacaccagagaggactacatctgctacgccagattcaaccacacccagaccatccagcagaagcagcccatcagcgtgaaggtgatcagcgtggacgagctgaacgacaccatcgccgccaacctgagcgacaccgagttctacggcgccaagagcagcagagagagaccccccaccttcctgacccccgagggcaacgccagcaacaaggaggagctgagaggcaacgtgctgagcctggagtgcatcgccgagggcctgcccacccccatcatctactgggccaaggaggacggcatgctgcccaagaacagaaccgtgtacaagaacttcgagaagaccctgcagatcatccacgtgagcgaggccgacagcggcaactaccagtgcatcgccaagaacgccctgggcgccatccaccacaccatcagcgtgagagtgaaggccgccccctactggatcaccgccccccagaacctggtgctgagccccggcgaggacggcaccctgatctgcagagccaacggcaaccccaagcccagaatcagctggctgaccaacggcgtgcccatcgagatcgcccccgacgaccccagcagaaagatcgacggcgacaccatcatcttcagcaacgtgcaggagagaagcagcgccgtgtaccagtgcaacgccagcaacgagtacggctacctgctggccaacgccttcgtgaacgtgctggccgagccccccagaatcctgacccccgccaacaccctgtaccaggtgatcgccaacagacccgccctgctggactgcgccttcttcggcagccccctgcccaccatcgagtggttcaagggcgccaagggcagcgccctgcacgaggacatctacgtgctgcacgagaacggcaccctggagatccccgtggcccagaaggacagcaccggcacctacacctgcgtggccagaaacaagctgggcatggccaagaacgaggtgcacctggagatcaaggaccccacctggatcgtgaagcagcccgagtacgccgtggtgcagagaggcagcatggtgagcttcgagtgcaaggtgaagcacgaccacaccctgagcctgaccgtgctgtggctgaaggacaacagagagctgcccagcgacgagagattcaccgtggacaaggaccacctggtggtggccgacgtgagcgacgacgacagcggcacctacacctgcgtggccaacaccaccctggacagcgtgagcgccagcgccgtgctgagcgtggtggacgtgcccaacccccccttcgacctggagctgaccgaccagctggacaagagcgtgcagctgagctggacccccggcgacgacaacaacagccccatcaccaagttcatcatcgagtacgaggacgccatgcacaagcccggcctgtggcaccaccagaccgaggtgagcggcacccagaccaccgcccagctgaagctgagcccctacgtgaactacagcttcagagtgatggccgtgaacagcatcggcaagagcctgcccagcgaggccagcgagcagtacctgaccaaggccagcgagcccgacaagaaccccaccgccgtggagggcctgggcagcgagcccgacaacctggtgatcacctggaagcccctgaacggcttcgagagcaacggccccggcctgcagtacaaggtgagctggagacagaaggacggcgacgacgagtggaccagcgtggtggtggccaacgtgagcaagtacatcgtgagcggcacccccaccttcgtgccctacctgatcaaggtgcaggccctgaacgacatgggcttcgcccccgagcccgccgtggtgatgggccacagcggcgaggacctgcccatggtggcccccggcaacgtgagagtgaacgtggtgaacagcaccctggccgaggtgcactgggaccccgtgcccctgaagagcatcagaggccacctgcagggctacagaatctactactggaagacccagagcagcagcaagagaaacagaagacacatcgagaagaagatcctgaccttccagggcagcaagacccacggcatgctgcccggcctggagcccttcagccactacaccctgaacgtgagagtggtgaacggcaagggcgagggccccgccagccccgacagagtgttcaacacccccgagggcgtgcccagcgcccccagcagcctgaagatcgtgaaccccaccctggacagcctgaccctggagtgggacccccccagccaccccaacggcatcctgaccgagtacaccctgaagtaccagcccatcaacagcacccacgagctgggccccctggtggacctgaagatccccgccaacaagaccagatggaccctgaagaacctgaacttcagcaccagatacaagttctacttctacgcccagaccagcgccggcagcggcagccagatcaccgaggaggccgtgaccaccgtggacgaggccatggccagcagacaggtggacatcgccacccagggctggttcatcggcctgatgtgcgccgtggccctgctgatcctgatcctgctgatcgtgtgcttcatcagaagaaacaagggcggcaagtaccccgtgaaggagaaggaggacgcccacgccgaccccgagatccagcccatgaaggaggacgacggcaccttcggcgagtacagcgacgccgaggaccacaagcccctgaagaagggcagcagaacccccagcgacagaaccgtgaagaaggaggacagcgacgacagcctggtggactacggcgagggcgtgaacggccagttcaacgaggacggcagcttcatcggccagtacagcggcaagaaggagaaggagcccgccgagggcaacgagagcagcgaggcccccagccccgtgaacgccatgaacagcttcgtgtag

SEQ ID NO: 151963 - DNA, 1296 bp, Artificial Sequence
  derived and/or modified sequence
atgcagctgaagatcatgcccaagaagaagagactgagcgccggcagagtgcccctgatcctgttcctgtgccagatgatcagcgccctggaggtgcccctggacctggtgcagccccccaccatcacccagcagagccccaaggactacatcatcgaccccagagagaacatcgtgatccagtgcgaggccaagggcaagcccccccccagcttcagctggaccagaaacggcacccacttcgacatcgacaaggaccccctggtgaccatgaagcccggcaccggcaccctgatcatcaacatcatgagcgagggcaaggccgagacctacgagggcgtgtaccagtgcaccgccagaaacgagagaggcgccgccgtgagcaacaacatcgtggtgagacccagcagaagccccctgtggaccaaggagaagctggagcccatcaccctgcagagcggccagagcctggtgctgccctgcagaccccccatcggcctgcccccccccatcatcttctggatggacaacagcttccagagactgccccagagcgagagagtgagccagggcctgaacggcgacctgtacttcagcaacgtgctgcccgaggacaccagagaggactacatctgctacgccagattcaaccacacccagaccatccagcagaagcagcccatcagcgtgaaggtgatcagcgtggacgagctgaacgacaccatcgccgccaacctgagcgacaccgagttctacggcgccaagagcagcagagagagaccccccaccttcctgacccccgagggcaacgccagcaacaaggaggagctgagaggcaacgtgctgagcctggagtgcatcgccgagggcctgcccacccccatcatctactgggccaaggaggacggcatgctgcccaagaacagaaccgtgtacaagaacttcgagaagaccctgcagatcatccacgtgagcgaggccgacagcggcaactaccagtgcatcgccaagaacgccctgggcgccatccaccacaccatcagcgtgagagtgaaggccgccccctactggatcaccgccccccagaacctggtgctgagccccggcgaggacggcaccctgatctgcagagccaacggcaaccccaagcccagaatcagctggctgaccaacggcgtgcccatcgagatcgcccccgacgaccccagcagaaagatcgacggcgacaccatcatcttcagcaacgtgcaggagagaagcagcgccgtgtaccagtgcaacgccagcaacgagtag

SEQ ID NO: 151964 - DNA, 321 bp, Artificial Sequence
  derived and/or modified sequence
atgcagctgaagatcatgcccaagaagaagagactgagcgccggcagagtgcccctgatcctgttcctgtgccagatgatcagcgccctggaggtgcccctggacctggtgcagccccccaccatcacccagcagagccccaaggactacatcatcgaccccagagagaacatcgtgatccagtgcgaggccaagggcaagcccccccccagcttcagctggaccagaaacggcacccacttcgacatcgacaaggaccccctggtgaccatgaagcccggcaccggcaccctgatcatcaacatcatgagcgagggctag

SEQ ID NO: 151965 - protein, 503 aa, Artificial Sequence
  derived and/or modified sequence
MEEHGVTQTEHMATIEAHAVAQQVQQVHVATYTEHSMLSADEDSPSSPEDTSYDDSDILNSTAADEVTAHLAAAGPVGMAAAAAVATGKKRKRPHVFESNPSIRKRQQTRLLRKLRATLDEYTTRVGQQAIVLCISPSKPNPVFKVFGAAPLENVVRKYKSMILEDLESALAEHAPAPQEVNSELPPLTIDGIPVSVDKMTQAQLRAFIPEMLKYSTGRGKPGWGKESCKPIWWPEDIPWANVRSDVRTEEQKQRVSWTQALRTIVKNCYKQHGREDLLYAFEDQQTQTQATATHSIAHLVPSQTVVQTFSNPDGTVSLIQVGTGATVATLADASELPTTVTVAQVNYSAVADGEVEQNWATLQGGEMTIQTTQASEATQAVASLAEAAVAASQEMQQGATVTMALNSEAAAHAVATLAEATLQGGGQIVLSGETAAAVGALTGVQDANGLVQIPVSMYQTVVTSLAQGNGPVQVAMAPVTTRISDSAVTMDGQAVEVVTLEQ

SEQ ID NO: 151966 - protein, 210 aa, Artificial Sequence
  derived and/or modified sequence
MEEHGVTQTEHMATIEAHAVAQQVQQVHVATYTEHSMLSADEDSPSSPEDTSYDDSDILNSTAADEVTAHLAAAGPVGMAAAAAVATGKKRKRPHVFESNPSIRKRQQTRLLRKLRATLDEYTTRVGQQAIVLCISPSKPNPVFKVFGAAPLENVVRKYKSMILEDLESALAEHAPAPQEVNSELPPLTIDGIPVSVDKMTQAQLRAFIP

SEQ ID NO: 151967 - protein, 342 aa, Artificial Sequence
  derived and/or modified sequence
MILEDLESALAEHAPAPQEVNSELPPLTIDGIPVSVDKMTQAQLRAFIPEMLKYSTGRGKPGWGKESCKPIWWPEDIPWANVRSDVRTEEQKQRVSWTQALRTIVKNCYKQHGREDLLYAFEDQQTQTQATATHSIAHLVPSQTVVQTFSNPDGTVSLIQVGTGATVATLADASELPTTVTVAQVNYSAVADGEVEQNWATLQGGEMTIQTTQASEATQAVASLAEAAVAASQEMQQGATVTMALNSEAAAHAVATLAEATLQGGGQIVLSGETAAAVGALTGVQDANGLVQIPVSMYQTVVTSLAQGNGPVQVAMAPVTTRISDSAVTMDGQAVEVVTLEQ

SEQ ID NO: 151968 - DNA, 1512 bp, Artificial Sequence
  derived and/or modified sequence
atggaagagcacggggtcactcagacagagcatatggccactattgaggctcacgcagtcgctcagcaggtgcagcaggttcacgtggccacctatacggaacattccatgttatcagcggatgaggactctccaagcagccctgaggatacaagctacgatgattccgatatcctgaactctacagccgctgacgaagtgactgcacaccttgctgcagccggacccgtgggtatggctgccgctgctgcagtagccacaggcaagaagcggaagcggccccatgtgttcgagagcaatcccagcatacgaaagaggcagcagacccggcttctgaggaaactccgcgccacactggatgagtacacgacccgcgtcgggcagcaggctattgttctttgcatcagcccaagcaagccaaaccccgtgttcaaggtcttcggcgctgccccgctggaaaacgtggtgcggaagtacaagagtatgattctagaggacctggagagcgccctggctgagcacgctccggccccacaggaggtgaactctgagttaccaccgctgacgattgatggaatccccgtttctgtggataagatgacacaggcgcagctcagagcttttatccccgagatgttgaaatacagcactggaagggggaagccgggctggggcaaagagagctgtaaaccaatatggtggcccgaagatatcccatgggcgaacgttcggagtgacgtccggaccgaggagcagaaacagcgggtgtcctggacacaggcgctgcgtaccatcgtgaagaactgctataaacagcatggtagagaagatctgctatacgcctttgaggatcagcaaacacagacacaggcaacggcaacacattccatagctcacctggtgccttcccaaacagttgtgcagactttttccaatcctgatggcaccgtcagtctgattcaagtcggtacaggcgctaccgtcgctacattagccgacgctagcgaactcccaacgacagtcaccgtcgctcaggtcaactactctgccgtcgccgacggtgaagtggagcagaactgggctactttgcaagggggggagatgaccatccaaaccacgcaggccagcgaggcgactcaggccgtggctagccttgccgaagccgctgtagctgcttctcaggagatgcaacagggtgctacagtcacgatggccctcaactctgaagccgcagcccacgctgtggcaaccctggctgaagccactttgcagggcggcggccagatcgtgctgagcggagagaccgcagcggcagtcggggccctaacaggtgtccaagacgccaatggtctggtacaaatccccgtgtcgatgtaccagacagtggtaaccagtctcgcccagggaaacggcccagtgcaggtcgctatggcccctgttacaactcgcatttccgactccgcagtgaccatggacggccaagctgtagaagtcgtgacactggaacagtag

SEQ ID NO: 151969 - DNA, 1314 bp, Artificial Sequence
  derived and/or modified sequence
atggaggaacacggagtaacccaaaccgaacatatggctacaatcgaagcgcatgccgtggcacaacaggtccagcaggtgcacgtcgcaacttacactgagcactccatgctaagcgctgacgaagacagccccagttcccccgaagacaccagctatgacgattccgacatcctcaactctaccgcagcggatgaggttacagcccacctcgctgccgcaggacccgttggcatggccgcagctgcagcagtcgcaacaggaaagaaacggaagagaccccacgtgtttgagtcaaaccctagcatcagaaaaaggcagcagaccaggttgctgagaaagctcagggcgaccctcgatgagtacacaacacgggtcggccagcaggctatcgtgctgtgtatctcccctagcaagccgaatcccgtctttaaagtattcggagccgcacctctggaaaacgtcgtacggaaatacaagagcatgattcttgaggacctcgagtcagcccttgctgagcacgctcctgcaccccaagaggtgaactcagagctgccacctctgacgatcgacggcatccctgtgagcgtggacaagatgacacaagcgcaactaagagccttcattcctgaaatgctgaagtatagcaccgggcggggcaagcctggctggggtaaggaatcatgtaagccaatttggtggcctgaggacatcccttgggctaatgtccggtccgacgtgaggactgaggaacaaaagcagagggtggggaccggagccacagtagccacactggcagacgcgtctgagctgcctacaactgtgactgtcgcccaggttaactactccgctgtggccgatggggaggtggagcagaactgggccaccctgcaaggaggcgaaatgacaatccagactactcaggcaagcgaggcgacacaggccgttgcttccctggccgaggcagcagtcgctgcctcccaagaaatgcagcaaggggccaccgtcaccatggctttgaatagtgaagctgcagctcacgccgtcgcaactcttgccgaagctactctccagggggggggacagatcgtcctcagcggcgaaacagctgccgccgtcggcgcactaacgggggtccaggatgctaatgggcttgtccagatacctgtctccatgtaccagacagtggtcacctcactggcccaaggcaacgggcccgtgcaagtggcgatggcgcccgttacaaccaggataagcgacagcgccgtgacgatggacggccaggccgtggaggtggtgacattggaacaatag

SEQ ID NO: 151970 - DNA, 1512 bp, Artificial Sequence
  derived and/or modified sequence
atggaggaacatggcgttactcagactgaacacatggcaacgattgaagcgcacgccgtggctcagcaggtccagcaagttcatgtcgctacttatactgaacacagcatgctgtccgctgacgaggactcaccctcctctccggaagataccagctatgatgactccgatatcctaaatagtactgccgcagacgaagtgactgcacacctcgccgccgctgggcccgtgggcatggctgcagctgcagccgtcgcaactgggaaaaaacgaaagagaccccacgtcttcgagagtaatcctagtattaggaaacggcagcagactcggctgcttcgcaaactgcgtgccaccctcgacgagtatacaaccagggtaggacagcaggccattgttctgtgcattagcccctcgaagccaaacccggtgttcaaggtattcggcgctgcccctctggagaacgtagtgcggaagtataagtcaatgattctcgaagacctcgagtccgcactggcggagcatgcccctgcaccccaggaagtcaacagtgagctgccaccattaaccatagacgggattcctgtaagcgtggacaagatgacacaggctcaactccgggcattcatacctgagatgctgaaatatagtacaggtcggggcaagcccgggtggggaaaagaaagctgcaagcccatatggtggccagaggatataccctgggctaacgttagatctgacgtgagaacggaagaacagaaacagcgcgtgtcgtggacacaggctctccggaccattgttaaaaattgctacaaacaacatggccgcgaggatttactctacgcgttcgaggaccagcagacccaaactcaggcaacggcaactcacagtatcgcacatctggtaccaagccaaaccgtcgtgcagaccttttccaaccctgatggaactgtctctttaatccaggtggggacaggtgctaccgtagctacattggccgacgcatcggagttaccaaccactgtgaccgttgcccaagtcaattatagtgcagtggccgacggcgaagtagaacagaactgggcaaccctccaggggggagagatgaccatccagaccacacaagcctccgaggccactcaggctgtggccagcctcgctgaggccgccgtggccgccagtcaggagatgcagcaaggtgccactgtgacaatggcccttaatagcgaagcggcagcccacgccgttgcaacgttggccgaggccaccctgcagggaggggggcagatcgttctatccggtgagacagccgccgctgtcggcgccctgaccggggttcaggatgccaacgggctggtgcagatccccgtttctatgtaccagactgtggtcaccagtctggctcagggcaatggccccgtgcaggtcgccatggcgcccgtgactactagaatctccgattccgccgtgactatggatggccaggccgtggaggtggtaacacttgagcaatag

SEQ ID NO: 151971 - DNA, 1512 bp, Artificial Sequence
  derived and/or modified sequence
atggaagaacatggagtgacacaaacagaacatatggccacaatcgaggctcatgccgtggcccagcaggtccaacaggtgcacgtggcaacatacactgagcattccatgctcagcgcagacgaagattccccgtcctctcctgaggacaccagctatgatgattccgatatcctgaactctactgctgcagacgaggtgacggcccacctggctgcagcgggcccggtgggcatggccgcagcagcagccgtagctacgggcaaaaagagaaaacggccacacgtcttcgaaagtaacccttccattcgcaaaagacagcagacgagacttttacgcaagctcagagccacccttgacgaatacacaacccgtgtcggtcagcaggccatcgtcctgtgcattagcccatccaaaccgaaccccgtgttcaaggtctttggagcggctccacttgagaacgttgtgcgtaaatacaagtcgatgatcctggaggacctggagtctgcgctggctgaacacgcgccagcgcctcaagaggtgaactccgagttacccccccttacaatcgacggcatcccagtgtctgtcgataagatgacacaggcgcaactcagggcgttcatacctgagatgctaaagtattcgaccggacgaggaaagccgggttgggggaaagagtcatgtaaaccgatctggtggcctgaggatatcccctgggccaatgtcaggtcggatgtgagaacagaggagcagaaacagcgggttagttggactcaagccctgagaacaattgtgaaaaactgctacaagcaacacggtagagaggacctactttacgcttttgaagaccagcagactcagacacaggctaccgccactcatagcatcgcccacctggtccccagtcagaccgttgtgcagactttttccaatccggacggaacagtctctctgattcaagtgggtaccggggcaaccgtggccaccttggcagatgcaagcgaactaccaacaacggttactgtcgctcaagtgaattattctgcagtggctgacggagaggtcgagcagaactgggcgactttacaaggaggtgagatgacaattcagacgacacaggctagcgaggcaactcaggctgtggcctcccttgcagaggcggccgttgcagcctcacaggaaatgcagcagggggctacagtgactatggccctgaactctgaagcagccgcgcacgcagtcgccactctggcagaggctactttgcagggaggaggtcagattgtactaagtggcgagacggctgccgccgtcggagcgctgacaggcgtccaggacgcaaatggtctggtgcaaatacctgtgtcaatgtatcagactgtcgttacctccctggcccagggcaacggcccagtgcaggtcgcaatggccccggtgacaaccaggatctcagacagtgcagtgacgatggacgggcaagccgttgaagtggtaacattggaacagtag

SEQ ID NO: 151972 - DNA, 633 bp, Artificial Sequence
  derived and/or modified sequence
atggaggagcacggggttacccaaacagaacatatggctacaatagaagcacacgccgtcgctcaacaggtgcagcaagtgcacgtggcaacgtatacggaacactccatgctgtctgccgacgaagactctccttcttcccctgaagatacgagctatgatgatagcgacattctgaatagtaccgctgccgatgaggttacagcacatctggccgctgccgggcccgtcggtatggcagcagccgccgcagtggctaccggcaaaaagcgcaaacgccctcacgtctttgagtcgaatccaagcatccgtaaacgacagcagacaagactgttgcgtaagttgcgggccactctggacgaatacactacgagagtcgggcaacaggcaatagttctgtgtatcagtccgtccaagccaaatccagtgtttaaggtgttcggcgcggcaccactggagaatgtggtgcgaaagtataaaagcatgattttggaagacctcgagtcagccttggccgaacacgctcccgccccccaggaggtcaattcggaattacctccactgaccattgacggcattcccgtgtcagtagataaaatgacacaagcgcagctccgtgcttttattccctag

SEQ ID NO: 151973 - DNA, 1512 bp, Artificial Sequence
  derived and/or modified sequence
atggaggagcacggcgtgacccagacagagcacatggccaccatcgaggcccatgctgtggcccagcaggtgcagcaggtgcacgtggccacctacacagagcacagcatgctgtctgcagatgaggacagccccagcagccctgaggacaccagctatgatgacagcgacatcctgaacagcacagctgctgatgaggtgacagcccacctggccgccgccggccctgtgggcatggctgctgctgctgctgtggccaccgggaagaagaggaagaggcctcatgtgtttgagagcaaccccagcatcaggaagaggcagcagacccggctgctgaggaagctgcgggccaccctggatgagtacaccaccagggtgggccagcaggccatcgtgctgtgcatcagccccagcaagcccaaccctgtgttcaaggtgtttggagctgcccccctggagaatgtggtgaggaagtacaagtccatgatcctggaggacctggagagcgccctggccgagcacgccccagccccccaggaggtgaacagcgagctgccccccctgaccattgatggcatccctgtgtctgtggacaagatgacccaggcccagctgcgggccttcatccctgagatgctgaagtacagcacaggccggggcaagccaggctggggcaaggagagctgcaagcccatctggtggccagaggacatcccctgggccaacgtgcggagtgatgtgaggacagaggagcagaagcagagggtgtcctggacccaggccctgcggaccatcgtgaagaactgctacaagcagcacggccgggaggacctgctgtatgcctttgaggaccagcagacccagacccaggccacagccacccacagcatcgcccacctggtgcccagccagacagtggtgcagaccttcagcaacccagatggcaccgtgtccctcatccaggtgggcaccggggccaccgtggccaccctggctgatgccagcgagctgcccaccaccgtgacagtggcccaggtgaactacagcgctgtggctgatggagaggtggagcagaactgggccaccctgcagggcggggagatgaccatccagaccacccaggccagcgaggccacccaggccgtggccagcctggccgaggccgctgtggccgccagccaggagatgcagcagggcgccaccgtgaccatggccctgaacagcgaggccgccgcccatgctgtggccaccctggccgaggccaccctgcagggcggcggccagatcgtgctgagcggggagacagctgctgctgtgggcgccctgactggagtgcaggatgccaacggcctggtgcagatccctgtgtccatgtaccagacagtggtgaccagcctggcccagggcaatggacctgtgcaggtggccatggcccctgtgaccacccgcatcagtgacagcgctgtgaccatggatggccaggccgtggaggtggtgaccctggagcagtag

SEQ ID NO: 151974 - DNA, 1314 bp, Artificial Sequence
  derived and/or modified sequence
atggaggagcacggcgtgacccagacagagcacatggccaccatcgaggcccatgctgtggcccagcaggtgcagcaggtgcacgtggccacctacacagagcacagcatgctgtctgcagatgaggacagccccagcagccctgaggacaccagctatgatgacagcgacatcctgaacagcacagctgctgatgaggtgacagcccacctggccgccgccggccctgtgggcatggctgctgctgctgctgtggccaccgggaagaagaggaagaggcctcatgtgtttgagagcaaccccagcatcaggaagaggcagcagacccggctgctgaggaagctgcgggccaccctggatgagtacaccaccagggtgggccagcaggccatcgtgctgtgcatcagccccagcaagcccaaccctgtgttcaaggtgtttggagctgcccccctggagaatgtggtgaggaagtacaagtccatgatcctggaggacctggagagcgccctggccgagcacgccccagccccccaggaggtgaacagcgagctgccccccctgaccattgatggcatccctgtgtctgtggacaagatgacccaggcccagctgcgggccttcatccctgagatgctgaagtacagcacaggccggggcaagccaggctggggcaaggagagctgcaagcccatctggtggccagaggacatcccctgggccaacgtgcggagtgatgtgaggacagaggagcagaagcagagggtgggcaccggggccaccgtggccaccctggctgatgccagcgagctgcccaccaccgtgacagtggcccaggtgaactacagcgctgtggctgatggagaggtggagcagaactgggccaccctgcagggcggggagatgaccatccagaccacccaggccagcgaggccacccaggccgtggccagcctggccgaggccgctgtggccgccagccaggagatgcagcagggcgccaccgtgaccatggccctgaacagcgaggccgccgcccatgctgtggccaccctggccgaggccaccctgcagggcggcggccagatcgtgctgagcggggagacagctgctgctgtgggcgccctgactggagtgcaggatgccaacggcctggtgcagatccctgtgtccatgtaccagacagtggtgaccagcctggcccagggcaatggacctgtgcaggtggccatggcccctgtgaccacccgcatcagtgacagcgctgtgaccatggatggccaggccgtggaggtggtgaccctggagcagtag

SEQ ID NO: 151975 - DNA, 633 bp, Artificial Sequence
  derived and/or modified sequence
atggaggagcacggcgtgacccagacagagcacatggccaccatcgaggcccatgctgtggcccagcaggtgcagcaggtgcacgtggccacctacacagagcacagcatgctgtctgcagatgaggacagccccagcagccctgaggacaccagctatgatgacagcgacatcctgaacagcacagctgctgatgaggtgacagcccacctggccgccgccggccctgtgggcatggctgctgctgctgctgtggccaccgggaagaagaggaagaggcctcatgtgtttgagagcaaccccagcatcaggaagaggcagcagacccggctgctgaggaagctgcgggccaccctggatgagtacaccaccagggtgggccagcaggccatcgtgctgtgcatcagccccagcaagcccaaccctgtgttcaaggtgtttggagctgcccccctggagaatgtggtgaggaagtacaagtccatgatcctggaggacctggagagcgccctggccgagcacgccccagccccccaggaggtgaacagcgagctgccccccctgaccattgatggcatccctgtgtctgtggacaagatgacccaggcccagctgcgggccttcatcccctag

SEQ ID NO: 151976 - DNA, 1512 bp, Artificial Sequence
  derived and/or modified sequence
atggaggagcacggcgtgacccagaccgagcacatggccaccatcgaagcccacgcggttgcccagcaggtacaacaggtgcacgtggctacttacactgaacacagtatgcttagcgccgacgaggactcgccaagcagccctgaggacacgtcatatgacgacagcgatatcctaaattctacagccgccgacgaagtgacagcacatctggccgccgccggccccgttggcatggcagcggctgccgctgttgcaacaggcaagaagcgcaagcggccgcacgtgttcgagtctaatccatctatccggaagagacagcaaactagactgctgcgcaaacttagggctacgctcgacgagtacactacacgagtagggcagcaggcaatagtgctatgcatttcgccttctaagccaaaccctgtgtttaaggtcttcggggcagcccccttggagaacgttgttagaaaatataagagtatgatactcgaagacctagaaagcgccctggccgagcatgccccagcaccacaggaagtgaacagcgagctccccccacttaccatcgatggtatacccgtgtcagtggacaagatgactcaggcgcagctgagagcctttattccagagatgctcaagtactctacaggtaggggcaagcccggatggggtaaagagtcctgcaaacccatatggtggccggaggatattccatgggcaaatgtacgctctgacgttagaaccgaggagcagaaacagagggtgtcatggacccaggcgctgcgcaccatagtgaagaactgctacaaacagcatgggagagaggaccttttatatgcatttgaagaccagcagacgcaaactcaggccactgcaacacacagcattgctcacctcgtaccttctcaaactgtcgtgcagaccttttcgaaccctgacggtacagtatccttgatacaagtcgggaccggggccactgtggcaactctcgcagatgcttcagaattgcccaccacagtaaccgtggctcaggtgaattactccgccgtcgccgacggggaggtagagcagaactgggcgacactgcaggggggcgagatgacaattcagaccactcaggccagtgaagccacgcaggccgtggcctcgttggccgaggcagcggtggccgcatcccaggagatgcaacagggtgctactgtgacaatggccctgaactccgaggccgctgcgcatgccgtggcaacactcgcggaggccacactgcaaggaggcggtcaaatcgtgttgtctggggagaccgctgcagctgttggcgctcttacaggggtgcaggacgccaatgggctggtgcagattcctgtgtcaatgtaccagactgtagtaacatcacttgcccaggggaacgggcccgtgcaggtggctatggcaccagtaaccacaagaataagcgactcagctgtgacgatggatggacaagcagtcgaggtggtcacgctagagcagtag

SEQ ID NO: 151977 - DNA, 1314 bp, Artificial Sequence
  derived and/or modified sequence
atggaggagcacggcgtgacccagaccgagcacatggccaccatcgaagcccatgccgtggcccagcaggtccagcaggttcatgtggcaacatacaccgaacactctatgctcagtgctgacgaggacagccctagcagtcccgaggatacaagttatgacgatagcgatatcctgaatagtacagccgccgacgaagtgactgcccatctcgcagctgccgggcctgtggggatggccgcagctgccgctgtggctaccggcaagaagcgtaaacgacctcatgtgtttgagtccaatccttcaattcgtaaaaggcagcagacccgcttgctgaggaaactgcgcgctacattggacgagtatacaactcgcgtcgggcagcaggccattgttctgtgtatcagtccttccaaaccaaatccggtctttaaagtattcggggccgcgcctttggaaaatgtggtgcgtaagtataagagcatgattctcgaagatttagagtcagcccttgctgaacacgctcctgctccccaggaggtgaattccgagctgccaccactgaccatcgacggcatccccgtgtcagtggacaaaatgacacaggctcagctgcgtgccttcattcctgaaatgttaaaatatagtaccggccgcgggaagcctggttggggtaaggagtcttgcaagccaatctggtggcccgaggacataccatgggcaaatgttcgcagtgatgtccgcactgaggaacaaaaacagcgggtagggactggtgctacagtggccactttagccgatgcttctgagcttcctactaccgtgactgtggcccaggtaaactattccgccgttgctgacggcgaagtagagcagaactgggccactctccagggcggggagatgacaatacagacaacccaagcatccgaggccactcaggcggtcgcctccctcgcggaggcagccgtggctgcttcacaggaaatgcagcagggcgcaacagtcactatggcactgaactctgaagccgccgcccacgctgtggctacccttgctgaggccacgctgcaaggcggcggtcaaatcgtgttgagcggcgagactgctgccgccgtgggggccctgacaggtgtgcaggatgctaatgggctcgtgcagatcccggtgtctatgtatcagaccgtggtgacatcacttgcccaggggaacggtcccgtgcaggtcgccatggcgcccgttactacacggatctcagactccgctgttactatggacggccaggctgttgaggtggttaccctcgaacagtag

SEQ ID NO: 151978 - DNA, 1512 bp, Artificial Sequence
  derived and/or modified sequence
atggaggagcacggcgtgacccagaccgagcacatggccaccatcgaggcccatgctgtggcgcaacaggtgcagcaggtgcatgtggccacatataccgaacattcgatgctgtccgccgacgaggactctcccagctcacccgaggacacatcctatgatgactcagacattcttaattctacggccgcagatgaagtgacagctcatctggccgctgcaggtccagtgggaatggccgcagctgcagcagttgctacaggcaagaaacgtaagagaccccacgtgttcgagagtaacccatctataaggaaacgtcagcagacccgattgcttagaaagctccgcgccacactcgacgagtacactaccagagtcggccagcaggcgatagtcctgtgtatctcgcctagcaagcccaacccagtgtttaaggtgttcggagcggcccctctggagaacgtggtcaggaaatacaagagcatgattttggaagatctcgagtccgctctcgccgagcacgccccagctccacaagaggtgaacagcgagctgccccccctgactatcgatggtattccagtttctgtggataagatgactcaagcacagctcagggccttcattcctgagatgcttaaatactctacaggcaggggtaaacccggctggggcaaagaaagttgcaagccaatttggtggcccgaggacattccctgggccaatgtgaggtctgacgtccgcaccgaggagcagaagcaacgggtatcctggacacaagccctgaggaccatcgtgaagaattgctacaagcagcacggccgagaggatcttctttatgctttcgaagatcagcagacacagacccaggcaactgcaacacatagtatagcacacttggtcccgtcccagacggttgtgcagacctttagcaacccggacggaacagtctccctcattcaggtgggcaccggcgccactgtcgctacattagccgatgcttcggaactccccacgaccgtcactgtggcccaggtcaactactccgctgtggccgatggtgaagtggaacagaattgggcgaccttacaggggggggagatgaccattcagacaacccaagcttctgaagcgactcaagctgtggcttccctagcggaagccgccgtcgcggcatcacaggagatgcagcaaggtgcaacagtgacgatggccctgaacagtgaggctgcagcacacgcagttgcaaccctggctgaggctaccctgcagggcggaggacagattgtgttgagtggggagactgcagcagccgtgggggctcttaccggtgtgcaagatgctaacggactggtacagatacctgtaagcatgtaccagactgtggtcacaagcctggcacaaggtaatggtcctgtccaggtggctatggcacccgttacaactagaatcagtgacagcgcagtgacaatggatggccaggcagtcgaagtcgttactctcgaacagtag

SEQ ID NO: 151979 - DNA, 1512 bp, Artificial Sequence
  derived and/or modified sequence
atggaggagcacggcgtgacccagaccgagcacatggccaccatcgaggcccacgcagtcgcacagcaggtccagcaggtgcacgtcgctacctacactgaacactctatgctttctgccgatgaggacagtcccagctcaccagaggacacaagctatgatgattccgatatcctgaactcaactgcagccgatgaggtaaccgcacacctcgccgctgcaggcccagtgggaatggcagcagccgccgccgtggccaccgggaagaaaagaaagagaccccatgtcttcgagtctaacccaagtattaggaagcggcagcaaacccggctgctacggaagttgcgtgcaaccctggacgaatacaccactcgcgtggggcagcaggcaatcgtactctgcatttccccgagtaaaccgaatccagtgttcaaggtgttcggtgctgcacccttggagaatgttgtgcgaaagtataaaagcatgatcttagaggatttggagtcagccctagctgaacatgctccagctccacaagaagtgaactctgagctgccccccctcactattgacggcattcctgtgagtgtggacaagatgacacaggctcaattacgagcatttatccctgaaatgttaaagtatagcacggggcgcggaaagcccggttggggtaaagaatcatgtaagccgatctggtggcccgaagacataccttgggcaaatgttcgctccgacgttaggactgaggagcagaagcaaagggtgtcttggactcaagcattaaggaccattgtaaaaaattgttataaacagcacggtcgagaagatctgttatacgcatttgaagaccaacagactcagacgcaggcaaccgccacacactccatcgctcacttggtgccgtcccagactgtagtgcagaccttctccaaccctgacggaaccgtctccctcattcaggttggcacgggcgccactgtggccactctggccgacgcctctgagcttccaaccacagtcaccgtggcacaagtaaactactccgctgtggccgacggggaagtggaacaaaattgggctacacttcaaggcggcgagatgacgatccaaaccacccaggccagtgaggccacacaggccgttgctagtctggcagaggcggcagttgcagcgagccaagagatgcagcaaggcgccaccgtcacaatggcactgaattccgaagctgctgcacatgccgtagctaccctagccgaggccactttgcaggggggcggccaaatcgtgcttagcggagagacagccgccgcagtgggagcactgacaggagtccaggacgccaatggactggtccagatacctgtgagcatgtaccaaacggtggtcacatcccttgctcaggggaacggccccgtacaggtggcaatggctcccgtaactactcgcatcagcgattcagccgtgacaatggacggacaggccgtcgaggtggttactctggagcagtag

SEQ ID NO: 151980 - DNA, 633 bp, Artificial Sequence
  derived and/or modified sequence
atggaggagcacggcgtgacccagaccgagcacatggccaccatcgaggcccatgctgtagcgcagcaggtgcagcaggtccacgtcgctacttacactgagcactccatgctgagtgccgatgaggatagcccgtcgtctcccgaggacacgtcctatgatgactcagacatccttaactctaccgccgccgatgaggtgactgcccatttagctgcagccggccccgtggggatggccgcagctgccgccgttgccacgggcaaaaagcgtaagaggcctcatgtattcgagtctaatcctagcattagaaaaaggcaacagacgaggcttctgcgaaagctgcgcgctacgctagacgaatacacaactagagtgggacagcaggccatcgtgctctgcataagcccaagtaaaccaaatccagtgttcaaagtattcggcgctgcccctcttgaaaacgtcgtgcgcaagtataagtcaatgatcctggaggacctggagtcagccctggctgagcatgctcctgctccacaggaggtgaattcagagttacctcctttaactatcgatgggatccccgtgagcgtagacaagatgactcaggctcagctcagagcctttataccatag

SEQ ID NO: 151981 - DNA, 2424 bp, Artificial Sequence
  derived and/or modified sequence
gaggctgcgaggagccggcgcggtcgcagtctccacggcgcaggcccacggtagcgcagccgctctgagtagaacttcatggaggaacacggagtgacccaaaccgaacatatggctaccatagaagcacatgcagtggcccagcaagtgcagcaggtccatgtggctacttacaccgagcatagtatgctgagtgctgatgaagactcgccttcttctcccgaggacacctcttacgatgactcagatatactcaactccacagcagctgatgaggtgacagctcatctggcagctgcaggtcctgtgggaatggccgctgctgctgctgtggcaacaggaaagaaacggaaacggcctcatgtatttgagtctaatccatctatccggaagaggcaacaaacacgtttgcttcggaaacttcgagccacgttagatgaatatactactcgtgtgggacagcaagctattgtcctctgtatctcaccctccaaacctaaccctgtctttaaagtgtttggtgcagcacctttggagaatgtggtgcgtaagtacaagagcatgatcctggaagacctggagtctgctctggcagaacacgcccctgcgccacaggaggttaactcagaactgccgcctctcaccatcgacggaattccagtctctgtggacaaaatgacccaggcccagcttcgggcatttatcccagagatgctcaagtactctacaggtcggggaaaaccaggctgggggaaagaaagctgcaagcccatctggtggcctgaagatatcccctgggcaaatgtccggagtgatgtccgcacagaagagcaaaagcagagggtttcatggacccaggcactacggaccatagttaaaaactgttataaacagcatgggcgggaagaccttttgtatgcctttgaagatcagcaaacgcaaacacaggccacagccacacatagtatagctcatcttgtaccatcacagactgtagtccagacttttagtaaccctgatggcactgtctcacttatccaggttggtacgggggcaacagtagccacattggctgatgcttcagaattgccaaccacggtcaccgttgcccaagtgaattattctgccgtggctgatggagaggtggaacaaaattgggccacgttacagggaggtgagatgaccatccagacgacgcaagcatcagaggccacccaggcggtggcatcgttggcagaggccgcagtggcagcttctcaggagatgcagcagggagctacagtcactatggcgcttaacagcgaagctgccgcccatgctgtcgccaccctggctgaggccaccttacaaggtgggggacagatcgtcttgtctggggaaaccgcagcagccgtcggagcacttactggagtccaagatgctaatggcctggtccagatccctgtgagcatgtaccagactgtggtgaccagcctcgcccagggcaacggaccagtgcaggtggccatggcccctgtgaccaccaggatatcagacagcgcagtcaccatggacggccaagctgtggaggtggtgacattggaacagtgacatacagccatattatggcatcgttttctagtctacttcaaaattttttacacgtttgcagaggtgcaatcaaatggaattaagtctctcgactttggaaggaaagttttgttaacctttttttttttaaaaggaagaaagcggattttggaattgcattttttaaagcaccactcttgattttctgggattggtgaagaaactgcattgtcaatttcactgtcccaaaaaagccaaattgtggcaggacttctttctgcggaaatgtgtgtgtatacttatgtgtgtgtatgtgtgagtgtgaatatatgtatatgtgtacatatggacatacacatttacatatatataaagtatatatatacatatatatatatatatatgtatgaaacccgcatggaattatctgtatgaaatcaaggtgcgctgtggaaacaataattcacccagtttagtgggtggtagggtacgtggccagacacagtcacccagtttttgttcataccagggtcatgcgttgagctactgacaaactcaggcggaggtgaccatgcccttcaccaaagctgcctcccagtggccacacagaactctccctgctggactcacctgaggaaagaggctccagcatggggtgggtcagagatgtgcttgcaaggtccagggactgcgtggtctgccagctgagatgctcctcgggctggcccaggtgctgaccttgccacaggcagatgaatgtcttgaaagctcccgggcctcagcctcccatctcctctccttcccaggaatccttgatctcatgactattaaaatgttgctctggttttaaggtca

SEQ ID NO: 151982 - DNA, 3330 bp, Artificial Sequence
  derived and/or modified sequence
ggcggcagaagcggcagcgctcgccattgccgctggtggcaggaggctgcgaggagccggcgcggtcgcagtctccacggcgcaggcccacggtagcgcagccgctctgagaacttcatggaggaacacggagtgacccaaaccgaacatatggctaccatagaagcacatgcagtggcccagcaagtgcagcaggtccatgtggctacttacaccgagcatagtatgctgagtgctgatgaagactcgccttcttctcccgaggacacctcttacgatgactcagatatactcaactccacagcagctgatgaggtgacagctcatctggcagctgcaggtcctgtgggaatggccgctgctgctgctgtggcaacaggaaagaaacggaaacggcctcatgtatttgagtctaatccatctatccggaagaggcaacaaacacgtttgcttcggaaacttcgagccacgttagatgaatatactactcgtgtgggacagcaagctattgtcctctgtatctcaccctccaaacctaaccctgtctttaaagtgtttggtgcagcacctttggagaatgtggtgcgtaagtacaagagcatgatcctggaagacctggagtctgctctggcagaacacgcccctgcgccacaggaggttaactcagaactgccgcctctcaccatcgacggaattccagtctctgtggacaaaatgacccaggcccagcttcgggcatttatcccagagatgctcaagtactctacaggtcggggaaaaccaggctgggggaaagaaagctgcaagcccatctggtggcctgaagatatcccctgggcaaatgtccggagtgatgtccgcacagaagagcaaaagcagagggttggtacgggggcaacagtagccacattggctgatgcttcagaattgccaaccacggtcaccgttgcccaagtgaattattctgccgtggctgatggagaggtggaacaaaattgggccacgttacagggaggtgagatgaccatccagacgacgcaagcatcagaggccacccaggcggtggcatcgttggcagaggccgcagtggcagcttctcaggagatgcagcagggagctacagtcactatggcgcttaacagcgaagctgccgcccatgctgtcgccaccctggctgaggccaccttacaaggtgggggacagatcgtcttgtctggggaaaccgcagcagccgtcggagcacttactggagtccaagatgctaatggcctggtccagatccctgtgagcatgtaccagactgtggtgaccagcctcgcccagggcaacggaccagtgcaggtggccatggcccctgtgaccaccaggatatcagacagcgcagtcaccatggacggccaagctgtggaggtggtgacattggaacagtgacatacagccatattatggcatcgttttctagtctacttcaaaattttttacacgtttgcagaggtgcaatcaaatggaattaagtctctcgactttggaaggaaagttttgttaacctttttttttttaaaaggaagaaagcggattttggaattgcattttttaaagcaccactcttgattttctgggattggtgaagaaactgcattgtcaatttcactgtcccaaaaaagccaaattgtggcaggacttctttctgcggaaatgtgtgtgtatacttatgtgtgtgtatgtgtgagtgtgaatatatgtatatgtgtacatatggacatacacatttacatatatataaagtatatatatacatatatatatatatatatgtatgaaacccgcatggaattatctgtatgaaatcaaggtgcgctgtggaaacaataattcacccagtttagtgggtggtagggtacgtggccagacacagtcacccagtttttgttcataccagggtcatgcgttgagctactgacaaactcaggcggaggtgaccatgcccttcaccaaagctgcctcccagtggccacacagaactctccctgctggactcacctgaggaaagaggctccagcatggggtgggtcagagatgtgcttgcaaggtccagggactgcgtggtctgccagctgagatgctcctcgggctggcccaggtgctgaccttgccacaggcagatgaatgtcttgaaagctcccgggcctcagcctcccatctcctctccttcccaggaatccttgatctcatgactattaaaatgttgctctggttttaaggtcagtcctgaattgctcgtatatatgaactgaaggtaaccgaagtattaggggtttgaggagtgcgtgcgtgtaagtgtgcttgtgtgtgtgcgtgcatggtgggggagaggatgggaagggggcgggggcagtggaagggaaaggaaggaaagaaaaatcgtcctagaccaggatacacccgtgggagcaattttctctactgtctgtagcttcacagaggaggcgctggaatgaacaagaagagacatctggtctgtggccacagcaccctgaacgcccctgatcttgtgtgatcttggaagctaagcttggttgggcccggtcagtacgcggaagggaagaagggacacctggccatagaaaacagctgagggtgtttgctgtgttcctggatcaggccctgcttcagaagggactcctggaggcccatgttccttgatgcaacctcgtggcccaggccgggagcagcttgcctcctcagaggtgttgactatctgggtgttcttggtaaccgttaactctgtctttctcagctgcaagccctgagtctccagtagctgaattcacctgacttttcaacaggccaaatctctgaaccttgagtacagggacagctcctcctccctcctcccagctctccccatgtgtgtgatggtgtatttaatgtgtttttttaatgcgacattaaaagattctccacgtcttgctcaacctttgagagaagtttcagattcttgtatttgcttgttttatataaaactatctaatgttctttatatgttcttttctgtacgtaatggggggaggggagggaaatttacatataaatagtcctagttctacaatttgttatttttttaattattattttttatcgtcattgtgaagttgtccagggactttaaagtccatgttcctttgtggtgaaataacctccaaatagtttgagaagttgccaagacgaagaaaaaagcaaaaccccagtagcagagcatggattctgtgttgtttcccattctgtctttgactgcctcattcaataaatagttaaaaatgtggcaacagg

SEQ ID NO: 151983 - DNA, 3523 bp, Artificial Sequence
  derived and/or modified sequence
cccctttcagttcctggtccagaactttacacagaaaaggtgctcaaaggatatttgtttaatgaatgtggtatgctgacatttaaacaggacaaaacttgtagaacttcatggaggaacacggagtgacccaaaccgaacatatggctaccatagaagcacatgcagtggcccagcaagtgcagcaggtccatgtggctacttacaccgagcatagtatgctgagtgctgatgaagactcgccttcttctcccgaggacacctcttacgatgactcagatatactcaactccacagcagctgatgaggtgacagctcatctggcagctgcaggtcctgtgggaatggccgctgctgctgctgtggcaacaggaaagaaacggaaacggcctcatgtatttgagtctaatccatctatccggaagaggcaacaaacacgtttgcttcggaaacttcgagccacgttagatgaatatactactcgtgtgggacagcaagctattgtcctctgtatctcaccctccaaacctaaccctgtctttaaagtgtttggtgcagcacctttggagaatgtggtgcgtaagtacaagagcatgatcctggaagacctggagtctgctctggcagaacacgcccctgcgccacaggaggttaactcagaactgccgcctctcaccatcgacggaattccagtctctgtggacaaaatgacccaggcccagcttcgggcatttatcccagagatgctcaagtactctacaggtcggggaaaaccaggctgggggaaagaaagctgcaagcccatctggtggcctgaagatatcccctgggcaaatgtccggagtgatgtccgcacagaagagcaaaagcagagggtttcatggacccaggcactacggaccatagttaaaaactgttataaacagcatgggcgggaagaccttttgtatgcctttgaagatcagcaaacgcaaacacaggccacagccacacatagtatagctcatcttgtaccatcacagactgtagtccagacttttagtaaccctgatggcactgtctcacttatccaggttggtacgggggcaacagtagccacattggctgatgcttcagaattgccaaccacggtcaccgttgcccaagtgaattattctgccgtggctgatggagaggtggaacaaaattgggccacgttacagggaggtgagatgaccatccagacgacgcaagcatcagaggccacccaggcggtggcatcgttggcagaggccgcagtggcagcttctcaggagatgcagcagggagctacagtcactatggcgcttaacagcgaagctgccgcccatgctgtcgccaccctggctgaggccaccttacaaggtgggggacagatcgtcttgtctggggaaaccgcagcagccgtcggagcacttactggagtccaagatgctaatggcctggtccagatccctgtgagcatgtaccagactgtggtgaccagcctcgcccagggcaacggaccagtgcaggtggccatggcccctgtgaccaccaggatatcagacagcgcagtcaccatggacggccaagctgtggaggtggtgacattggaacagtgacatacagccatattatggcatcgttttctagtctacttcaaaattttttacacgtttgcagaggtgcaatcaaatggaattaagtctctcgactttggaaggaaagttttgttaacctttttttttttaaaaggaagaaagcggattttggaattgcattttttaaagcaccactcttgattttctgggattggtgaagaaactgcattgtcaatttcactgtcccaaaaaagccaaattgtggcaggacttctttctgcggaaatgtgtgtgtatacttatgtgtgtgtatgtgtgagtgtgaatatatgtatatgtgtacatatggacatacacatttacatatatataaagtatatatatacatatatatatatatatatgtatgaaacccgcatggaattatctgtatgaaatcaaggtgcgctgtggaaacaataattcacccagtttagtgggtggtagggtacgtggccagacacagtcacccagtttttgttcataccagggtcatgcgttgagctactgacaaactcaggcggaggtgaccatgcccttcaccaaagctgcctcccagtggccacacagaactctccctgctggactcacctgaggaaagaggctccagcatggggtgggtcagagatgtgcttgcaaggtccagggactgcgtggtctgccagctgagatgctcctcgggctggcccaggtgctgaccttgccacaggcagatgaatgtcttgaaagctcccgggcctcagcctcccatctcctctccttcccaggaatccttgatctcatgactattaaaatgttgctctggttttaaggtcagtcctgaattgctcgtatatatgaactgaaggtaaccgaagtattaggggtttgaggagtgcgtgcgtgtaagtgtgcttgtgtgtgtgcgtgcatggtgggggagaggatgggaagggggcgggggcagtggaagggaaaggaaggaaagaaaaatcgtcctagaccaggatacacccgtgggagcaattttctctactgtctgtagcttcacagaggaggcgctggaatgaacaagaagagacatctggtctgtggccacagcaccctgaacgcccctgatcttgtgtgatcttggaagctaagcttggttgggcccggtcagtacgcggaagggaagaagggacacctggccatagaaaacagctgagggtgtttgctgtgttcctggatcaggccctgcttcagaagggactcctggaggcccatgttccttgatgcaacctcgtggcccaggccgggagcagcttgcctcctcagaggtgttgactatctgggtgttcttggtaaccgttaactctgtctttctcagctgcaagccctgagtctccagtagctgaattcacctgacttttcaacaggccaaatctctgaaccttgagtacagggacagctcctcctccctcctcccagctctccccatgtgtgtgatggtgtatttaatgtgtttttttaatgcgacattaaaagattctccacgtcttgctcaacctttgagagaagtttcagattcttgtatttgcttgttttatataaaactatctaatgttctttatatgttcttttctgtacgtaatggggggaggggagggaaatttacatataaatagtcctagttctacaatttgttatttttttaattattattttttatcgtcattgtgaagttgtccagggactttaaagtccatgttcctttgtggtgaaataacctccaaatagtttgagaagttgccaagacgaagaaaaaagcaaaaccccagtagcagagcatggattctgtgttgtttcccattctgtctttgactgcctcattcaataaatagttaaaaatgtggcaacaggaa

SEQ ID NO: 151984 - DNA, 3528 bp, Artificial Sequence
  derived and/or modified sequence
ggcggcagaagcggcagcgctcgccattgccgctggtggcaggaggctgcgaggagccggcgcggtcgcagtctccacggcgcaggcccacggtagcgcagccgctctgagaacttcatggaggaacacggagtgacccaaaccgaacatatggctaccatagaagcacatgcagtggcccagcaagtgcagcaggtccatgtggctacttacaccgagcatagtatgctgagtgctgatgaagactcgccttcttctcccgaggacacctcttacgatgactcagatatactcaactccacagcagctgatgaggtgacagctcatctggcagctgcaggtcctgtgggaatggccgctgctgctgctgtggcaacaggaaagaaacggaaacggcctcatgtatttgagtctaatccatctatccggaagaggcaacaaacacgtttgcttcggaaacttcgagccacgttagatgaatatactactcgtgtgggacagcaagctattgtcctctgtatctcaccctccaaacctaaccctgtctttaaagtgtttggtgcagcacctttggagaatgtggtgcgtaagtacaagagcatgatcctggaagacctggagtctgctctggcagaacacgcccctgcgccacaggaggttaactcagaactgccgcctctcaccatcgacggaattccagtctctgtggacaaaatgacccaggcccagcttcgggcatttatcccagagatgctcaagtactctacaggtcggggaaaaccaggctgggggaaagaaagctgcaagcccatctggtggcctgaagatatcccctgggcaaatgtccggagtgatgtccgcacagaagagcaaaagcagagggtttcatggacccaggcactacggaccatagttaaaaactgttataaacagcatgggcgggaagaccttttgtatgcctttgaagatcagcaaacgcaaacacaggccacagccacacatagtatagctcatcttgtaccatcacagactgtagtccagacttttagtaaccctgatggcactgtctcacttatccaggttggtacgggggcaacagtagccacattggctgatgcttcagaattgccaaccacggtcaccgttgcccaagtgaattattctgccgtggctgatggagaggtggaacaaaattgggccacgttacagggaggtgagatgaccatccagacgacgcaagcatcagaggccacccaggcggtggcatcgttggcagaggccgcagtggcagcttctcaggagatgcagcagggagctacagtcactatggcgcttaacagcgaagctgccgcccatgctgtcgccaccctggctgaggccaccttacaaggtgggggacagatcgtcttgtctggggaaaccgcagcagccgtcggagcacttactggagtccaagatgctaatggcctggtccagatccctgtgagcatgtaccagactgtggtgaccagcctcgcccagggcaacggaccagtgcaggtggccatggcccctgtgaccaccaggatatcagacagcgcagtcaccatggacggccaagctgtggaggtggtgacattggaacagtgacatacagccatattatggcatcgttttctagtctacttcaaaattttttacacgtttgcagaggtgcaatcaaatggaattaagtctctcgactttggaaggaaagttttgttaacctttttttttttaaaaggaagaaagcggattttggaattgcattttttaaagcaccactcttgattttctgggattggtgaagaaactgcattgtcaatttcactgtcccaaaaaagccaaattgtggcaggacttctttctgcggaaatgtgtgtgtatacttatgtgtgtgtatgtgtgagtgtgaatatatgtatatgtgtacatatggacatacacatttacatatatataaagtatatatatacatatatatatatatatatgtatgaaacccgcatggaattatctgtatgaaatcaaggtgcgctgtggaaacaataattcacccagtttagtgggtggtagggtacgtggccagacacagtcacccagtttttgttcataccagggtcatgcgttgagctactgacaaactcaggcggaggtgaccatgcccttcaccaaagctgcctcccagtggccacacagaactctccctgctggactcacctgaggaaagaggctccagcatggggtgggtcagagatgtgcttgcaaggtccagggactgcgtggtctgccagctgagatgctcctcgggctggcccaggtgctgaccttgccacaggcagatgaatgtcttgaaagctcccgggcctcagcctcccatctcctctccttcccaggaatccttgatctcatgactattaaaatgttgctctggttttaaggtcagtcctgaattgctcgtatatatgaactgaaggtaaccgaagtattaggggtttgaggagtgcgtgcgtgtaagtgtgcttgtgtgtgtgcgtgcatggtgggggagaggatgggaagggggcgggggcagtggaagggaaaggaaggaaagaaaaatcgtcctagaccaggatacacccgtgggagcaattttctctactgtctgtagcttcacagaggaggcgctggaatgaacaagaagagacatctggtctgtggccacagcaccctgaacgcccctgatcttgtgtgatcttggaagctaagcttggttgggcccggtcagtacgcggaagggaagaagggacacctggccatagaaaacagctgagggtgtttgctgtgttcctggatcaggccctgcttcagaagggactcctggaggcccatgttccttgatgcaacctcgtggcccaggccgggagcagcttgcctcctcagaggtgttgactatctgggtgttcttggtaaccgttaactctgtctttctcagctgcaagccctgagtctccagtagctgaattcacctgacttttcaacaggccaaatctctgaaccttgagtacagggacagctcctcctccctcctcccagctctccccatgtgtgtgatggtgtatttaatgtgtttttttaatgcgacattaaaagattctccacgtcttgctcaacctttgagagaagtttcagattcttgtatttgcttgttttatataaaactatctaatgttctttatatgttcttttctgtacgtaatggggggaggggagggaaatttacatataaatagtcctagttctacaatttgttatttttttaattattattttttatcgtcattgtgaagttgtccagggactttaaagtccatgttcctttgtggtgaaataacctccaaatagtttgagaagttgccaagacgaagaaaaaagcaaaaccccagtagcagagcatggattctgtgttgtttcccattctgtctttgactgcctcattcaataaatagttaaaaatgtggcaacagg

SEQ ID NO: 151985 - DNA, 814 bp, Artificial Sequence
  derived and/or modified sequence
tggtggcaggaggctgcgaggagccggcgcggtcgcagtctccacggcgcaggcccacggtagcgcagccgctctgaggctggagtgcagtggtgtgatctcggctctctgcaacttccacatcccgggttcaagcgattctactgcctcagcctcccgagtagttgggactacagtagaacttcatggaggaacacggagtgacccaaaccgaacatatggctaccatagaagcacatgcagtggcccagcaagtgcagcaggtccatgtggctacttacaccgagcatagtatgctgagtgctgatgaagactcgccttcttctcccgaggacacctcttacgatgactcagatatactcaactccacagcagctgatgaggtgacagctcatctggcagctgcaggtcctgtgggaatggccgctgctgctgctgtggcaacaggaaagaaacggaaacggcctcatgtatttgagtctaatccatctatccggaagaggcaacaaacacgtttgcttcggaaacttcgagccacgttagatgaatatactactcgtgtgggacagcaagctattgtcctctgtatctcaccctccaaacctaaccctgtctttaaagtgtttggtgcagcacctttggagaatgtggtgcgtaagtacaagagcatgatcctggaagacctggagtctgctctggcagaacacgcccctgcgccacaggaggttaactcagaactgccgcctctcaccatcgacggaattccagtctctgtggacaaaatgacccaggcccagcttcgggcatttatccc

SEQ ID NO: 151986 - DNA, 1531 bp, Artificial Sequence
  derived and/or modified sequence
attgccgctggtggcaggaggctgcgaggagccggcgcggtcgcagtctccacggcgcaggcccacggtagcgcagccgctctgagtagaacttcatggaggaacacggagtgacccaaaccgaacatatggctaccatagaagcacatgcagtggcccagcaagtgcagcaggtccatgtggctacttacaccgagcatagtatgctgagtgctgatgaagactcgccttcttctcccgaggacacctcttacgatgactcagatatactcaactccacagcagctgatgaggtgacagctcatctggcagctgcaggaaacttcgagccacgttagatgaatatactactcgtgtgggacagcaagctattgtcctctgtatctcaccctccaaacctaaccctgtctttaaagtgtttggtgcagcacctttggagaatgtggtgcgtaagtacaagagcatgatcctggaagacctggagtctgctctggcagaacacgcccctgcgccacaggaggttaactcagaactgccgcctctcaccatcgacggaattccagtctctgtggacaaaatgacccaggcccagcttcgggcatttatcccagagatgctcaagtactctacaggtcggggaaaaccaggctgggggaaagaaagctgcaagcccatctggtggcctgaagatatcccctgggcaaatgtccggagtgatgtccgcacagaagagcaaaagcagagggtttcatggacccaggcactacggaccatagttaaaaactgttataaacagcatgggcgggaagaccttttgtatgcctttgaagatcagcaaacgcaaacacaggccacagccacacatagtatagctcatcttgtaccatcacagactgtagtccagacttttagtaaccctgatggcactgtctcacttatccaggttggtacgggggcaacagtagccacattggctgatgcttcagaattgccaaccacggtcaccgttgcccaagtgaattattctgccgtggctgatggagaggtggaacaaaattgggccacgttacagggaggtgagatgaccatccagacgacgcaagcatcagaggccacccaggcggtggcatcgttggcagaggccgcagtggcagcttctcaggagatgcagcagggagctacagtcactatggcgcttaacagcgaagctgccgcccatgctgtcgccaccctggctgaggccaccttacaaggtgggggacagatcgtcttgtctggggaaaccgcagcagccgtcggagcacttactggagtccaagatgctaatggcctggtccagatccctgtgagcatgtaccagactgtggtgaccagcctcgcccagggcaacggaccagtgcaggtggccatggcccctgtgaccaccaggatatcagacagcgcagtcaccatggacggccaagctgtggaggtggtgacattggaacagtgacatacagccatattatggcatcgttttctagtctacttc

SEQ ID NO: 151987 - DNA, 1512 bp, Artificial Sequence
  derived and/or modified sequence
atggaggaacatggggtgacacaaacagagcacatggcaacgatagaggcacatgctgtggctcagcaggttcagcaggtgcacgttgctacctatacggaacacagcatgctgagtgcggacgaggatagcccttcctcaccagaagataccagctacgacgactccgacatccttaattccacagctgcagacgaggtcactgcacatctggctgctgcagggccagtggggatggccgcagctgccgctgttgccaccggcaagaaaaggaaaagacctcatgtattcgagtccaatccctccatcaggaaaaggcagcagacccgcctgctacgcaaactaagagccactctcgatgagtacactacacgggtgggacagcaggccattgtgctgtgtatctcccctagcaagcccaacccggttttcaaggtgttcggcgctgccccactggaaaacgttgttagaaagtacaaatcgatgattcttgaggatttggagtctgccctcgccgagcacgcaccagcccctcaggaagtgaacagtgaattaccacccctgactatcgacggcattccagtgagtgtagacaaaatgacccaagcacagctaagagccttcatccccgagatgctgaagtacagtactggcaggggaaagcctggctggggaaaggagagttgcaaacctatatggtggcccgaggacatcccttgggccaacgttcgatctgacgtgcgtactgaagaacagaaacagcgggtgtcgtggacccaggcacttagaaccattgtaaaaaactgctacaaacagcatgggagagaagacctgctgtacgcgtttgaagaccagcaaactcagacgcaggccacagcgactcactcgatcgcccatcttgtgcccagccaaaccgtggttcaaacgttttcaaatccagacggaaccgtctccctgattcaggtgggtaccggggctacagtggcaacccttgccgatgcctcagaactaccaactacagtaacagtggctcaggtcaattattcagctgtggcagacggtgaggttgagcaaaactgggccaccctgcaggggggagaaatgaccatccagacaacacaggcaagtgaagctactcaggccgtcgccagcttagccgaggcagctgtggccgcttcccaagaaatgcagcagggggcaaccgtgactatggccctcaactctgaggccgcagcccatgccgttgccactctcgcagaagctactctccagggcggtgggcaaatagtgttgagcggagagactgcagcagcagtcggagcgcttactggagtccaagacgcgaacggcctagtgcagatcccggttagcatgtatcaaacagtcgtgaccagccttgcccaaggcaatggtcctgtgcaagtggcaatggctcccgttacaacccgcatttccgactccgccgtgaccatggatggccaggctgttgaggtggtaacattggagcagtag

SEQ ID NO: 151988 - DNA, 1314 bp, Artificial Sequence
  derived and/or modified sequence
atggaagagcacggcgtgacacagaccgagcatatggctaccatcgaagcacacgctgttgcacagcaggtgcagcaggttcatgtcgcaacatataccgagcactcaatgttatcggccgatgaggactctcccagctcacccgaggacacctcatatgacgatagtgacatcttgaactctacagctgctgatgaggttacggcccacctcgcagctgcaggccctgtagggatggccgcagccgctgctgtggccaccgggaaaaagaggaaacgacctcacgtgttcgagagcaatccttcgattaggaaacggcaacagacacgcttactcaggaagttgagagccacgctcgatgagtataccacccgagttggacagcaggccattgttctgtgtatctctccctccaagcccaaccctgtatttaaggtcttcggcgctgcccctctggaaaatgtggtaagaaagtacaagtccatgatccttgaagacctggaatcggcgctggccgagcacgcacctgcccctcaggaggtcaactccgagctgccccctctcactattgacggaatacccgtgtcggttgataaaatgacccaagcccagcttcgcgcattcattccagaaatgctgaagtactccaccggtcggggtaagccaggttgggggaaggagagctgcaagcctatctggtggcctgaagatatcccttgggcaaacgtacggtctgatgttcgcaccgaagaacagaagcagcgcgtcggtaccggtgcaaccgtggccactctggccgatgcctctgagttgcccacgacagtgaccgtggcgcaggtaaattattccgccgtcgccgatggggaggtggagcaaaactgggcgacgctgcagggaggggaaatgacaattcaaaccactcaggcaagcgaggctacgcaggccgtggcctccctcgccgaggccgctgtggctgcctctcaagagatgcaacagggagcaactgtgaccatggccctcaatagcgaggcagccgcacacgcagtggctacactggccgaagctacactccagggtggcggacagatagtgcttagcggggagaccgccgctgctgtgggcgctctgactggcgtgcaggatgctaacgggttggttcagattcctgtctctatgtaccaaactgtggtaactagcctggctcaggggaatgggcctgtgcaagtggcgatggccccagttacaaccaggattagtgactccgcagtaactatggatggtcaagccgtcgaagttgtcacattggaacagtag

SEQ ID NO: 151989 - DNA, 1512 bp, Artificial Sequence
  derived and/or modified sequence
atggaagaacatggggtaacccagaccgagcacatggcaaccattgaggcacatgcggtagctcagcaggtgcagcaagttcatgtcgccacttacaccgagcactctatgctctccgctgatgaggacagcccgagctcccccgaggacaccagctatgacgactccgacatcctgaacagcaccgccgcagacgaggtgacagctcacctggccgctgccggacccgttggcatggctgccgcagccgcagtggctacaggcaagaaaaggaaaaggccgcatgtgtttgagagcaaccccagcatcaggaaaaggcagcaaacacgcctcttgcgtaagttacgggcaaccctagatgagtacacaacccgggttggccagcaggcaatcgttctctgcatttcgccctccaaaccaaatcctgtgtttaaggtgtttggggctgctccactggagaatgtagtgcgaaagtataaatccatgattctcgaagacttggaaagcgcactggcagaacacgctcccgcacctcaagaggtgaatagcgaattgcctcccctcaccatagatggaattccggttagcgtcgataagatgacccaagcccagctgagggcatttatccccgagatgctcaaatactccactggacggggaaagcctggatggggtaaggagagctgcaaacctatctggtggccagaggacatcccctgggcaaatgtgcgctctgacgtgcggacggaggaacaaaagcagcgggtgagttggacccaggccctgcgcactatagtgaagaactgctacaagcagcacgggagggaggatctgctgtatgcatttgaggatcagcagacgcagacccaagctacggctacccactctatcgcccacttggtgccatctcagaccgtcgtgcagactttctccaaccctgacgggacagtgtctctgatacaggtgggtaccggcgcaaccgtggccacattggccgacgcaagcgagctacctaccacagtcacagtcgctcaggtgaattatagcgccgtggccgacggcgaggtggagcaaaactgggccacactccagggtggggaaatgaccatacagaccacccaggcctccgaagccacccaggccgtggcctccttagctgaagctgcagttgccgcttcacaggagatgcagcagggtgctacagtaaccatggccctaaattctgaggccgcagcccacgcggtcgccactctggccgaagctactctgcagggcggtggccagatcgtcctgtctggcgagacagccgcagctgtgggggctctgacaggcgtgcaagatgcaaacgggttagttcagatccctgtatccatgtaccagaccgtcgttacatcactggcccaagggaatggcccagttcaggtcgctatggcaccagtgacgactaggatcagtgattctgctgttaccatggatggccaggccgttgaggtggtcaccctggagcagtag

SEQ ID NO: 151990 - DNA, 1512 bp, Artificial Sequence
  derived and/or modified sequence
atggaggagcacggcgtaactcagactgagcacatggctacaattgaagcgcatgccgtggcacaacaggtgcagcaggtgcatgtggcaacgtataccgagcattcgatgctgtcggcagacgaagacagtcccagttcaccagaggatacttcgtacgacgatagcgatattcttaattctacagctgccgacgaggttactgctcatctggctgcagccggacccgtgggcatggccgctgctgcggcagtggctaccggcaagaagagaaagcgtcctcatgtgtttgaatctaatccttcaattcggaaacgccagcagacccggttacttcggaagctgcgggctacattggacgagtacacgacaagggtgggccaacaagcgatagttctgtgcatatcccctagcaaacctaacccagtcttcaaggtgtttggagccgctcccctggaaaacgtggtcaggaaatacaagtctatgattcttgaagacctggaatcggctctggcggaacatgcgccagcccctcaggaagttaactcggagctcccaccgctgactattgatggaatccctgtcagcgtggacaaaatgacacaagcgcaattaagagcgttcatccccgagatgctcaagtattcaacgggtcgtggcaagccaggctggggtaaggagagctgtaaaccaatctggtggcctgaagacattccctgggcaaacgtgaggtcagacgtaagaaccgaggagcagaagcaacgcgtgtcctggacccaagcactcagaaccattgtgaagaactgttacaagcaacacggccgagaggatttgctgtatgcgtttgaggaccaacagacacagacccaggctaccgcaacccattctattgcacacctcgttccatcccagacggtggtgcagacattttcgaaccccgatggcaccgtaagcctgattcaggtgggcacgggtgctactgtagccaccctggccgatgctagtgagctgcctacgacagtgactgtggcccaagtgaattactcggccgttgccgatggcgaggtggagcagaactgggccactctgcagggtggggaaatgacgatccaaactactcaggcatccgaggcaacacaagcagtagcctctttggctgaggctgccgtcgcggcttcccaggaaatgcagcagggagctactgtaaccatggccctcaatagtgaggctgctgctcacgccgtggccactctggctgaggccaccctccagggcggtgggcaaatcgttctgagcggcgagactgcagccgcagtgggcgctttgaccggcgttcaggatgcaaatggtctagtacagatcccggttagtatgtaccaaactgtagtgacaagcctcgcccaggggaatggccctgttcaagttgccatggcacccgtaacaacccgaatcagcgattccgcggtgacaatggacgggcaggctgttgaagtggtgacactggagcagtag

SEQ ID NO: 151991 - DNA, 633 bp, Artificial Sequence
  derived and/or modified sequence
atggaggaacatggcgtcacccagacggagcatatggcaactattgaggcccacgctgtcgctcagcaggtacagcaagtgcatgtggctacctacaccgaacactcaatgttgagcgccgatgaagactcaccatcctcacccgaagatacatcatatgacgactccgacattctcaactcaacggctgccgatgaggtgaccgcgcatcttgcagcagcagggccagtgggtatggccgcagccgcagctgtggccaccggcaaaaagcggaaaaggccccacgtgttcgagtccaatcctagcatccggaagagacagcagacacgcctgctgagaaagctgcgtgcaactcttgacgagtacacgactcgtgtagggcagcaagcaattgttctgtgtatatctccgagtaaacctaatcccgtgtttaaggtgttcggggcagccccacttgaaaacgtggttcggaagtacaagagtatgatccttgaggatcttgaatctgccctggcagaacatgcccctgctcctcaggaagtcaactctgaactcccgccattgaccatcgacgggatcccggtgagtgtagacaagatgacccaggcccagctgcgcgcatttataccctag

SEQ ID NO: 151992 - DNA, 1512 bp, Artificial Sequence
  derived and/or modified sequence
atggaggagcacggcgtgacccagaccgagcacatggccaccatcgaggcccacgccgtggcccagcaggtgcagcaggtgcacgtggccacctacaccgagcacagcatgctgagcgccgacgaggacagccccagcagccccgaggacaccagctacgacgacagcgacatcctgaacagcaccgccgccgacgaggtgaccgcccacctggccgccgccggccccgtgggcatggccgccgccgccgccgtggccaccggcaagaagagaaagagaccccacgtgttcgagagcaaccccagcatcagaaagagacagcagaccagactgctgagaaagctgagagccaccctggacgagtacaccaccagagtgggccagcaggccatcgtgctgtgcatcagccccagcaagcccaaccccgtgttcaaggtgttcggcgccgcccccctggagaacgtggtgagaaagtacaagagcatgatcctggaggacctggagagcgccctggccgagcacgcccccgccccccaggaggtgaacagcgagctgccccccctgaccatcgacggcatccccgtgagcgtggacaagatgacccaggcccagctgagagccttcatccccgagatgctgaagtacagcaccggcagaggcaagcccggctggggcaaggagagctgcaagcccatctggtggcccgaggacatcccctgggccaacgtgagaagcgacgtgagaaccgaggagcagaagcagagagtgagctggacccaggccctgagaaccatcgtgaagaactgctacaagcagcacggcagagaggacctgctgtacgccttcgaggaccagcagacccagacccaggccaccgccacccacagcatcgcccacctggtgcccagccagaccgtggtgcagaccttcagcaaccccgacggcaccgtgagcctgatccaggtgggcaccggcgccaccgtggccaccctggccgacgccagcgagctgcccaccaccgtgaccgtggcccaggtgaactacagcgccgtggccgacggcgaggtggagcagaactgggccaccctgcagggcggcgagatgaccatccagaccacccaggccagcgaggccacccaggccgtggccagcctggccgaggccgccgtggccgccagccaggagatgcagcagggcgccaccgtgaccatggccctgaacagcgaggccgccgcccacgccgtggccaccctggccgaggccaccctgcagggcggcggccagatcgtgctgagcggcgagaccgccgccgccgtgggcgccctgaccggcgtgcaggacgccaacggcctggtgcagatccccgtgagcatgtaccagaccgtggtgaccagcctggcccagggcaacggccccgtgcaggtggccatggcccccgtgaccaccagaatcagcgacagcgccgtgaccatggacggccaggccgtggaggtggtgaccctggagcagtag

SEQ ID NO: 151993 - DNA, 1314 bp, Artificial Sequence
  derived and/or modified sequence
atggaggagcacggcgtgacccagaccgagcacatggccaccatcgaggcccacgccgtggcccagcaggtgcagcaggtgcacgtggccacctacaccgagcacagcatgctgagcgccgacgaggacagccccagcagccccgaggacaccagctacgacgacagcgacatcctgaacagcaccgccgccgacgaggtgaccgcccacctggccgccgccggccccgtgggcatggccgccgccgccgccgtggccaccggcaagaagagaaagagaccccacgtgttcgagagcaaccccagcatcagaaagagacagcagaccagactgctgagaaagctgagagccaccctggacgagtacaccaccagagtgggccagcaggccatcgtgctgtgcatcagccccagcaagcccaaccccgtgttcaaggtgttcggcgccgcccccctggagaacgtggtgagaaagtacaagagcatgatcctggaggacctggagagcgccctggccgagcacgcccccgccccccaggaggtgaacagcgagctgccccccctgaccatcgacggcatccccgtgagcgtggacaagatgacccaggcccagctgagagccttcatccccgagatgctgaagtacagcaccggcagaggcaagcccggctggggcaaggagagctgcaagcccatctggtggcccgaggacatcccctgggccaacgtgagaagcgacgtgagaaccgaggagcagaagcagagagtgggcaccggcgccaccgtggccaccctggccgacgccagcgagctgcccaccaccgtgaccgtggcccaggtgaactacagcgccgtggccgacggcgaggtggagcagaactgggccaccctgcagggcggcgagatgaccatccagaccacccaggccagcgaggccacccaggccgtggccagcctggccgaggccgccgtggccgccagccaggagatgcagcagggcgccaccgtgaccatggccctgaacagcgaggccgccgcccacgccgtggccaccctggccgaggccaccctgcagggcggcggccagatcgtgctgagcggcgagaccgccgccgccgtgggcgccctgaccggcgtgcaggacgccaacggcctggtgcagatccccgtgagcatgtaccagaccgtggtgaccagcctggcccagggcaacggccccgtgcaggtggccatggcccccgtgaccaccagaatcagcgacagcgccgtgaccatggacggccaggccgtggaggtggtgaccctggagcagtag

SEQ ID NO: 151994 - DNA, 633 bp, Artificial Sequence
  derived and/or modified sequence
atggaggagcacggcgtgacccagaccgagcacatggccaccatcgaggcccacgccgtggcccagcaggtgcagcaggtgcacgtggccacctacaccgagcacagcatgctgagcgccgacgaggacagccccagcagccccgaggacaccagctacgacgacagcgacatcctgaacagcaccgccgccgacgaggtgaccgcccacctggccgccgccggccccgtgggcatggccgccgccgccgccgtggccaccggcaagaagagaaagagaccccacgtgttcgagagcaaccccagcatcagaaagagacagcagaccagactgctgagaaagctgagagccaccctggacgagtacaccaccagagtgggccagcaggccatcgtgctgtgcatcagccccagcaagcccaaccccgtgttcaaggtgttcggcgccgcccccctggagaacgtggtgagaaagtacaagagcatgatcctggaggacctggagagcgccctggccgagcacgcccccgccccccaggaggtgaacagcgagctgccccccctgaccatcgacggcatccccgtgagcgtggacaagatgacccaggcccagctgagagccttcatcccctag

SEQ ID NO: 151995 - DNA, 1263 bp, Artificial Sequence
  derived and/or modified sequence
atgcgctggcgtaccattctgcttcaatactgcttcctgctgataacctgcctattgacagccctggaagcagtgcctatcgatattgataagaccaaggtgcagaacatccaccccgtagagtccgccaaaatcgaaccccccgatacggggttgtattatgatgaatacctaaaacaggtgatcgatgtccttgagaccgacaagcacttcagggagaagctgcagaaagcagacatcgaggaaattaagagtggcaggctgagcaaagagctggatctggtcagtcatcatgtgaggaccaagctcgacgaactaaagcggcaggaagtgggaaggctaagaatgcttataaaggcgaagctcgattcgttacaggatatcgggatggatcaccaagctctgcttaagcagtttgatcatctgaatcacctaaatccagataagtttgagagcactgaccttgacatgttgattaaggcagcaaccagcgacctcgagcattacgataagacgaggcatgaagagttcaagaaatatgaaatgatgaaagagcacgagcgccgggagtacttaaaaacgctcaatgaagagaagaggaaggaggaggagtctaaattcgaagagatgaagaagaaacacgaaaatcatcctaaggtgaaccacccaggcagtaaggatcaactgaaggaggtgtgggaggagacagacggcctggaccctaacgatttcgacccaaagaccttcttcaagctgcacgatgtgaatagcgatgggtttctggacgagcaggagctggaggcactgttcaccaaagagcttgaaaaggtatacgatcctaagaacgaggaggatgacatggtcgagatggaagaggagcgactaaggatgagggaacacgtgatgtcagaggttgataccaacaaggaccgtttggtcaccctggaagagttcctgaaggccaccgagaagaaggaattcctcgagccagactcatgggagacactggatcagcagcagtttttcacagaggaggaactaaaagagtatgagaacataatcgcattgcaagagaatgagctcaaaaagaaggcggatgagcttcagaagcagaaagaagaactccagcgacaacacgatcaactcgaggcccaaaagctggagtatcatcaggtgatacaacagatggaacaaaagaaattgcagcaaggcataccaccctccggccccgcgggtgagcttaaattcgagcctcacatctag

SEQ ID NO: 151996 - DNA, 1263 bp, Artificial Sequence
  derived and/or modified sequence
atgcgctggaggaccatcctgctgcagtactgcttcctgctgatcacctgcctgctgacagccctggaggccgtgcccattgatattgacaagaccaaggtgcagaacatccaccctgtggagagcgccaagattgagcccccagacaccggcctgtactatgatgagtacctgaagcaggtgattgatgtgctggagacagacaagcacttccgggagaagctgcagaaggctgacatcgaggagatcaagagcggccgcctgagcaaggagctggacctggtgagccaccacgtgaggaccaagctggatgagctgaagaggcaggaggtgggccgcctgaggatgctgatcaaggccaagctggacagcctgcaggacatcggcatggaccaccaggccctgctgaagcagtttgaccacctgaaccacctgaacccagacaagtttgagagcacagacctggacatgctgatcaaggccgccaccagtgacctggagcactatgacaagaccaggcatgaggagttcaagaagtatgagatgatgaaggagcacgagcggcgggagtacctgaagaccctgaatgaggagaagaggaaggaggaggagagcaagtttgaggagatgaagaagaagcatgagaaccaccccaaggtgaaccaccctggcagcaaggaccagctgaaggaggtgtgggaggagacagatggcctggaccccaatgactttgaccccaagaccttcttcaagctgcatgatgtgaacagtgatggcttcctggatgagcaggagctggaggccctcttcaccaaggagctggagaaggtgtatgaccccaagaatgaggaggatgacatggtggagatggaggaggagcggctgaggatgagggagcacgtgatgtctgaggtggacaccaacaaggaccggctggtgaccctggaggagttcctgaaggccacagagaagaaggagttcctggagccagacagctgggagaccctggaccagcagcagttcttcacagaggaggagctgaaggagtatgagaacatcatcgccctgcaggagaatgagctgaagaagaaggcagatgagctgcagaagcagaaggaggagctgcagaggcagcacgaccagctggaggcccagaagctggagtaccaccaggtgatccagcagatggagcagaagaagctgcagcagggcatcccccccagcggccctgctggggagctgaagtttgagccccacatctag

SEQ ID NO: 151997 - DNA, 1263 bp, Artificial Sequence
  derived and/or modified sequence
atgcggtggcggaccatcctgctgcagtactgcttcctgctgatcacctgcctcctaactgctctagaagcagtgccaatcgacatcgataagaccaaagtgcagaatatacatccggtcgagtctgccaaaattgaacctcccgacacaggattgtactacgatgagtacttgaagcaggtgatcgacgtgttggagactgacaagcattttagagaaaaactccaaaaagcagatatcgaagagatcaagagtgggaggctgtcgaaggagctggacctcgttagccaccatgtgcgcacaaaactggatgaacttaagagacaagaggttggccgcttgcgaatgctaataaaagcaaaactagactcgctccaggatattgggatggatcaccaggccctgttgaaacagtttgaccatctgaaccatcttaatcccgacaaatttgagtccacagaccttgatatgcttatcaaagcagcaacgagcgacctggagcattacgataagactagacacgaggagttcaaaaaatatgaaatgatgaaggagcatgaaaggagagagtatcttaaaactctgaacgaggaaaaaagaaaggaagaagagtccaagttcgaggaaatgaagaagaaacacgaaaaccacccaaaagtgaaccacccaggaagcaaagatcagctgaaggaggtttgggaagagacagacgggctggaccctaacgacttcgatccaaagacattctttaaattacatgatgtcaactctgacggattcctggacgagcaagagctcgaggcattattcacaaaggaactggagaaagtctacgaccccaagaacgaagaagatgacatggtagaaatggaagaggaaagattacggatgagggagcatgtgatgtcagaggtggatacaaataaggaccgccttgtcacgttggaggaattcctcaaggccaccgaaaaaaaagagtttctggaacccgactcttgggagaccctcgatcagcagcaattttttaccgaagaagagttaaaggagtatgaaaacatcatagcgctgcaggaaaatgagctgaaaaagaaagctgatgagctgcaaaagcagaaggaggaactccaaagacagcacgatcagttagaggcgcaaaaactggaatatcatcaagtaattcagcagatggaacaaaagaagttgcagcaaggaatcccgccaagcggccccgcaggggagctgaagttcgaaccgcatatttag

SEQ ID NO: 151998 - DNA, 2274 bp, Artificial Sequence
  derived and/or modified sequence
gaggacaggtttgtgcgctggacgcaagcaccaggcgcagcctcgctcgccgagacccggccagaacgtgttacgagtcagtttttagtgaaaaaacattgagctaggagccaagacccatctcttcactattttggtattgtgcaagtcatcttacctctctggatctcagttgtctcatctgtaaaaaggagataaaaattatttacctgcctgaacatgaggtggaggaccatcctgctacagtattgctttctcttgattacatgtttacttactgctcttgaagctgtgcctattgacatagacaagacaaaagtacaaaatattcaccctgtggaaagtgcgaagatagaaccaccagatactggactttattatgatgaatatctcaagcaagtgattgatgtgctggaaacagataaacacttcagagaaaagctccagaaagcagacatagaggaaataaagagtgggaggctaagcaaagaactggatttagtaagtcaccatgtgaggacaaaacttgatgaactgaaaaggcaagaagtaggaaggttaagaatgttaattaaagctaagttggattcccttcaagatataggcatggaccaccaagctcttctaaaacaatttgatcacctaaaccacctgaatcctgacaagtttgaatccacagatttagatatgctaatcaaagcggcaacaagtgatctggaacactatgacaagactcgtcatgaagaatttaaaaaatatgaaatgatgaaggaacatgaaaggagagaatatttaaaaacattgaatgaagaaaagagaaaagaagaagagtctaaatttgaagaaatgaagaaaaagcatgaaaatcaccctaaagttaatcacccaggaagcaaagatcaactaaaagaggtatgggaagagactgatggattggatcctaatgactttgaccccaagacatttttcaaattacatgatgtcaatagtgatggattcctggatgaacaagaattagaagccctatttactaaagagttggagaaagtatatgaccctaaaaatgaagaggatgatatggtagaaatggaagaagaaaggcttagaatgagggaacatgtaatgagtgaggttgatactaacaaagacagattggtgactctggaggagtttttgaaagccacagaaaaaaaagaattcttggagccagatagctgggagacattagatcagcaacagttcttcacagaggaagaactaaaagaatatgaaaatattattgctttacaagaaaatgaacttaagaagaaggcagatgagcttcagaaacaaaaagaagagctacaacgtcagcatgatcaactggaggctcagaagctggaatatcatcaggtcatacagcagatggaacaaaaaaaattacaacaaggaattcctccatcagggccagctggagaattgaagtttgagccacacatttaaagtctgaagtccaccagaacttggaagaaagctgttaactcaacatctatttcatctttttagctcccttcctttttctctgctcaataaatattttaaaagcatatttgaaataaagggagatactttttaaatgaaaacactttttttgggacacagatattaaaggattgaagtttatcagaaccaggaagaaaacaaactcactgtctgctctctgctctcacattcacacggctcttttatttatttttttgttctcctttaatgatttaattaagtggctttatgccataatttagtgaaactattaggaactatttaagtgagaaaactctgcctcttgcttttaaattagattgctctcacttactcgtaaacataggtattcttttatgggtgcttatcattccttctttcaataaatgtctgtttgatattaacaattctggaaaggccacagtatttccctgtgtttcctggtaacgtttttctagttttggcaacctcaactgctagaaattcttcacctgaatcacttttgctaccacttcaggtcatttttcattcttttttattttgctctatactttatcatttaagattaggttatgttacatataacagaaaaaacaaagataacagtggtttaaactaaataggagtttttcttcttacataagtctagaagtaggtggtgtccaggttcctatctttctgctctgctatcctcagtgcatgatttttatcctcagattacctcactctcactgttcaagtttgctcctggag

SEQ ID NO: 151999 - DNA, 1263 bp, Artificial Sequence
  derived and/or modified sequence
atgcgttggcggacaatcctgcttcagtattgttttttgctcatcacctgtctgctcacagccctggaggccgtgccaatcgacatcgacaagacaaaggtccagaacattcatcccgtcgaaagcgcaaagatcgaacctccagataccggcctctactatgacgagtacctaaagcaagttattgacgtgctcgagacagacaagcatttccgcgaaaaactccagaaggccgatattgaggaaattaagtccggcaggctgtcaaaagagctggacctcgtgtctcatcacgtacgcactaagctagatgaactgaagcgccaagaggtggggagattgaggatgttgatcaaagcaaagttagatagtttgcaagacatcggtatggatcaccaggcacttcttaagcagttcgaccacctgaaccacttaaaccctgacaaattcgaatcaactgatctcgacatgctcattaaggcagcaacatccgatttggaacattacgataagacaagacacgaggagtttaaaaaatacgaaatgatgaaggaacacgaaagacgtgagtatttaaagacattgaatgaggagaaacgtaaagaagaggagtctaagttcgaggagatgaagaaaaagcatgagaaccacccaaaggtgaaccaccccggatcgaaggaccagctgaaggaggtttgggaggagacagacggattggatcctaacgattttgaccctaaaactttttttaaacttcacgacgttaattctgacgggttcctggacgagcaggaactcgaggctctctttacgaaagagcttgaaaaagtgtatgaccccaaaaacgaggaagatgatatggtcgagatggaggaggagcggctgcgtatgcgcgagcacgtgatgtctgaggtggacactaacaaagatcgtctggtgactcttgaggaattcttgaaagcaaccgagaagaaggaatttctcgagccagactcttgggagacattagatcagcaacagtttttcaccgaagaggagttgaaggagtatgaaaatattatagctcttcaggagaatgaactgaaaaagaaggctgacgaattacaaaagcagaaagaagaactccagcggcaacatgatcaactagaggcacagaaactggaataccatcaggttatccagcagatggagcagaagaagctgcagcagggcattccacccagcggaccagccggagaactgaaatttgaaccccatatatag

SEQ ID NO: 152000 - DNA, 1263 bp, Artificial Sequence
  derived and/or modified sequence
atgagatggagaaccatcctgctgcagtactgcttcctgctgatcacctgcctgctgaccgccctggaggccgtgcccatcgacatcgacaagaccaaggtgcagaacatccaccccgtggagagcgccaagatcgagccccccgacaccggcctgtactacgacgagtacctgaagcaggtgatcgacgtgctggagaccgacaagcacttcagagagaagctgcagaaggccgacatcgaggagatcaagagcggcagactgagcaaggagctggacctggtgagccaccacgtgagaaccaagctggacgagctgaagagacaggaggtgggcagactgagaatgctgatcaaggccaagctggacagcctgcaggacatcggcatggaccaccaggccctgctgaagcagttcgaccacctgaaccacctgaaccccgacaagttcgagagcaccgacctggacatgctgatcaaggccgccaccagcgacctggagcactacgacaagaccagacacgaggagttcaagaagtacgagatgatgaaggagcacgagagaagagagtacctgaagaccctgaacgaggagaagagaaaggaggaggagagcaagttcgaggagatgaagaagaagcacgagaaccaccccaaggtgaaccaccccggcagcaaggaccagctgaaggaggtgtgggaggagaccgacggcctggaccccaacgacttcgaccccaagaccttcttcaagctgcacgacgtgaacagcgacggcttcctggacgagcaggagctggaggccctgttcaccaaggagctggagaaggtgtacgaccccaagaacgaggaggacgacatggtggagatggaggaggagagactgagaatgagagagcacgtgatgagcgaggtggacaccaacaaggacagactggtgaccctggaggagttcctgaaggccaccgagaagaaggagttcctggagcccgacagctgggagaccctggaccagcagcagttcttcaccgaggaggagctgaaggagtacgagaacatcatcgccctgcaggagaacgagctgaagaagaaggccgacgagctgcagaagcagaaggaggagctgcagagacagcacgaccagctggaggcccagaagctggagtaccaccaggtgatccagcagatggagcagaagaagctgcagcagggcatcccccccagcggccccgccggcgagctgaagttcgagccccacatctag

SEQ ID NO: 152001 - protein, 421 aa, Artificial Sequence
  derived and/or modified sequence
MGFLSPIYVIFFFFGVKVHCQYETYQWDEDYDQEPDDDYQTGFPFRQNVDYGVPFHQYTLGCVSECFCPTNFPSSMYCDNRKLKTIPNIPMHIQQLYLQFNEIEAVTANSFINATHLKEINLSHNKIKSQKIDYGVFAKLPNLLQLHLEHNNLEEFPFPLPKSLERLLLGYNEISKLQTNAMDGLVNLTMLDLCYNYLHDSLLKDKIFAKMEKLMQLNLCSNRLESMPPGLPSSLMYLSLENNSISSIPEKYFDKLPKLHTLRMSHNKLQDIPYNIFNLPNIVELSVGHNKLKQAFYIPRNLEHLYLQNNEIEKMNLTVMCPSIDPLHYHHLTYIRVDQNKLKEPISSYIFFCFPHIHTIYYGEQRSTNGQTIQLKTQVFRRFPDDDDESEDHDDPDNAHESPEQEGAEGHFDLHYYENQE

SEQ ID NO: 152002 - DNA, 91 bp, Artificial Sequence
  derived and/or modified sequence
aaaggaaaactacaaaacactgctgaaagaaatcattgacaacacaaacaaatggaaacacatcccaagatcatgggtgggtggaatcaat

SEQ ID NO: 152003 - DNA, 150 bp, Artificial Sequence
  derived and/or modified sequence
aaaacacctaggaatacagataacaagggacattaactacctcttaaagagaactacaaaccactgctcaaggaaatgagagaggacacaaacacatggaaaaacattccatcctcatggataggaagaatcaatattgtgaaaatggcc

SEQ ID NO: 152004 - DNA, 1266 bp, Artificial Sequence
  derived and/or modified sequence
atggggtttctaagccctatctacgtcatttttttcttctttggagtgaaggtgcactgccagtatgaaacataccagtgggacgaggactatgaccaggaaccagacgacgactaccaaactggctttccttttcggcaaaacgtggactacggagtaccatttcatcagtatactcttggatgtgtaagcgaatgtttctgtcctactaatttcccatcctctatgtactgtgataaccggaagctgaagacaattccaaacatccccatgcatatccaacagctctacctccagttcaacgagattgaagctgtgactgctaatagtttcattaatgccacccacttgaaagagataaacttaagtcacaataaaatcaagtcccaaaagatcgactatggtgtgttcgcgaaactgcctaatctgttgcaactgcacctcgagcataacaacctggaagaattccctttcccgttgcctaagagcctcgagaggctacttttggggtacaacgagatctccaaactgcagacaaatgccatggatggcctcgtgaaccttactatgcttgacttatgctacaactacttgcatgacagcttgttgaaggataagatttttgcgaagatggaaaaacttatgcagctgaatctttgttccaatcgactggaatcaatgccacccggactcccaagcagcttgatgtatttgtccctggagaataactctattagcagtattccagagaagtacttcgataagctccctaagttgcacaccctccgcatgagccacaataaattgcaggacatcccctacaacatctttaacctccccaatattgtggaacttagcgttggtcacaataagctcaagcaagccttctacattcctcgcaatttggagcacttatacctgcagaacaatgagattgagaaaatgaacctaactgtgatgtgccccagcatcgatcccctccactaccatcacttaacgtatattcgcgtggatcagaacaaacttaaagaacccatcagttcctacatattcttttgtttcccccacatacacacaatctactacggtgagcagaggtccaccaacggacaaactattcagttgaaaacccaggtgtttcgaagattccccgacgatgatgacgagtccgaggaccatgacgaccccgacaatgctcatgagagtcctgaacaggagggcgcagagggccatttcgacctgcactattacgagaaccaggagtag

SEQ ID NO: 152005 - DNA, 1266 bp, Artificial Sequence
  derived and/or modified sequence
atgggttttttgagcccaatctacgtaatattctttttctttggggtaaaggtgcactgccagtacgaaacataccagtgggatgaggattatgaccaggagcccgacgacgactatcagacgggtttcccctttcggcaaaacgtagactatggggtgccttttcaccagtacactttgggctgcgtctctgagtgcttttgccccacaaatttcccctctagcatgtactgtgacaatcgaaaactgaagacgatacccaacatccccatgcacatccaacagctttacctgcagtttaatgaaatagaggctgttaccgccaactcatttataaatgcaacccacctgaaagagatcaatctcagccacaacaaaattaagtcccaaaaaatagattacggcgtttttgcaaagctccctaacttgctccagctccaccttgagcacaacaacttggaagaatttccgttcccgctcccaaagtctctagaaagactcttgctagggtataatgaaatctctaagctgcagactaacgctatggacggcttggtgaatcttacaatgcttgacctgtgttataactacctccacgactccctcctaaaggacaaaatcttcgccaagatggaaaaactgatgcaactaaatttatgcagcaataggctggaatcgatgccacccggactgccttcctccctcatgtatctctcacttgaaaacaactctatctcatctataccagaaaaatatttcgataagctgccaaaactgcacacattgagaatgagccacaataagctgcaagatatcccgtataacatatttaacctcccaaacatcgtcgagttgagtgttggccataataagctgaagcaagccttctatattcctagaaatctggaacatctttaccttcagaacaacgagatcgaaaagatgaatcttactgttatgtgcccgtcaatcgatcccttgcactaccatcacctaacatacattcgggttgatcagaacaaacttaaggaacctatttcttcatacatctttttctgctttcctcacatccatacgatctactacggggaacagcgctcgacaaacggccaaactattcaactcaagacacaggtatttaggcgttttccagacgatgacgatgagtctgaagaccatgacgaccctgacaatgctcacgagagtcccgagcaagaaggggctgaggggcacttcgacctgcactattatgagaaccaagagtag

SEQ ID NO: 152006 - DNA, 1266 bp, Artificial Sequence
  derived and/or modified sequence
atgggattcttgtcacccatttatgtcatcttctttttcttcggagtcaaagtacactgtcagtacgaaacttaccaatgggacgaggactacgatcaagagccggacgacgattaccaaacaggatttcccttcagacagaacgttgactatggagtgccatttcatcagtacaccctcggctgcgtaagcgaatgcttttgccctactaacttcccgtcttccatgtactgcgacaacagaaagctgaagacaattccaaatattcctatgcacatccagcagctgtacctccagtttaatgaaattgaggccgtgacggcgaattccttcatcaatgctactcacctgaaggagatcaacctttcgcataacaagattaaatcccaaaaaattgactatggcgtgtttgccaaattacccaatctgttacaactgcaccttgaacataacaacctggaggaatttccattccccctacccaaaagcttagagcgacttctactagggtataatgaaatctcaaagcttcagactaacgcaatggatggactcgttaatctcacaatgctcgacctatgctataattacctccacgactccctcctaaaggacaaaatcttcgccaagatggaaaaactgatgcaactaaatttatgcagcaataggctggaatcgatgccacccggactgccttcctccctcatgtatctctcacttgaaaacaactctatctcatctataccagaaaaatatttcgataagctgccaaaactgcacacattgagaatgagccacaataagctgcaagatatcccgtataacatatttaacctcccaaacatcgtcgagttgagtgttggccataataagctgaagcaagccttctatattcctagaaatctggaacatctttaccttcagaacaacgagatcgaaaagatgaatcttactgttatgtgcccgtcaatcgatcccttgcactaccatcacctaacatacattcgggttgatcagaacaaacttaaggaacctatttcttcatacatctttttctgctttcctcacatccatacgatctactacggggaacagcgctcgacaaacggccaaactattcaactcaagacacaggtatttaggcgttttccagacgatgacgatgagtctgaagaccatgacgaccctgacaatgctcacgaatcacccgaacaggagggagccgagggccattttgatctgcactattatgaaaaccaggagtag

SEQ ID NO: 152007 - DNA, 1266 bp, Artificial Sequence
  derived and/or modified sequence
atgggcttcctgagccccatctacgtgatcttcttcttcttcggcgtgaaggtgcactgccagtacgagacctaccagtgggacgaggactacgaccaggagcccgacgacgactaccagaccggcttccccttcagacagaacgtggactacggcgtgcccttccaccagtacaccctgggctgcgtgagcgagtgcttctgccccaccaacttccccagcagcatgtactgcgacaacagaaagctgaagaccatccccaacatccccatgcacatccagcagctgtacctgcagttcaacgagatcgaggccgtgaccgccaacagcttcatcaacgccacccacctgaaggagatcaacctgagccacaacaagatcaagagccagaagatcgactacggcgtgttcgccaagctgcccaacctgctgcagctgcacctggagcacaacaacctggaggagttccccttccccctgcccaagagcctggagagactgctgctgggctacaacgagatcagcaagctgcagaccaacgccatggacggcctggtgaacctgaccatgctggacctgtgctacaactacctgcacgacagcctgctgaaggacaagatcttcgccaagatggagaagctgatgcagctgaacctgtgcagcaacagactggagagcatgccccccggcctgcccagcagcctgatgtacctgagcctggagaacaacagcatcagcagcatccccgagaagtacttcgacaagctgcccaagctgcacaccctgagaatgagccacaacaagctgcaggacatcccctacaacatcttcaacctgcccaacatcgtggagctgagcgtgggccacaacaagctgaagcaggccttctacatccccagaaacctggagcacctgtacctgcagaacaacgagatcgagaagatgaacctgaccgtgatgtgccccagcatcgaccccctgcactaccaccacctgacctacatcagagtggaccagaacaagctgaaggagcccatcagcagctacatcttcttctgcttcccccacatccacaccatctactacggcgagcagagaagcaccaacggccagaccatccagctgaagacccaggtgttcagaagattccccgacgacgacgacgagagcgaggaccacgacgaccccgacaacgcccacgagagccccgagcaggagggcgccgagggccacttcgacctgcactactacgagaaccaggagtag

SEQ ID NO: 152008 - DNA, 1266 bp, Artificial Sequence
  derived and/or modified sequence
atgggttttctgtctccgatctatgtaattttcttctttttcggagttaaggtacattgtcagtacgagacgtatcagtgggacgaagattacgaccaggaacctgacgacgattatcagactgggtttcctttccgccagaatgtggattacggcgtgccattccaccagtacacactaggatgtgtgtccgagtgcttttgccctaccaattttccatcctccatgtactgtgacaatagaaaactgaagacaatcccaaatatcccgatgcacatccaacagctctatctccagttcaacgagattgaagctgttaccgccaattctttcataaacgccacacacctcaaagaaataaacctttcgcacaataagatcaagtcacagaagattgactacggtgtgttcgcgaagctgcccaatttgctacagctacatttggagcataacaatctcgaggagttccctttccccctacctaagagcctggaaagacttcttttgggttataacgaaatcagcaagttacagaccaacgcgatggacgggttggtgaacctgaccatgttggatctctgttacaactatctccatgatagcctgctgaaagataagatattcgcgaagatggaaaagttaatgcaactgaatctgtgcagtaatcggcttgaatcaatgcctcccggtctaccctcttctctgatgtacttatccttggagaataactctatcagcagcatacctgagaaatactttgacaaactccccaagcttcatactctccggatgtcccacaacaaattgcaagacataccgtataatattttcaacttaccgaacatcgtcgaactaagcgtggggcacaataaacttaagcaggctttttacattccacgcaacctcgagcacctatatctacagaataacgaaatcgagaaaatgaacttgaccgtgatgtgcccctccattgacccactgcactaccatcacctgacctatatcagggtggaccaaaataagctgaaggaaccgatttccagctatatattcttttgttttccacatatacacacaatatactatggagagcaacgctctactaatggacagaccattcagctcaaaacacaggtcttcaggagatttcctgacgacgatgacgagtcagaggatcacgacgatccagacaacgcccatgagtcacctgaacaggagggcgccgaggggcatttcgacctgcactattacgagaaccaggagtag

SEQ ID NO: 152009 - DNA, 1266 bp, Artificial Sequence
  derived and/or modified sequence
atgggcttcctgagccccatctacgtgatcttcttcttcttcggcgtgaaggtgcactgccagtatgagacctaccagtgggatgaagattatgaccaggagccagatgatgactaccagacaggcttccccttccggcagaatgtggactatggagtgcccttccaccagtacaccctgggctgtgtgtctgagtgcttctgccccaccaacttccccagctccatgtactgtgacaacaggaagctgaagaccatccccaacatccccatgcacatccagcagctgtacctgcagttcaatgaaattgaagctgtgacagccaacagcttcatcaatgccacccacctgaaggagatcaacctgagccacaacaagatcaagagccagaagattgattatggagtgtttgccaagctgcccaacctgctgcagctgcacctggagcacaacaacctggaggagttccccttccccctgcccaagagcctggagcggctgctgctgggctacaatgagatcagcaagctgcagaccaatgccatggatggcctggtgaacctgaccatgctggacctgtgctacaactacctgcatgacagcctgctgaaggacaagatctttgccaagatggagaagctgatgcagctgaacctgtgcagcaaccggctggagagcatgcctcctggcctgcccagcagcctgatgtacctgagcctggagaacaacagcatcagcagcatccctgagaagtactttgacaagctgcccaagctgcacaccctgaggatgagccacaacaagctgcaggacatcccctacaacatcttcaacctgcccaacatcgtggagctgtctgtgggccacaacaagctgaagcaggccttctacatccccaggaacctggagcacctgtacctgcagaacaatgaaattgagaagatgaacctgactgtgatgtgccccagcattgaccccctgcactaccaccacctgacctacatccgggtggaccagaacaagctgaaggagcccatcagcagctacatcttcttctgcttcccccacatccacaccatctactacggggagcagaggagcaccaacggccagaccatccagctgaagacccaggtgttccgccgcttcccagatgatgatgatgaaagtgaagatcatgatgatcctgacaatgcccacgagagccctgagcaggagggcgctgagggccactttgacctgcactactatgagaaccaggagtag

SEQ ID NO: 152010 - DNA, 2449 bp, Artificial Sequence
  derived and/or modified sequence
gaccaagaacacaagcatcttaatttgaatccacaaagtttcatgtaatgaaaagaaatacataattttaattcaacccgagtgttttccaagaagattgtatttgcttaaattgctacagtaattcaagagacagccctgtctggacacagagttactgtggatttttaagagactcagttaaagaatttaggaatttctgattcatttaaaggatttacaaattcatcaacccctgaaaactaaagcaaattgaacaggaaaaaaaaaaagaagatgggttttttaagtccaatatatgttattttcttcttttttggagtcaaagtacattgccaatatgaaacttatcagtgggatgaagactatgaccaagagccagatgatgattaccaaacaggattcccatttcgtcaaaatgtagactacggagttccttttcatcagtatactttaggctgtgtcagtgaatgcttctgtccaactaactttccatcatcaatgtactgtgataatcgcaaactcaagactatcccaaatattccgatgcacattcagcaactctaccttcagttcaatgaaattgaggctgtgactgcaaattcattcatcaatgcaactcatcttaaagaaattaacctcagccacaacaaaattaaatctcaaaagattgattatggtgtgtttgctaagcttccaaatctactacaacttcatctagagcataataatttagaagaatttccatttcctcttcctaaatctctggaaagactccttcttggttacaatgaaatctccaaactgcagacaaatgctatggatgggctagtaaacttgaccatgcttgatctctgttataattatcttcatgattctctgctaaaagacaaaatctttgccaaaatggaaaaactaatgcagctcaacctctgcagtaacagattagaatcaatgcctcctggtttgccttcttcacttatgtatctgtctttagaaaataattcaatttcttctatacccgaaaaatacttcgacaaacttccaaaacttcatactctaagaatgtcacacaacaaactacaagacatcccatataatatttttaatcttcccaacattgtagaactcagtgttggacacaacaaattgaagcaagcattctatattccaagaaatttggaacacctatacctacaaaataatgaaatagaaaagatgaatcttacagtgatgtgtccttctattgacccactacattaccaccatttaacatacattcgtgtggaccaaaataaactaaaagaaccaataagctcatacatcttcttctgcttccctcatatacacactatttattatggtgaacaacgaagcactaatggtcaaacaatacaactaaagacacaagttttcaggagatttccagatgatgatgatgaaagtgaagatcacgatgatcctgacaatgctcatgagagcccagaacaagaaggagcagaagggcactttgaccttcattattatgaaaatcaagaatagcaagaaactatataggtatacacttacgacttcacaaaacctatacttaatatagtaaatctaagtaaacatgtattactcaaagtaatatatttagaattatgtattagtataagatcagaattgaatttaagttgttggtgacatctgcatcatttcataggattagaacttactcaaaataatgtaaatctttaaaaatataaattagaatgacaagtgggaatcataaattaaacgttaatggtttcttatgctctttttaaatatagaaatatcatgttaaagaaagtgagtgtatcatttctattaacagtaatttttctaaaaatgaggaaggaagtagcattagcagtaaagacccacaggccatgacctttttgatcactctgaggacaatatttaaatgacaggaaggtatattaatgtaacaagcattcatttaaggaatagaccattttctctgacctcttcttcaggaaagctttcacactggtatttgtgatctcaccattatgacatccatccccctagctcaccacatagcacatagaatgatatttttgatttgtaagaggccatccaggtactaaggacccaaggcatacagattcacaaaattaactaatctttttgcctcagaataccaaaacaacaaaattataaagctgtatttggacaactaaaaaacaccaaactatctcattgcaatttgtattttagcagatttcagcaactatcctaaacaatgttattgtgttccattttaactgggataaatgtttttgtaaaaatacaaccatagaaaggcctctttgttacaaaatgatttgcaaagaaataactgctttgtttgcaagattaaattagtgttggcaaaataaagttctaaagataatactaaaca

SEQ ID NO: 152011 - DNA, 1266 bp, Artificial Sequence
  derived and/or modified sequence
atgggcttcctgagccccatctacgtgatcttcttcttcttcggcgtaaaggtgcactgtcagtacgagacatatcagtgggacgaggattacgaccaggaacctgatgacgactaccaaacgggttttccttttagacagaacgttgactatggtgtacccttccatcagtatacgcttggctgtgtttccgaatgcttttgcccaaccaatttccccagtagtatgtattgcgacaatcggaaacttaagactatcccaaatataccaatgcacatccagcaattgtatctgcaattcaatgaaatcgaagctgtcacggcgaattccttcataaacgctacccatttaaaagagatcaatctgtctcataataagattaagtcacaaaagattgactacggcgtgttcgcaaagctcccgaacctcctccaattgcacctcgaacacaacaacctggaggaattcccctttccactgccgaaaagcttggagcgtttgctgctgggatacaatgaaattagtaagctgcagactaacgcaatggatgggttggtgaacctcactatgctcgacttatgttataactacttacacgacagtctgttgaaggacaagattttcgcgaaaatggagaaacttatgcagctcaacctgtgcagcaaccgcctagagtcaatgcctccaggccttccgagcagcctcatgtacttgtctctggagaataacagtatcagcagcataccagaaaagtacttcgataaactccccaagctgcataccctgcggatgtcacacaacaagttacaggacattccatataacatattcaatctcccaaacatcgttgagctgtctgttggtcataacaaactcaaacaggcattctacataccacgcaatctcgaacatctgtatctccagaataacgagatagaaaagatgaatttgactgtgatgtgcccgtccattgacccgctgcactaccaccacctgacgtacatacgggtagatcagaataaactgaaagagcccatttccagctacatttttttctgttttccacacattcacactatatactatggggaacaaagatccacaaacggccagacgattcagctgaaaacccaagtattcaggcgctttcccgatgatgacgatgagtcagaggatcacgatgatcctgataatgcacacgagtcgcccgagcaagagggtgcagagggtcactttgatcttcattactacgaaaaccaagagtag

SEQ ID NO: 152012 - RNA, 1266 nt, Artificial Sequence
  derived and/or modified sequence
auggguuuuuugagcccaaucuacguaauauucuuuuucuuugggguaaaggugcacugccaguacgaaacauaccagugggaugaggauuaugaccaggagcccgacgacgacuaucagacggguuuccccuuucggcaaaacguagacuauggggugccuuuucaccaguacacuuugggcugcgucucugagugcuuuugccccacaaauuuccccucuagcauguacugugacaaucgaaaacugaagacgauacccaacauccccaugcacauccaacagcuuuaccugcaguuuaaugaaauagaggcuguuaccgccaacucauuuauaaaugcaacccaccugaaagagaucaaucucagccacaacaaaauuaagucccaaaaaauagauuacggcguuuuugcaaagcucccuaacuugcuccagcuccaccuugagcacaacaacuuggaagaauuuccguucccgcucccaaagucucuagaaagacucuugcuaggguauaaugaaaucucuaagcugcagacuaacgcuauggacggcuuggugaaucuuacaaugcuugaccuguguuauaacuaccuccacgacucccuccuaaaggacaaaaucuucgccaagauggaaaaacugaugcaacuaaauuuaugcagcaauaggcuggaaucgaugccacccggacugccuuccucccucauguaucucucacuugaaaacaacucuaucucaucuauaccagaaaaauauuucgauaagcugccaaaacugcacacauugagaaugagccacaauaagcugcaagauaucccguauaacauauuuaaccucccaaacaucgucgaguugaguguuggccauaauaagcugaagcaagccuucuauauuccuagaaaucuggaacaucuuuaccuucagaacaacgagaucgaaaagaugaaucuuacuguuaugugcccgucaaucgaucccuugcacuaccaucaccuaacauacauucggguugaucagaacaaacuuaaggaaccuauuucuucauacaucuuuuucugcuuuccucacauccauacgaucuacuacggggaacagcgcucgacaaacggccaaacuauucaacucaagacacagguauuuaggcguuuuccagacgaugacgaugagucugaagaccaugacgacccugacaaugcucacgagagucccgagcaagaaggggcugaggggcacuucgaccugcacuauuaugagaaccaagaguag

SEQ ID NO: 152013 - RNA, 1266 nt, Artificial Sequence
  derived and/or modified sequence
augggauucuugucacccauuuaugucaucuucuuuuucuucggagucaaaguacacugucaguacgaaacuuaccaaugggacgaggacuacgaucaagagccggacgacgauuaccaaacaggauuucccuucagacagaacguugacuauggagugccauuucaucaguacacccucggcugcguaagcgaaugcuuuugcccuacuaacuucccgucuuccauguacugcgacaacagaaagcugaagacaauuccaaauauuccuaugcacauccagcagcuguaccuccaguuuaaugaaauugaggccgugacggcgaauuccuucaucaaugcuacucaccugaaggagaucaaccuuucgcauaacaagauuaaaucccaaaaaauugacuauggcguguuugccaaauuacccaaucuguuacaacugcaccuugaacauaacaaccuggaggaauuuccauucccccuacccaaaagcuuagagcgacuucuacuaggguauaaugaaaucucaaagcuucagacuaacgcaauggauggacucguuaaucucacaaugcucgaccuaugcuauaauuaccuccacgacucccuccuaaaggacaaaaucuucgccaagauggaaaaacugaugcaacuaaauuuaugcagcaauaggcuggaaucgaugccacccggacugccuuccucccucauguaucucucacuugaaaacaacucuaucucaucuauaccagaaaaauauuucgauaagcugccaaaacugcacacauugagaaugagccacaauaagcugcaagauaucccguauaacauauuuaaccucccaaacaucgucgaguugaguguuggccauaauaagcugaagcaagccuucuauauuccuagaaaucuggaacaucuuuaccuucagaacaacgagaucgaaaagaugaaucuuacuguuaugugcccgucaaucgaucccuugcacuaccaucaccuaacauacauucggguugaucagaacaaacuuaaggaaccuauuucuucauacaucuuuuucugcuuuccucacauccauacgaucuacuacggggaacagcgcucgacaaacggccaaacuauucaacucaagacacagguauuuaggcguuuuccagacgaugacgaugagucugaagaccaugacgacccugacaaugcucacgaaucacccgaacaggagggagccgagggccauuuugaucugcacuauuaugaaaaccaggaguag

SEQ ID NO: 152014 - protein, 495 aa, Artificial Sequence
  derived and/or modified sequence
MVTWLYRFLPTSNMAAKLRSLLPPDLRLQFWLHARLQKCFLSRGCGSYCAGAKASPLPGKMAMGLMCGRRELLRLLQSGRRVHSVAGPSQWLGKPLTTRLLFPAAPCCCRPHYLFLAASGPRSLSTSAISFAEVQVQAPPVVAATPSPTAVPEVASGETADVVQTAAEQSFAELGLGSYTPVGLIQNLLEFMHVDLGLPWWGAIAACTVFARCLIFPLIVTGQREAARIHNHLPEIQKFSSRIREAKLAGDHIEYYKASSEMALYQKKHGIKLYKPLILPVTQAPIFISFFIALREMANLPVPSLQTGGLWWFQDLTVSDPIYILPLAVTATMWAVLELGAETGVQSSDLQWMRNVIRMMPLITLPITMHFPTAVFMYWLSSNLFSLVQVSCLRIPAVRTVLKIPQRVVHDLDKLPPREGFLESFKKGWKNAEMTRQLREREQRMRNQLELAARGPLRQTFTHNPLLQPGKDNPPNIPSSSSKPKSKYPWHDTLG

SEQ ID NO: 152015 - protein, 419 aa, Artificial Sequence
  derived and/or modified sequence
MRGTQVHSVAGPSQWLGKPLTTRLLFPAAPCCCRPHYLFLAASGPRSLSTSAISFAEVQVQAPPVVAATPSPTAVPEVASGETADVVQTAAEQSFAELGLGSYTPVGLIQNLLEFMHVDLGLPWWGAIAACTVFARCLIFPLIVTGQREAARIHNHLPEIQKFSSRIREAKLAGDHIEYYKASSEMALYQKKHGIKLYKPLILPVTQAPIFISFFIALREMANLPVPSLQTGGLWWFQDLTVSDPIYILPLAVTATMWAVLELGAETGVQSSDLQWMRNVIRMMPLITLPITMHFPTAVFMYWLSSNLFSLVQVSCLRIPAVRTVLKIPQRVVHDLDKLPPREGFLESFKKGWKNAEMTRQLREREQRMRNQLELAARGPLRQTFTHNPLLQPGKDNPPNIPSSSSKPKSKYPWHDTLG

SEQ ID NO: 152016 - DNA, 1488 bp, Artificial Sequence
  derived and/or modified sequence
atggtcacatggttgtaccgctttctgcctacatccaatatggccgcaaagctcaggtctttgttgcctcctgatctccggctgcagttctggctgcacgcaaggttgcaaaagtgtttcctgtcgcgcggttgcggttcttattgtgcaggtgctaaagccagtccacttcctggaaagatggccatggggctgatgtgtgggagacgggaactgctccgtttacttcagtcaggacgccgggtacattccgtggctggtccttcccagtggcttggaaagcctctaacaactagactcctgtttcccgcggcaccgtgctgttgtcggccacattacctctttttggctgcgtcagggcctcggtccctgtccactagcgccataagttttgccgaggtacaggtccaggcgccccccgtggttgctgcgactcccagtccaacggctgtcccggaagtcgcctctggggagacagccgatgttgtgcagaccgcagctgagcagagcttcgcggaactggggctgggcagttacaccccagtgggccttattcagaatcttctggagtttatgcacgtggacctgggactcccatggtggggggcgatcgcagcctgcacagtttttgcccgttgccttatcttccccctgatcgttactggccagcgagaggcggccaggatccacaatcaccttcctgagattcaaaaattcagcagcaggatccgggaagcaaagttggccggagaccacatcgagtactataaagcctcctcagagatggccctataccagaagaagcatggtatcaaactgtacaagccattgatactgccagtgactcaggcccctattttcatcagctttttcatagccctcagggagatggccaacctgcctgtaccatccctgcagacaggcggattgtggtggttccaggacctcacagtcagcgatccaatttacattttaccactcgccgtcactgctaccatgtgggcagtccttgaactgggcgctgaaaccggcgtgcagagcagtgatttgcagtggatgcggaatgtgatccgaatgatgcccctcattaccctcccaattaccatgcacttccctacagcagtgtttatgtactggcttagctccaacctgtttagcctggtccaggtcagctgtctgaggatacccgccgtgcggactgtgttgaagattccccagcgggtggttcacgacttggataaattaccacctagagagggctttctggaaagcttcaagaagggatggaaaaatgctgagatgacccggcagttacgcgagcgagagcagagaatgagaaatcagctggagctggccgcaaggggtcctctccgccagacatttacacacaacccgctgctccagccaggtaaggacaatcctccaaacatcccatcctcatcaagcaaacctaagagtaaatacccttggcacgatactctcgggtag

SEQ ID NO: 152017 - DNA, 1260 bp, Artificial Sequence
  derived and/or modified sequence
atgcggggcacgcaagtgcattccgtggccggcccctctcaatggctcggcaaacccctgaccacccggctcttgtttcctgctgctccctgttgttgccgaccgcactatctattcttggctgcctccggaccaagatcgctttccaccagtgccatcagctttgctgaggtccaagtccaggcgcccccagtggttgcagccacgccatctcccactgctgtaccagaggttgcttccggggagaccgcagacgtagtacaaaccgctgccgagcaaagcttcgccgaactggggctaggaagttatacacccgttggcctgatacagaatctattggaatttatgcacgtggatctggggcttccatggtggggtgcaatagccgcctgtacagtcttcgcgaggtgcctgatctttcctctgatcgtcacaggccagagggaggcagctagaattcacaaccatcttcctgaaatccagaagttttcctcccgaattcgcgaggctaagctggcgggcgatcacatagagtactacaaggccagttcagaaatggcactgtatcaaaagaaacacggcatcaaactgtacaagcctctgattctgccggtcactcaggcccccattttcatctcatttttcattgccctgcgagagatggccaacttacccgttcccagcttgcagaccgggggtctgtggtggtttcaggatctgactgtgtcagatccgatctatattttgccgttggccgtcacagccaccatgtgggcagtgttggagctgggagctgaaaccggcgttcagtccagcgatctgcagtggatgagaaacgttatccgcatgatgcctttgattactctgcctattactatgcactttcccacggccgtgtttatgtactggctctcctccaatctctttagcctcgtccaggtatcctgtttaaggattcccgcagtaagaaccgtgctcaagatcccccagcgagtggtgcacgatctcgacaagctccctcctcgtgagggctttcttgagagctttaagaaggggtggaagaacgcggagatgacaagacagttaagagagagagagcagcgcatgaggaaccagttagaactggcagcccggggccccctgcgccaaacctttacccacaatcccttgctgcagcccgggaaggataatcctcctaacatacctagcagttcctctaagcccaagtctaaatatccctggcacgacactctcggatag

SEQ ID NO: 152018 - DNA, 1488 bp, Artificial Sequence
  derived and/or modified sequence
atggtgacctggctgtaccgcttcctgcccaccagcaacatggccgccaagctgcggagcctgctgcccccagacctgcggctgcagttctggctgcacgcccggctgcagaagtgcttcctgagccggggctgcggcagctactgtgccggggccaaggccagccccctgcccgggaagatggccatgggcctgatgtgtggcagaagagagctgctgcggctgctgcagagcggccggcgggtgcacagcgtggccggccccagccagtggctgggcaagcccctgaccacccggctgctcttccctgctgccccctgctgctgccggccccactacctgttcctggccgccagcggccccaggagcctgagcaccagcgccatcagctttgctgaggtgcaggtgcaggcccctcctgtggtggccgccacccccagccccacagctgtgcctgaggtggccagcggggagacagcagatgtggtgcagacagctgctgagcagagctttgctgagctgggcctgggcagctacacccctgtgggcctcatccagaacctgctggagttcatgcacgtggacctgggcctgccctggtggggcgccatcgccgcctgcaccgtgtttgcccgctgcctgatcttccccctgattgtgacaggccagcgggaggccgcccgcatccacaaccacctgcctgagatccagaagttcagcagccgcatccgggaggccaagctggccggggaccacatcgagtactacaaggccagcagcgagatggccctgtaccagaagaagcacggcatcaagctgtacaagcccctcatcctgcctgtgacccaggcccccatcttcatctccttcttcatcgccctgcgggagatggccaacctgcctgtgcccagcctgcagacaggaggcctgtggtggttccaggacctgactgtgtctgaccccatctacatcctgcccctggccgtgacagccaccatgtgggccgtgctggagctgggcgctgagactggagtgcagagcagtgacctgcagtggatgagaaatgtcatccgcatgatgcccctcatcaccctgcccatcaccatgcacttccccacagctgtgttcatgtactggctgagcagcaacctcttcagcctggtgcaggtgtcctgcctgcgcatcccagctgtgaggacagtgctgaagatcccccagagggtggtgcatgacctggacaagctgcccccccgggagggcttcctggagagcttcaagaagggctggaagaatgctgagatgacccggcagctgcgggagcgggagcagaggatgaggaaccagctggagctggccgcccggggccccctgcggcagaccttcacccacaaccccctgctgcagcccgggaaggacaacccccccaacatccccagcagcagcagcaagcccaagagcaagtacccctggcatgacaccctgggctag

SEQ ID NO: 152019 - DNA, 1260 bp, Artificial Sequence
  derived and/or modified sequence
atgaggggcacccaggtgcacagcgtggccggccccagccagtggctgggcaagcccctgaccacccggctgctcttccctgctgccccctgctgctgccggccccactacctgttcctggccgccagcggccccaggagcctgagcaccagcgccatcagctttgctgaggtgcaggtgcaggcccctcctgtggtggccgccacccccagccccacagctgtgcctgaggtggccagcggggagacagcagatgtggtgcagacagctgctgagcagagctttgctgagctgggcctgggcagctacacccctgtgggcctcatccagaacctgctggagttcatgcacgtggacctgggcctgccctggtggggcgccatcgccgcctgcaccgtgtttgcccgctgcctgatcttccccctgattgtgacaggccagcgggaggccgcccgcatccacaaccacctgcctgagatccagaagttcagcagccgcatccgggaggccaagctggccggggaccacatcgagtactacaaggccagcagcgagatggccctgtaccagaagaagcacggcatcaagctgtacaagcccctcatcctgcctgtgacccaggcccccatcttcatctccttcttcatcgccctgcgggagatggccaacctgcctgtgcccagcctgcagacaggaggcctgtggtggttccaggacctgactgtgtctgaccccatctacatcctgcccctggccgtgacagccaccatgtgggccgtgctggagctgggcgctgagactggagtgcagagcagtgacctgcagtggatgagaaatgtcatccgcatgatgcccctcatcaccctgcccatcaccatgcacttccccacagctgtgttcatgtactggctgagcagcaacctcttcagcctggtgcaggtgtcctgcctgcgcatcccagctgtgaggacagtgctgaagatcccccagagggtggtgcatgacctggacaagctgcccccccgggagggcttcctggagagcttcaagaagggctggaagaatgctgagatgacccggcagctgcgggagcgggagcagaggatgaggaaccagctggagctggccgcccggggccccctgcggcagaccttcacccacaaccccctgctgcagcccgggaaggacaacccccccaacatccccagcagcagcagcaagcccaagagcaagtacccctggcatgacaccctgggctag

SEQ ID NO: 152020 - DNA, 1488 bp, Artificial Sequence
  derived and/or modified sequence
atggtgacctggctgtaccggttcctgcccaccagcaacatggccgccaaacttagatctttgctgcccccagacttgaggctccagttttggctacacgcccgcctccagaagtgtttcctgtcccggggctgcgggagctactgcgccggtgccaaggcttcccccctccccgggaaaatggctatgggcctgatgtgtggccgccgagagctcctgcgactgctacagtcaggcaggcgcgtccattctgtagctggtccttcccagtggttgggcaagcccttgactacaagactgctctttcctgccgcaccttgttgttgtagacctcactatctgtttctggcagcttccgggcctagaagcctgtctacctctgcaattagcttcgccgaggtgcaagtacaggcgccgcctgtggtggccgccacacccagtccgacagccgtcccagaggttgcctctggggagacagccgatgtggtgcagaccgctgctgaacagagctttgctgaactgggactgggctcctacactcctgttggcctgatacagaacctgctcgagtttatgcatgtagacctggggttaccatggtggggggcgattgctgcatgcacagtttttgctagatgcctgatcttccccctaatcgtcacaggacaaagggaggcagcacggatccataatcaccttcccgagattcaaaagttctctagccgaatccgtgaagcgaaattagcaggcgaccacattgaatactacaaggcctcttcggaaatggccctctaccaaaagaagcacggcattaagctatacaagcctttgatcttaccagttactcaggctcctatctttattagtttcttcatcgccctcagggagatggctaacctgccagtgcccagtcttcagactggtggattatggtggttccaggaccttactgtaagtgacccaatatatatcttgcccctcgcggtgacagcaactatgtgggccgtgcttgagttgggtgctgagaccggtgtgcaatcctccgatctccagtggatgcggaatgttattagaatgatgcctctgattaccctccccatcacaatgcacttcccaaccgcagtttttatgtattggttaagttctaacctgttctccttagttcaggtgtcatgcttacggatacccgccgtgcggactgtactgaaaatcccacagagagtggtacatgatttggataagctgcctcctcgcgagggatttctggaatccttcaagaaaggctggaagaatgccgagatgacccggcagctacgggaaagagaacagagaatgcgaaatcagttagagctagctgcccgcggaccactgcgtcagaccttcacccacaatccactgttgcagcctgggaaggacaaccctccaaatataccctcctctagttcgaagcccaaaagcaaatacccctggcacgatacgcttggctag

SEQ ID NO: 152021 - DNA, 1260 bp, Artificial Sequence
  derived and/or modified sequence
atgcggggcacccaggtgcacagcgtggccggccccagccagtggcttggaaagcctcttactactaggttgttattccccgccgccccgtgttgctgccggcctcattatctcttcctggccgccagtggcccaagaagcctttctacctccgcaataagtttcgcagaggtgcaggtccaggcgccaccagtggtcgctgcaaccccttcccccacagctgttcctgaagtggcctctggagagacagccgacgttgtacaaactgcagcagagcagtctttcgccgagctgggtcttgggtcctatactccagttggactcattcagaatctgttggagttcatgcacgttgacctgggacttccatggtggggggccattgccgcatgcaccgtttttgccaggtgtctgatctttccactgatagtaacagggcagagggaagcagcccgaattcataaccaccttcctgagatccaaaagttttcttctaggattcgagaggcgaaacttgcaggggaccacatagaatactacaaggcttcaagcgagatggcgctatatcagaagaagcatggtatcaagctgtacaagcccctgatcttacctgtgactcaggccccaatctttatttccttttttattgctctgagggaaatggcaaatttgcccgtccccagcttgcaaacgggaggcctctggtggtttcaagacctgactgtcagcgatcctatttacatcctgcctctggctgttaccgctaccatgtgggccgtgctggagctgggcgcggaaaccggagtgcagtcctcggacttacaatggatgcggaatgtgatcagaatgatgcccctgattactctgcctattaccatgcactttcccacggccgtgtttatgtattggctgtccagcaatctttttagtttggtgcaggtttcctgtttgcggattccagcagtgcgcacagtcctcaagatcccgcagcgcgtcgttcatgacttggacaagctgcccccccgcgagggattcctggagagtttcaagaagggttggaagaatgctgagatgacccgacagcttcgtgagcgcgagcagagaatgaggaaccagcttgagttggctgcgagaggtcctctgagacagaccttcacgcacaaccctcttctccagccagggaaggacaaccccccgaacataccctcttccagttcaaagcccaaatccaagtatccgtggcacgataccctgggctag

SEQ ID NO: 152022 - DNA, 1728 bp, Artificial Sequence
  derived and/or modified sequence
atggtaacgtggctttacagatttttacccacttcaaatatggccgccaagctccgttctcttttaccgcctgatctgcggctacaattctggcttcatgcccgcctccaaaagtgcttcctctcgaggggttgtggttcttactgcgcaggcgcaaaagcaagtcctcttccgggcaaaatggcgatgggactaatgtgcggacgccgggagcttctgcgcttgctacagtccgggcgtcgggtccacagcgtcgcagggccctcgcaatggcttgggaaaccgctgaccacacggctcctattcccagcagccccgtgctgctgtcgcccacactacctcttccttgcggcttccggcccccgcagcctcagtacctctgctatctcttttgcagaagtccaggttcaggcccctcctgttgttgctgcaactccctcacccacagcagtacctgaggtggcttctggagagactgcagatgtagtccaaactgctgcagagcagagcttcgctgaactggggctggggtcatacaccccagtgggactgatccagaatttactggaatttatgcatgttgatctgggcctaccttggtggggggccattgctgcatgtacagtctttgcccgctgcctgatttttcctctcatcgtgacgggccagcgagaggcagccaggatccacaatcacttgccagagatccagaagttttccagtcgaatcagagaggccaagttagcaggagaccatattgagtattacaaggcttcctcggagatggcactttaccagaaaaaacatggtattaaactctataaacctctcattctccctgtgactcaggccccaatcttcatctccttcttcattgctttgagagagatggccaaccttcctgtgcccagcctgcagacaggtggcctctggtggttccaggatctcacggtatccgatcccatctacatattaccactggcagtcactgctacaatgtgggctgttcttgagctaggtgctgagacaggtgtgcaaagttctgaccttcagtggatgagaaatgtcatcagaatgatgcccctgataaccttgcccataaccatgcatttccccacggcagtgtttatgtactggctctcctccaatttgttttccctggtccaagtatcctgtctccggattccagcagtacgcactgtacttaaaatcccccagcgtgttgtacatgacctggacaaattacctccacgggaaggcttcctagagagcttcaaaaaaggctggaaaaatgctgaaatgacgcgtcagctgcgagagcgtgaacaacgcatgcggaatcagttggagctagcagccaggggtcctttacgacagacctttacccacaaccctctcctacaacctggaaaggataaccctcccaatatccctagcagcagcagcaaaccaaagtcaaagtatccctggcacgacacacttggctgacttatgttctgtgcgcattctggcaggaattctgtctcttcagagactcatcctcaaaacaagacttgacactgtgtccttgccccagtcctaggaactgtggcacacagagatgttcattttaaaaacggatttcatgaaacactcttgtacttatgtttataagagagcactgggtagccaagtgatcttcccattcacagagttagtaaacctctgtactacatgctgcttcctgat

SEQ ID NO: 152023 - DNA, 1750 bp, Artificial Sequence
  derived and/or modified sequence
gtgcggacgccgggagcttctgcgcttgctacagtccgggcgtcgggtaaggatgccccggggcagagcaccgggatgctgccctgacccagtgaaccaggccccaggacagctcgtgctaggggtatcagcagacgctgacctgctcaccgggacctgaatgtcatgacctcgggtcatgtgaggacgcgctagggttagtccccgacactatgggcccagcagcccggtgtcagcttctggaattggcttggctcctggcgagagcacctcggcctcgttctcagggccctccgatgtgggtctgcgataactgagatgcggggaacccaggtccacagcgtcgcagggccctcgcaatggcttgggaaaccgctgaccacacggctcctattcccagcagccccgtgctgctgtcgcccacactacctcttccttgcggcttccggcccccgcagcctcagtacctctgctatctcttttgcagaagtccaggttcaggcccctcctgttgttgctgcaactccctcacccacagcagtacctgaggtggcttctggagagactgcagatgtagtccaaactgctgcagagcagagcttcgctgaactggggctggggtcatacaccccagtgggactgatccagaatttactggaatttatgcatgttgatctgggcctaccttggtggggggccattgctgcatgtacagtctttgcccgctgcctgatttttcctctcatcgtgacgggccagcgagaggcagccaggatccacaatcacttgccagagatccagaagttttccagtcgaatcagagaggccaagttagcaggagaccatattgagtattacaaggcttcctcggagatggcactttaccagaaaaaacatggtattaaactctataaacctctcattctccctgtgactcaggccccaatcttcatctccttcttcattgctttgagagagatggccaaccttcctgtgcccagcctgcagacaggtggcctctggtggttccaggatctcacggtatccgatcccatctacatattaccactggcagtcactgctacaatgtgggctgttcttgagctaggtgctgagacaggtgtgcaaagttctgaccttcagtggatgagaaatgtcatcagaatgatgcccctgataaccttgcccataaccatgcatttccccacggcagtgtttatgtactggctctcctccaatttgttttccctggtccaagtatcctgtctccggattccagcagtacgcactgtacttaaaatcccccagcgtgttgtacatgacctggacaaattacctccacgggaaggcttcctagagagcttcaaaaaaggctggaaaaatgctgaaatgacgcgtcagctgcgagagcgtgaacaacgcatgcggaatcagttggagctagcagccaggggtcctttacgacagacctttacccacaaccctctcctacaacctggaaaggataaccctcccaatatccctagcagcagcagcaaaccaaagtcaaagtatccctggcacgacacacttggctgacttatgttctgtgcgcattctggcaggaattctgtctcttcagagactcatcctcaaaacaagacttgacactgtgtccttgccccagtcctaggaactgtggcacacagagatgttcattttaaaaacggatttcatgaaacactcttgtacttatgtttataagagagca

SEQ ID NO: 152024 - DNA, 1488 bp, Artificial Sequence
  derived and/or modified sequence
atggtaacctggttgtatagatttctgcctacgtctaatatggccgcaaaacttagatctctgttgcctccggacttgaggcttcagttttggctgcacgcccgactacagaaatgtttcctctctaggggatgcggtagttattgcgccggtgctaaggcgagccctctgccaggcaagatggcgatgggcctcatgtgtggcaggagagagcttctgagactgctacagagtgggcgtcgagtgcattccgtcgcgggaccctcccaatggttgggaaaacccctaacaactagactgctttttcctgctgccccatgctgttgccggccacactacctgttcctcgccgcttctggtcccaggagcctctctacctccgcaatatcttttgccgaggttcaggtacaggcccctcccgttgtggcagccacccccagtccaaccgctgttcctgaagtggcttccggagaaacggccgacgtggtccagaccgctgccgagcagtcctttgctgagctcggcctcggaagctacactcctgtaggtttgatccagaatctcctagagttcatgcatgttgatcttggcttaccgtggtggggagccatcgctgcgtgtaccgtgttcgcgaggtgcctaatcttccccctgatcgtcactggccagagggaggcggcacgcattcacaatcatctccccgagatacaaaagttcagctcacgcattcgggaagccaagctcgcaggcgatcacatcgaatactacaaggcaagctcagagatggccctgtaccagaaaaaacatggtattaaattatataagcccctgatcctgccagtcacccaggcgccaatttttatcagcttcttcattgcgcttcgagagatggccaacctccctgtgccgagcctgcagactgggggtctgtggtggtttcaggacctcacagtgtctgatccgatatatattctgccactggcagtgacagccacaatgtgggctgttttggaactcggcgcagaaactggcgtgcaatcttctgatcttcagtggatgcgaaacgttatcaggatgatgccgcttatcacattaccaatcacgatgcactttcccacggccgtgttcatgtactggctgtcatcaaatctgttcagtctggtgcaggtctcttgcctgagaattcctgccgtcaggacagtgcttaagatcccacaacgggtcgtgcacgacttagacaagttgccgccacgtgagggctttctggaaagcttcaagaagggatggaagaatgccgagatgaccagacagctcagggagagggaacagcggatgagaaatcagcttgagcttgcggctcgcggacctctgcgccagacatttacgcataatcctctgctccagccaggaaaggataatcctccaaacatacccagcagctcatcaaaaccaaaatctaagtacccatggcacgatacactcgggtag

SEQ ID NO: 152025 - DNA, 1260 bp, Artificial Sequence
  derived and/or modified sequence
atgcgcggtactcaggtgcattcggtggccggtccttcacagtggctcggcaagcccttgacgacaagactcttgtttcccgcagctccttgctgctgtcgaccacactacctgtttctggccgcttctgggcctagatcccttagtacaagcgccatctcattcgccgaagtgcaagtccaggctcctcctgttgtggcggctacccctagtcccactgctgtaccagaagtcgcgtcgggtgagaccgccgatgtggtgcagaccgcggctgaacaaagcttcgctgaactcggacttggaagctatactccagtgggcctaatacagaacctgctcgaattcatgcatgtggacctcggcctaccctggtggggggcaatagccgcatgcaccgtgtttgccagatgtttaatctttccccttatcgtgacaggacagagggaggccgcacgtatccataatcatttacctgaaatccagaagttctcttcacggatccgcgaggccaagttagccggagatcatatagagtactacaaagcttcttccgaaatggctctttaccagaagaagcacggaatcaagctgtacaaaccgctgatccttccggtaactcaggctccaatttttataagcttcttcatagcactacgagagatggctaacctgcccgtgccctctttacaaaccggcggtctgtggtggtttcaggatctgactgtaagcgacccaatttatattctgcccctcgcagtcactgccaccatgtgggccgtattagagctgggcgcagagaccggggtgcaatcttctgatctgcaatggatgaggaacgtcattcgcatgatgccccttatcacacttcccattactatgcatttccctacagcagtctttatgtattggctgtcatcaaatttgttcagccttgtgcaggtctcatgcctgcggatccctgccgtgaggaccgtgcttaaaatacctcaaagggtagtgcatgatctagacaagttgccaccacgagaaggattcctggaatccttcaagaagggatggaagaacgctgaaatgactaggcaattgcgggagagggagcagagaatgaggaatcagctggagctggcggcaagagggcctttgcgccagacgttcacacacaatcccctgctgcaacccggaaaggacaatcctcccaatattccatcctccagttcaaagcccaaatctaagtacccatggcacgacactctcggatag

SEQ ID NO: 152026 - DNA, 1488 bp, Artificial Sequence
  derived and/or modified sequence
atggtgacctggctgtacagattcctgcccaccagcaacatggccgccaagctgagaagcctgctgccccccgacctgagactgcagttctggctgcacgccagactgcagaagtgcttcctgagcagaggctgcggcagctactgcgccggcgccaaggccagccccctgcccggcaagatggccatgggcctgatgtgcggcagaagagagctgctgagactgctgcagagcggcagaagagtgcacagcgtggccggccccagccagtggctgggcaagcccctgaccaccagactgctgttccccgccgccccctgctgctgcagaccccactacctgttcctggccgccagcggccccagaagcctgagcaccagcgccatcagcttcgccgaggtgcaggtgcaggccccccccgtggtggccgccacccccagccccaccgccgtgcccgaggtggccagcggcgagaccgccgacgtggtgcagaccgccgccgagcagagcttcgccgagctgggcctgggcagctacacccccgtgggcctgatccagaacctgctggagttcatgcacgtggacctgggcctgccctggtggggcgccatcgccgcctgcaccgtgttcgccagatgcctgatcttccccctgatcgtgaccggccagagagaggccgccagaatccacaaccacctgcccgagatccagaagttcagcagcagaatcagagaggccaagctggccggcgaccacatcgagtactacaaggccagcagcgagatggccctgtaccagaagaagcacggcatcaagctgtacaagcccctgatcctgcccgtgacccaggcccccatcttcatcagcttcttcatcgccctgagagagatggccaacctgcccgtgcccagcctgcagaccggcggcctgtggtggttccaggacctgaccgtgagcgaccccatctacatcctgcccctggccgtgaccgccaccatgtgggccgtgctggagctgggcgccgagaccggcgtgcagagcagcgacctgcagtggatgagaaacgtgatcagaatgatgcccctgatcaccctgcccatcaccatgcacttccccaccgccgtgttcatgtactggctgagcagcaacctgttcagcctggtgcaggtgagctgcctgagaatccccgccgtgagaaccgtgctgaagatcccccagagagtggtgcacgacctggacaagctgccccccagagagggcttcctggagagcttcaagaagggctggaagaacgccgagatgaccagacagctgagagagagagagcagagaatgagaaaccagctggagctggccgccagaggccccctgagacagaccttcacccacaaccccctgctgcagcccggcaaggacaacccccccaacatccccagcagcagcagcaagcccaagagcaagtacccctggcacgacaccctgggctag

SEQ ID NO: 152027 - DNA, 1260 bp, Artificial Sequence
  derived and/or modified sequence
atgagaggcacccaggtgcacagcgtggccggccccagccagtggctgggcaagcccctgaccaccagactgctgttccccgccgccccctgctgctgcagaccccactacctgttcctggccgccagcggccccagaagcctgagcaccagcgccatcagcttcgccgaggtgcaggtgcaggccccccccgtggtggccgccacccccagccccaccgccgtgcccgaggtggccagcggcgagaccgccgacgtggtgcagaccgccgccgagcagagcttcgccgagctgggcctgggcagctacacccccgtgggcctgatccagaacctgctggagttcatgcacgtggacctgggcctgccctggtggggcgccatcgccgcctgcaccgtgttcgccagatgcctgatcttccccctgatcgtgaccggccagagagaggccgccagaatccacaaccacctgcccgagatccagaagttcagcagcagaatcagagaggccaagctggccggcgaccacatcgagtactacaaggccagcagcgagatggccctgtaccagaagaagcacggcatcaagctgtacaagcccctgatcctgcccgtgacccaggcccccatcttcatcagcttcttcatcgccctgagagagatggccaacctgcccgtgcccagcctgcagaccggcggcctgtggtggttccaggacctgaccgtgagcgaccccatctacatcctgcccctggccgtgaccgccaccatgtgggccgtgctggagctgggcgccgagaccggcgtgcagagcagcgacctgcagtggatgagaaacgtgatcagaatgatgcccctgatcaccctgcccatcaccatgcacttccccaccgccgtgttcatgtactggctgagcagcaacctgttcagcctggtgcaggtgagctgcctgagaatccccgccgtgagaaccgtgctgaagatcccccagagagtggtgcacgacctggacaagctgccccccagagagggcttcctggagagcttcaagaagggctggaagaacgccgagatgaccagacagctgagagagagagagcagagaatgagaaaccagctggagctggccgccagaggccccctgagacagaccttcacccacaaccccctgctgcagcccggcaaggacaacccccccaacatccccagcagcagcagcaagcccaagagcaagtacccctggcacgacaccctgggctag

SEQ ID NO: 152028 - protein, 366 aa, Artificial Sequence
  derived and/or modified sequence
MDTGVIEGGLNVTLTIRLLMHGKEVGSIIGKKGESVKKMREESGARINISEGNCPERIITLAGPTNAIFKAFAMIIDKLEEDISSSMTNSTAASRPPVTLRLVVPASQCGSLIGKGGCKIKEIRESTGAQVQVAGDMLPNSTERAITIAGIPQSIIECVKQICVVMLETLSQSPPKGVTIPYRPKPSSSPVIFAGGQDRYSTGSDSASFPHTTPSMCLNPDLEGPPLEAYTIQGQYAIPQPDLTKLHQLAMQQSHFPMTHGNTGFSGIESSSPEVKGYWAGLDASAQTTSHELTIPNDLIGCIIGRQGAKINEIRQMSGAQIKIANPVEGSTDRQVTITGSAASISLAQYLINVRLSSETGGMGSS

SEQ ID NO: 152029 - DNA, 1101 bp, Artificial Sequence
  derived and/or modified sequence
atggacactggggtaatcgaaggaggcctcaatgttacgcttacaattaggctgttgatgcatggcaaagaagtgggaagtatcatcggaaagaaaggagagagcgttaaaaagatgcgggaggaatctggcgcacgcataaacatctctgaggggaattgccccgagcggataataacactggctgggccgaccaacgccatcttcaaagcctttgccatgataatcgataagttggaggaggacatcagctcttctatgaccaacagcacagctgcttccaggcctcccgtgaccctcagacttgtggttcccgcttctcagtgcggctctctaattggcaaaggcggatgtaaaatcaaggaaattagagagtctacaggcgcacaggtccaagtcgcgggtgatatgctgccaaactctactgagcgggccatcacaattgctggcataccacaatccatcattgaatgcgttaaacaaatttgtgttgtgatgctggagacgctgtcccagtcccctcccaaaggagttaccatcccctaccgtccgaagccctcttcttctccagtgatcttcgctggggggcaagaccgctacagcaccgggtctgacagcgcctcattcccccatacaaccccatctatgtgtctgaatccagacctcgagggcccgcctctcgaagcgtacacaattcaaggccaatacgctattccgcagccagatctgaccaagctgcaccagctggcaatgcagcagtctcatttccctatgacccacgggaataccggcttttccggtatcgaatcttccagtccagaagtgaaagggtactgggccggcctcgacgcaagcgctcagaccacctcacacgaacttacaatacctaatgacctgatcggatgtattattggcagacaaggagccaaaataaacgagatcagacagatgagtggtgctcagattaagatcgccaatcccgtggagggctccaccgatcgccaggtgacaattactggaagcgccgccagcatctctttggctcagtatctgattaacgtgcgtttgtcttcagaaaccggcggcatgggctcttcctag

SEQ ID NO: 152030 - DNA, 1101 bp, Artificial Sequence
  derived and/or modified sequence
atggacacaggagtcatcgagggcggcctgaatgtgaccctgaccatccggctgctgatgcacggcaaggaggtgggcagcatcatcggcaagaagggggagagcgtgaagaagatgagggaggagagcggggcccgcatcaacatcagcgagggcaactgcccagagcgcatcatcaccctggccggccccaccaatgccatcttcaaggcctttgccatgatcatcgacaagctggaggaggacatcagcagctccatgaccaacagcacagctgccagccggccccctgtgaccctgcggctggtggtgcctgccagccagtgtggcagcctgattggaaaaggaggctgcaagatcaaggagatccgggagagcactggagcccaggtgcaggtggccggggacatgctgcccaacagcacagagcgggccatcaccatcgccggcatcccccagagcatcattgaatgtgtgaagcagatctgtgtggtgatgctggagaccctgagccagagcccccccaagggcgtgaccatcccctaccggcccaagcccagcagcagccctgtgatctttgctgggggccaggaccgctacagcacaggcagtgacagcgccagcttcccccacaccacccccagcatgtgcctgaacccagacctggagggcccccccctggaggcctacaccatccagggccagtatgccatcccccagcctgacctgaccaagctgcaccagctggccatgcagcagagccacttccccatgacccacggcaacacaggcttcagcggcatcgagagcagcagccctgaggtgaagggctactgggccggcctggatgccagcgcccagaccaccagccatgagctgaccatccccaatgacctgattggctgcatcatcggccggcagggcgccaagatcaatgagatccggcagatgtctggggcccagatcaagatcgccaaccctgtggagggcagcacagaccggcaggtgaccatcactggatctgctgccagcatcagcctggcccagtacctgatcaacgtgcggctgagcagcgagaccggcggcatgggcagcagctag

SEQ ID NO: 152031 - DNA, 1101 bp, Artificial Sequence
  derived and/or modified sequence
atggacaccggcgtgatcgagggcggcctgaacgtgaccctgaccatccggctcctcatgcacggcaaggaggttggctctattataggcaaaaagggggaatcagtgaaaaagatgcgagaggagtcgggagctaggatcaacatcagcgagggcaattgcccagaaaggatcatcacattagccggtccaaccaatgcaatcttcaaggctttcgctatgatcattgacaagctagaggaagacatctcttcctccatgacaaacagtaccgctgcatctcgcccccccgtgaccttgcgcctagtcgtgcccgcttcccagtgcggaagccttatcggcaaggggggctgtaaaatcaaagaaattcgtgagagcaccggtgcgcaggtccaggttgccggcgatatgctgccgaactccactgagagagcaattaccatcgccggtatcccccagtccattatcgagtgcgtaaaacaaatctgtgtggtgatgcttgaaacattgtcccagtccccaccaaaaggtgtcacgatcccctacagacccaaaccatcatctagcccagttatcttcgcaggggggcaggacagatatagcacaggatcagactcagcgagcttcccacacaccaccccttctatgtgtctgaaccctgatttggagggtcccccgctggaggcatacaccatccagggacagtacgcaattcctcaaccagacctcaccaagcttcaccagctggccatgcagcagtcccatttccccatgactcacggcaacacaggattctccggcattgaatcatcctcacccgaagtgaaaggctattgggcagggttggacgcttctgcgcagacaaccagccacgagctaacaatacccaatgacctcatcggctgtatcatcgggcgacagggcgccaagatcaacgaaatccgccagatgagtggggctcagattaaaatcgctaaccccgttgagggaagcactgatcgtcaggtaacaataactggctccgccgctagtatctctctcgcacagtatctgatcaacgtgaggttatcttctgagactggcggcatgggatcctcctag

SEQ ID NO: 152032 - DNA, 1814 bp, Artificial Sequence
  derived and/or modified sequence
gcagccgcagcctgcgccctctcccgcccgcccgccctccgcccgcccgcccgccctccgccgccctccacccgccccggggtctctttcccccttcctcctcctcctcctccacccccccttcctcctccgcccgcccgcggggcccccctcgccttcccgcccgcccctattgttccgcccccggcctcccgcccttccccttcccgcccgctccccttttcccctcagtcgcctcgcgcctgcagtttttggctttcacccccaaccagtgaccaaagacttgaccactcaaagtccagctccccagaacactgctcgacatggacaccggtgtgattgaaggtggattaaatgtcactctcaccatccggctacttatgcatggaaaggaagttggcagtatcatcggaaagaaaggagaatcagttaagaagatgcgcgaggagagtggtgcacgtatcaacatctcagaagggaattgtcctgagagaattatcactttggctggacccactaatgccatcttcaaagcctttgctatgatcattgacaaactggaagaggacataagcagctctatgaccaatagcacagctgccagtagacccccggtcaccctgaggctggtggtccctgctagtcagtgtggctctctcattggaaaaggtggatgcaagatcaaggaaatacgagagagtacaggggctcaggtccaggtggcaggggatatgctacccaactcaactgagcgggccatcactattgctggcattccacaatccatcattgagtgtgtcaaacagatctgcgtggtcatgttggagactctctcccagtcccccccgaagggcgtgaccatcccgtaccggcccaagccgtccagctctccggtcatctttgcaggtggtcaggacaggtacagcacaggcagcgacagtgcgagctttccccacaccaccccgtccatgtgcctcaaccctgacctggagggaccacctctagaggcctataccattcaaggacagtatgccattccacagccagatttgaccaagctgcaccagttggcaatgcaacagtctcattttcccatgacgcatggcaacaccggattcagtggcattgaatccagctctccagaggtgaaaggctattgggcaggtttggatgcatctgctcagactacttctcatgaactcaccattccaaacgatttgattggctgcataatcgggcgtcaaggcgccaaaatcaatgagatccgtcagatgtctggggcgcagatcaaaattgcgaacccagtggaaggatctactgataggcaggttaccatcactggatctgctgccagcattagcctggctcaatatctaatcaatgtcaggctttcctcggagacgggtggcatggggagcagctagaacaatgcagattcatccataatccctttctgctgttcaccaccacccatgatccatctgtgtagtttctgaacagtcagcgattccaggttttaaatagtttgtaaattttcagtttctacacactttatcatccactcgtgattttttaattaaagcgttttaattcctttctctgttcagctgttgatgctgagatccatatttagttttataagcttctccctggttttttttttttggctcatgaatttttctgtttgtcatggaaatgtaagagtggaatattaatacatttcagtttagttctgtaatgtcaggaatttttcaaaaaaattaaaagatggactggagctttttctttgtgaatagaaactggatgccacagtg

SEQ ID NO: 152033 - DNA, 1101 bp, Artificial Sequence
  derived and/or modified sequence
atggacactggtgttattgaggggggactcaatgtcacgctgacgatccgacttctgatgcacggtaaagaggtaggaagcatcattggcaagaagggcgagtcagtgaaaaagatgagagaagagtccggtgcgcgtatcaacatcagtgagggtaactgtcccgaaagaataatcaccttagcagggccaaccaatgcaatttttaaggcattcgccatgataattgataagctggaggaggatattagttcttccatgacgaactccactgctgcatctcgcccacctgtcacactcagactggttgtgccagcctcccagtgtggcagtctcatcgggaaaggcggatgcaaaatcaaagagattagggagagcactggagcacaggtgcaggtggccggtgacatgctcccgaatagcaccgaacgcgcaatcactatcgcaggtattccccaatccattatcgaatgtgttaagcaaatttgtgtagttatgctcgagactctcagccaatccccccctaagggagtgacaattccatatcgccctaagccatccagcagtcctgtcatcttcgctggaggacaggaccgctacagtacagggtcagactctgccagcttcccccatactaccccctctatgtgcctgaatcccgacctggaggggcctcccctagaagcttacaccatccaggggcagtacgcgattcctcagccggacttaacaaaacttcatcaactggcgatgcagcagagccattttcccatgacacatggtaacaccggcttcagtgggatcgagtcatctagtcctgaggttaagggatactgggcaggcctcgacgcatctgcccagaccacaagccacgagctgactattccaaacgacctgatcgggtgtatcattggacggcagggtgccaaaataaacgaaataaggcaaatgtccggcgctcaaattaagatagccaaccccgtcgagggatccacagaccgccaagtgacaatcaccgggtctgctgcgagcatttctctggcccagtacttgataaatgtgagactcagctctgagacagggggtatggggtcatcttag

SEQ ID NO: 152034 - DNA, 1101 bp, Artificial Sequence
  derived and/or modified sequence
atggacaccggcgtgatcgagggcggcctgaacgtgaccctgaccatcagactgctgatgcacggcaaggaggtgggcagcatcatcggcaagaagggcgagagcgtgaagaagatgagagaggagagcggcgccagaatcaacatcagcgagggcaactgccccgagagaatcatcaccctggccggccccaccaacgccatcttcaaggccttcgccatgatcatcgacaagctggaggaggacatcagcagcagcatgaccaacagcaccgccgccagcagaccccccgtgaccctgagactggtggtgcccgccagccagtgcggcagcctgatcggcaagggcggctgcaagatcaaggagatcagagagagcaccggcgcccaggtgcaggtggccggcgacatgctgcccaacagcaccgagagagccatcaccatcgccggcatcccccagagcatcatcgagtgcgtgaagcagatctgcgtggtgatgctggagaccctgagccagagcccccccaagggcgtgaccatcccctacagacccaagcccagcagcagccccgtgatcttcgccggcggccaggacagatacagcaccggcagcgacagcgccagcttcccccacaccacccccagcatgtgcctgaaccccgacctggagggcccccccctggaggcctacaccatccagggccagtacgccatcccccagcccgacctgaccaagctgcaccagctggccatgcagcagagccacttccccatgacccacggcaacaccggcttcagcggcatcgagagcagcagccccgaggtgaagggctactgggccggcctggacgccagcgcccagaccaccagccacgagctgaccatccccaacgacctgatcggctgcatcatcggcagacagggcgccaagatcaacgagatcagacagatgagcggcgcccagatcaagatcgccaaccccgtggagggcagcaccgacagacaggtgaccatcaccggcagcgccgccagcatcagcctggcccagtacctgatcaacgtgagactgagcagcgagaccggcggcatgggcagcagctag

SEQ ID NO: 152035 - protein, 367 aa, Artificial Sequence
  derived and/or modified sequence
MDAQCSAKVNARKRRKEAPGPNGATEEDGVPSKVQRCAVGLRQPAPFSDEIEVDFSKPYVRVTMEEASRGTPCERPVRVYADGIFDLFHSGHARALMQAKNLFPNTYLIVGVCSDELTHNFKGFTVMNENERYDAVQHCRYVDEVVRNAPWTLTPEFLAEHRIDFVAHDDIPYSSAGSDDVYKHIKEAGMFAPTQRTEGISTSDIITRIVRDYDVYARRNLQRGYTAKELNVSFINEKKYHLQERVDKVKKKVKDVEEKSKEFVQKVEEKSIDLIQKWEEKSREFIGSFLEMFGPEGALKHMLKEGKGRMLQAISPKQSPSSSPTRERSPSPSFRWPFSGKTSPPCSPANLSRHKAAAYDISEDEED

SEQ ID NO: 152036 - protein, 293 aa, Artificial Sequence
  derived and/or modified sequence
MDAQCSAKVNARKRRKEAPGPNGATEEDGVPSKVQRCAVGLRQPAPFSDEIEVDFSKPYVRVTMEEASRGTPCERPVRVYADGIFDLFHSGHARALMQAKNLFPNTYLIVGVCSDELTHNFKGFTVMNENERYDAVQHCRYVDEVVRNAPWTLTPEFLAEHRIDFVAHDDIPYSSAGSDDVYKHIKEAGMFAPTQRTEGISTSDIITRIVRDYDVYARRNLQRGYTAKELNVSFINEKKYHLQERVDKVKKKVKDVEEKSKEFVQKVEEKSIDLIQKWEEKSREFIGSFLEMF

SEQ ID NO: 152037 - protein, 133 aa, Artificial Sequence
  derived and/or modified sequence
MDAQCSAKVNARKRRKEAPGPNGATEEDGVPSKVQRCAVGLRQPAPFSDEIEVDFSKPYVRVTMEEASRGTPCERPVRVYADGIFDLFHSGHARALMQAKNLFPNTYLIVGVCSDELTHNFKGFTVMNENERY

SEQ ID NO: 152038 - protein, 328 aa, Artificial Sequence
  derived and/or modified sequence
MDAQCSAKVNARKRRKEAPGPNGATEEASRGTPCERPVRVYADGIFDLFHSGHARALMQAKNLFPNTYLIVGVCSDELTHNFKGFTVMNENERYDAVQHCRYVDEVVRNAPWTLTPEFLAEHRIDFVAHDDIPYSSAGSDDVYKHIKEAGMFAPTQRTEGISTSDIITRIVRDYDVYARRNLQRGYTAKELNVSFINEKKYHLQERVDKVKKKVKDVEEKSKEFVQKVEEKSIDLIQKWEEKSREFIGSFLEMFGPEGALKHMLKEGKGRMLQAISPKQSPSSSPTRERSPSPSFRWPFSGKTSPPCSPANLSRHKAAAYDISEDEED

SEQ ID NO: 152039 - protein, 115 aa, Artificial Sequence
  derived and/or modified sequence
MDAQCSAKVNARKRRKEAPGPNGATEEDGVPSKVQRCAVGLRQPAPFSDEIEVDFSKPYVRVTMEEASRGTPCERPVRVYADGIFDLFHSGHARALMQAKNLFPNTYLIVGVCSD

SEQ ID NO: 152040 - DNA, 1104 bp, Artificial Sequence
  derived and/or modified sequence
atggatgcccagtgttccgcaaaggttaatgcccgcaagcgcaggaaggaagcccctggtcctaatggtgcaaccgaggaagacggtgtgcccagcaaggtgcagagatgcgcagtgggactgcgccagcccgccccctttagcgatgagatagaggtggatttctctaaaccatatgtcagagtaacaatggaagaggcctcccgcggtaccccctgcgaacgaccggtccgcgtgtacgctgacggaatatttgacctctttcatagcggacacgccagagccctgatgcaggccaaaaacctgtttccaaatacctacctgatcgtaggtgtatgcagcgatgaactgacacacaatttcaaaggcttcactgtgatgaatgaaaacgagaggtacgacgcagtgcagcactgtcggtatgtcgacgaggtcgttagaaatgccccatggactctcacccccgaatttctggctgagcacaggatcgacttcgtcgcgcacgacgacattccttacagctctgctgggtcggatgacgtgtataagcacataaaggaggcgggaatgtttgccccaactcaaagaacggaggggatttctactagtgatattatcacccggatcgtaagagactacgatgtgtatgcccgcaggaatttgcagcgcgggtacaccgccaaggagctaaacgtaagctttattaacgagaaaaagtatcatcttcaggaacgcgtagacaaagtgaagaaaaaagtcaaggatgtcgaagagaagagtaaggagttcgtgcagaaagtggaggagaagagcattgacctgatccagaaatgggaggaaaaatctagagagttcattggaagttttctagaaatgtttgggccggagggcgccctgaagcacatgttgaaggagggtaaaggaaggatgctgcaagctatctcacctaaacagtcaccttcttcctcgccaacccgggagagatctccaagcccttcattccgatggccgttctccggcaaaacctctccgccttgtagtcccgcaaaccttagccgccataaggcggcagcctatgatatctctgaagacgaggaggactag

SEQ ID NO: 152041 - DNA, 882 bp, Artificial Sequence
  derived and/or modified sequence
atggatgcccaatgttcagccaaggtgaacgccagaaagagacgcaaggaggcccctgggccgaatggagctactgaagaggacggtgtaccttcaaaggtacaaagatgcgccgtgggtttacgccagcccgctccgttttctgacgagattgaggtggacttttccaagccctatgtccgcgttacgatggaggaggcctcacggggtactccctgcgagcggccagtccgggtgtacgctgatggcatcttcgatcttttccactcaggccacgccagagccttgatgcaggcaaagaacttgtttccaaatacctacttgatcgtgggtgtgtgtagtgacgagctcacacataacttcaaaggctttaccgtgatgaacgagaatgagcgctacgacgctgtgcaacactgtaggtacgtggacgaggttgtgcgcaatgccccctggaccctaacgcccgagttcctcgcggaacaccgcatagacttcgtggcccacgacgacattccttattcctcagccggaagtgatgacgtctataaacacatcaaagaagcagggatgttcgcacccacacaacggactgagggaatcagcacttcagacataattacccgcattgtgagagactacgacgtgtacgccaggcgcaatttacagcggggatacacagcaaaagagttgaatgtttctttcatcaacgagaagaaatatcacctgcaagaaagggtcgataaggtaaagaaaaaagtgaaagacgtggaggagaagtcgaaggagtttgtgcagaaagtagaggaaaagtctattgacttaatacagaagtgggaagaaaaaagtcgcgagtttattgggtcattcctggagatgttctag

SEQ ID NO: 152042 - DNA, 402 bp, Artificial Sequence
  derived and/or modified sequence
atggacgcccagtgttcagcgaaggtcaacgctagaaagcggcgtaaagaagcccctggcccaaacggcgcaacagaggaggatggcgtcccatctaaagtgcagagatgcgcagtgggactgagacagccggctcctttcagcgacgagattgaagtcgactttagcaagccatatgtgagagtcacgatggaggaggccagcagggggacaccgtgcgagcgccctgtccgggtgtacgccgatggaatctttgatcttttccacagcgggcacgctcgcgctttaatgcaagccaaaaacctgttccctaacacatatttgatcgtgggagtgtgttccgacgagctgacccacaattttaagggcttcaccgtgatgaatgaaaatgagcgttactag

SEQ ID NO: 152043 - DNA, 987 bp, Artificial Sequence
  derived and/or modified sequence
atggatgctcagtgctctgccaaagtaaatgctcgtaaaagacggaaggaagcaccagggcccaacggcgctactgaggaagctagccgaggcacaccatgtgagaggccagtgcgggtctacgcagatgggattttcgatctgttccatagtggacatgcaagagccctcatgcaagccaagaacctcttcccaaatacctatttgattgtgggcgtgtgcagcgatgagcttacacataacttcaaaggatttacagtgatgaacgaaaacgagagatacgatgcggtacagcactgccgctatgttgatgaggtcgtgcgcaacgctccatggacgctcacccctgagtttctggcagaacacagaatagacttcgtagcacacgacgacattccatactcgtccgcgggttccgatgatgtctacaagcacatcaaagaggctggaatgttcgcgcccactcaacgaacagagggcatcagcacttctgacatcataaccagaattgtgagggactacgacgtgtacgcaagacgcaacctccagcgcgggtataccgccaaggagttgaatgtgagctttatcaacgagaaaaagtatcatttacaggagagggtcgacaaggtaaagaagaaggtgaaagacgttgaggaaaagtctaaagaatttgtgcagaaagtggaggaaaagagtattgatttaattcaaaagtgggaggagaaatccagagaattcatcggaagcttcttggagatgttcggccctgaaggagccctgaagcacatgctaaaggaagggaagggaaggatgttgcaggcaatttccccaaaacagtctcctagttcgagcccaactagggagcgctccccttcaccatcctttcgatggcccttctctgggaagacctcccctccttgttcacccgccaacctatctcgccacaaggccgccgcatacgacatctccgaggacgaagaagattag

SEQ ID NO: 152044 - DNA, 1104 bp, Artificial Sequence
  derived and/or modified sequence
atggacgcccagtgctccgccaaggtaaatgcacgaaaacggagaaaagaagccccaggcccgaacggcgctaccgaagaagatggtgttccttctaaagtgcagaggtgcgcagtggggctcaggcagcccgcccctttctccgacgagattgaggttgacttcagtaaaccctacgttcgggtgaccatggaagaagccagccgcggaaccccgtgcgaaagaccggtgcgcgtgtacgcagatggaatcttcgacctgtttcactctggccatgccagagcattgatgcaagctaaaaacctgttcccgaacacctacctaatcgtcggagtgtgtagcgacgaactgactcacaacttcaaaggattcactgtgatgaacgagaatgaaagatacgatgcagtgcagcactgtcggtacgttgatgaggtcgtgagaaacgccccttggactctaacgccagaatttctggccgagcaccggatcgattttgtcgctcacgatgacattccatacagctccgccggctctgacgacgtgtacaaacacataaaagaggcaggaatgttcgcacccacacaacgaaccgagggcatctccacaagcgacataatcacccggatcgtccgtgattacgatgtatatgctagaagaaacctacagcggggctacaccgcgaaggagctgaacgtgagctttatcaacgagaagaagtaccacctgcaggagcgggtggacaaagtgaaaaagaaggtgaaggacgtggaggagaagtcgaaggagtttgtacagaaggtcgaagaaaaatcaatcgatctgatccagaagtgggaggagaagagccgtgagttcataggttctttcctggagatgttcgggcccgaaggagccctcaagcacatgcttaaggagggcaaaggtagaatgctccaggcaattagtccgaaacaatcaccgtcctcctctccaactcgggaaaggtctccaagtccgagttttcggtggcccttctctggcaagacttcgcctccatgctctccggcaaacctgagccgtcacaaggcggccgcttacgatatctctgaagatgaggaggactag

SEQ ID NO: 152045 - DNA, 348 bp, Artificial Sequence
  derived and/or modified sequence
atggatgctcagtgctcagcaaaggtgaatgctagaaaacgtaggaaggaagcaccggggcctaacggcgctactgaagaagatggcgtgccgtctaaggtccagcgttgcgccgttggactgagacagccagctcctttcagcgatgagatcgaggttgatttcagcaagccctatgtacgagtcactatggaggaggcttctcgaggcaccccctgtgaaagaccagtgcgagtgtatgccgatggaatctttgatttgtttcacagtgggcatgcaagagccctgatgcaggccaaaaatctgtttcctaatacgtacctgattgtgggggtatgtagtgactag

SEQ ID NO: 152046 - DNA, 1104 bp, Artificial Sequence
  derived and/or modified sequence
atggatgcccagtgcagcgccaaggtgaatgccaggaagaggaggaaggaggcccctggccccaacggggccacagaagaagatggagtgcccagcaaggtgcagagatgtgctgtgggcctgcggcagcctgcccccttcagtgatgaaattgaggtggacttcagcaagccctacgtgcgggtgaccatggaggaggccagccggggcaccccctgtgagaggcctgtgcgggtgtatgcagatggcatctttgacctcttccacagcggccacgcccgggccctgatgcaggccaagaacctcttccccaacacctacctgattgtgggcgtgtgcagtgatgagctgacccacaacttcaagggcttcaccgtgatgaatgaaaatgaaagatatgatgctgtgcagcactgccgctacgtggatgaggtggtgagaaatgccccctggaccctgaccccagagttcctggccgagcacagaattgactttgtggcccatgatgacatcccctacagcagcgctggcagtgatgatgtgtacaagcacatcaaggaggccggcatgtttgcccccacccagaggacagagggcatcagcaccagtgacatcatcaccagaattgtgcgggactatgatgtgtatgcccggaggaacctgcagaggggctacacagccaaggagctgaatgtgtccttcatcaatgagaagaagtaccacctgcaggagcgggtggacaaggtgaagaagaaggtgaaggatgtggaggagaagagcaaggagtttgtgcagaaggtggaggagaagagcattgacctgatccagaagtgggaggagaagagccgggagttcatcggcagcttcctggagatgtttggacctgagggcgccctgaagcacatgctgaaggagggcaaaggaaggatgctgcaggccatcagccccaagcagagccccagcagcagccccacccgggagaggagccccagccccagcttccgctggcccttcagcggcaagaccagccccccctgcagccctgccaacctgagccgccacaaggctgctgcctatgacatcagtgaagatgaggaggactag

SEQ ID NO: 152047 - DNA, 882 bp, Artificial Sequence
  derived and/or modified sequence
atggatgcccagtgcagcgccaaggtgaatgccaggaagaggaggaaggaggcccctggccccaacggggccacagaagaagatggagtgcccagcaaggtgcagagatgtgctgtgggcctgcggcagcctgcccccttcagtgatgaaattgaggtggacttcagcaagccctacgtgcgggtgaccatggaggaggccagccggggcaccccctgtgagaggcctgtgcgggtgtatgcagatggcatctttgacctcttccacagcggccacgcccgggccctgatgcaggccaagaacctcttccccaacacctacctgattgtgggcgtgtgcagtgatgagctgacccacaacttcaagggcttcaccgtgatgaatgaaaatgaaagatatgatgctgtgcagcactgccgctacgtggatgaggtggtgagaaatgccccctggaccctgaccccagagttcctggccgagcacagaattgactttgtggcccatgatgacatcccctacagcagcgctggcagtgatgatgtgtacaagcacatcaaggaggccggcatgtttgcccccacccagaggacagagggcatcagcaccagtgacatcatcaccagaattgtgcgggactatgatgtgtatgcccggaggaacctgcagaggggctacacagccaaggagctgaatgtgtccttcatcaatgagaagaagtaccacctgcaggagcgggtggacaaggtgaagaagaaggtgaaggatgtggaggagaagagcaaggagtttgtgcagaaggtggaggagaagagcattgacctgatccagaagtgggaggagaagagccgggagttcatcggcagcttcctggagatgttttag

SEQ ID NO: 152048 - DNA, 402 bp, Artificial Sequence
  derived and/or modified sequence
atggatgcccagtgcagcgccaaggtgaatgccaggaagaggaggaaggaggcccctggccccaacggggccacagaagaagatggagtgcccagcaaggtgcagagatgtgctgtgggcctgcggcagcctgcccccttcagtgatgaaattgaggtggacttcagcaagccctacgtgcgggtgaccatggaggaggccagccggggcaccccctgtgagaggcctgtgcgggtgtatgcagatggcatctttgacctcttccacagcggccacgcccgggccctgatgcaggccaagaacctcttccccaacacctacctgattgtgggcgtgtgcagtgatgagctgacccacaacttcaagggcttcaccgtgatgaatgaaaatgaaagatactag

SEQ ID NO: 152049 - DNA, 987 bp, Artificial Sequence
  derived and/or modified sequence
atggatgcccagtgcagcgccaaggtgaatgccaggaagaggaggaaggaggcccctggccccaacggggccacagaggaggccagccggggcaccccctgtgagaggcctgtgcgggtgtatgcagatggcatctttgacctcttccacagcggccacgcccgggccctgatgcaggccaagaacctcttccccaacacctacctgattgtgggcgtgtgcagtgatgagctgacccacaacttcaagggcttcaccgtgatgaatgaaaatgaaagatatgatgctgtgcagcactgccgctacgtggatgaggtggtgagaaatgccccctggaccctgaccccagagttcctggccgagcacagaattgactttgtggcccatgatgacatcccctacagcagcgctggcagtgatgatgtgtacaagcacatcaaggaggccggcatgtttgcccccacccagaggacagagggcatcagcaccagtgacatcatcacccgcatcgtgcgggactatgatgtgtatgcccggaggaacctgcagaggggctacacagccaaggagctgaatgtgtccttcatcaatgagaagaagtaccacctgcaggagcgggtggacaaggtgaagaagaaggtgaaggatgtggaggagaagagcaaggagtttgtgcagaaggtggaggagaagagcattgacctgatccagaagtgggaggagaagagccgggagttcatcggcagcttcctggagatgtttggacctgagggcgccctgaagcacatgctgaaggagggcaagggccgcatgctgcaggccatcagccccaagcagagccccagcagcagccccacccgggagaggagccccagccccagcttccgctggcccttcagcggcaagaccagccccccctgcagccctgccaacctgagccgccacaaggccgccgcctatgacatcagtgaagatgaagaagattag

SEQ ID NO: 152050 - DNA, 348 bp, Artificial Sequence
  derived and/or modified sequence
atggatgcccagtgcagcgccaaggtgaatgccaggaagaggaggaaggaggcccctggccccaacggggccacagaagaagatggagtgcccagcaaggtgcagagatgtgctgtgggcctgcggcagcctgcccccttcagtgatgaaattgaggtggacttcagcaagccctacgtgcgggtgaccatggaggaggccagccggggcaccccctgtgagaggcctgtgcgggtgtatgcagatggcatctttgacctcttccacagcggccacgcccgggccctgatgcaggccaagaacctcttccccaacacctacctgattgtgggcgtgtgcagcgactag

SEQ ID NO: 152051 - DNA, 1104 bp, Artificial Sequence
  derived and/or modified sequence
atggacgcccagtgcagcgccaaggtgaacgcccggaagcggcggaaggaagctcccggccccaacggagccactgaagaagatggcgtccccagcaaagttcagcgctgcgccgtgggtcttcggcagccagcgcccttttccgacgaaatcgaagtcgactttagtaagccttatgttcgggttacaatggaagaggcatcccgcggtacaccttgcgagagacccgtgcgtgtttatgccgacggcatttttgacctctttcactccggtcacgcacgagctctgatgcaagcaaagaatctttttccaaacacttacctgatcgtgggggtgtgttccgacgagttgactcacaatttcaaaggttttaccgtgatgaacgaaaacgagcggtatgacgccgttcagcattgtcgctacgttgacgaggtggtccggaatgctccatggaccctcacacccgagtttctggccgagcaccgcattgattttgtcgctcatgacgatatcccatattctagtgccggatctgacgatgtgtacaagcacatcaaagaagctgggatgttcgcccctacgcaacgcactgaggggatctcaaccagcgacattattaccagaatcgttcgggactacgatgtctacgccagacgaaacctgcaaagagggtacacagctaaagaactgaacgtgtcattcatcaacgaaaagaagtatcacctccaggaaagagtcgacaaagtgaaaaaaaaggtgaaggatgtggaggagaagtctaaggagtttgtgcagaaggtggaagagaaatccatcgatctcattcagaagtgggaagagaaaagcagagagtttatcgggagcttcctggagatgttcggcccagagggggctctgaaacatatgttgaaagagggaaaggggcggatgctgcaggccatttcccctaaacagagcccatcctcttctccaaccagagagaggtctcctagcccttcattccgctggcctttttccggaaagacctctcccccatgctcacctgctaatctcagtcggcacaaggcggcggcttacgatatttccgaggacgaggaggattag

SEQ ID NO: 152052 - DNA, 882 bp, Artificial Sequence
  derived and/or modified sequence
atggacgcccagtgcagcgccaaggtgaacgcccggaagcggcggaaggaagcccctggcccgaacggcgcaacagaggaagatggcgtgccatccaaagttcaaagatgcgccgtgggattgcgtcaacccgcgccattttctgatgagatcgaggttgatttcagcaaaccatacgtccgagttactatggaggaggcctcccgaggcaccccatgtgagcgccccgtgcgcgtctacgccgatgggatttttgacctgtttcactccggtcatgcccgtgcgctaatgcaagctaaaaacctctttcctaacacatacctaatagtaggggtatgcagcgatgagctcacccacaacttcaaaggtttcaccgtgatgaacgaaaacgagcggtatgacgctgtgcaacattgccggtatgtagacgaggtagtcaggaatgccccatggacactcactcctgagttcctggccgaacacagaattgactttgtggcccatgacgatattccctactcgtctgctgggtctgacgatgtctacaagcacatcaaggaagcgggtatgttcgccccgacccagcggactgagggtatcagcacatcagatatcatcactcggatagtgcgggactacgacgtctatgcacgtaggaacctgcagcgcgggtacaccgccaaggagcttaatgtgtcctttatcaatgagaaaaaataccacctgcaagagagagtggataaggtcaagaagaaggttaaagatgtggaggagaagtctaaagaattcgtccagaaggtggaagaaaagtccattgatctgatccagaagtgggaggaaaagtccagggaattcataggctccttcctggagatgttttag

SEQ ID NO: 152053 - DNA, 402 bp, Artificial Sequence
  derived and/or modified sequence
atggacgcccagtgcagcgccaaggtgaacgcccggaagcggcggaaagaggcccccggcccaaatggggctactgaggaggatggagtgccctctaaagtgcaacgatgcgccgtagggctaaggcagccggctcctttcagcgacgagatcgaggtcgatttctcaaaaccttacgttcgtgtaaccatggaagaggccagtagggggaccccctgtgaacggcccgtgcgggtgtatgccgacggtatttttgacctgttccattctggtcacgctcgagctctcatgcaggctaaaaatctttttccgaacacctatctgattgtcggagtgtgcagtgacgagctgacccacaattttaaagggtttacagtcatgaacgaaaacgaaaggtattag

SEQ ID NO: 152054 - DNA, 987 bp, Artificial Sequence
  derived and/or modified sequence
atggacgcccagtgcagcgccaaggtgaacgcccggaagcggcggaaagaagcgcccggccctaatggagccaccgaggaggcttccagaggaaccccttgcgagagacctgtcagagtgtacgccgacggcatcttcgacctgtttcactccggccatgcccgagccctgatgcaggctaaaaatctgttcccaaacacctatctaatcgtcggggtgtgttccgacgagctgacccacaattttaaaggatttacggtcatgaacgagaacgagcggtacgatgccgtgcaacactgcaggtacgtggatgaggtcgtacggaacgctccatggactttaaccccggagtttcttgcggagcatagaattgacttcgtggctcatgacgatattccatattcaagtgcaggcagtgacgacgtctacaagcatattaaagaagccggtatgttcgcccctacccagcgaactgaaggcatcagtacttctgatatcattacgaggatagtcagagactatgacgtttacgcacgaagaaacctccagcggggatacacggcaaaggagcttaatgtctctttcatcaatgagaagaagtaccatcttcaggagagagtagataaggtgaagaagaaagtcaaggacgtggaggagaagagtaaagagttcgttcaaaaggtagaagagaaatctattgacctcatacagaagtgggaagaaaaaagccgcgagttcattggctccttcctcgaaatgttcggccccgagggtgcgctgaagcacatgcttaaggagggtaagggccgcatgttgcaggctattagcccaaaacagagcccctcctcctcaccgacacgcgagagatctccaagcccatcattccgctggcccttttccggcaaaacgagccctccctgctctcccgcgaaccttagtagacataaagcagccgcctacgacataagcgaagatgaagaagactag

SEQ ID NO: 152055 - DNA, 1104 bp, Artificial Sequence
  derived and/or modified sequence
atggacgcccagtgcagcgccaaggtgaacgcccggaagcggcggaaagaggctccagggccaaatggcgcaactgaggaagacggtgtaccttccaaggtacagaggtgcgccgttgggttacggcagcctgctccattctctgatgaaatcgaagtggacttctcaaagccgtacgtgcgggtgaccatggaagaggccagccgggggaccccgtgcgaaagacccgtgagggtgtacgccgatggcatcttcgacttattccactctggtcacgccagagctttgatgcaggcaaaaaatttgtttcctaacacctatctcatcgtcggcgtctgttcggatgaactgacccataacttcaaggggttcaccgtgatgaacgaaaatgagcgatacgacgcagtgcagcattgtcgctacgtggatgaggtggtacgaaacgccccctggactcttacgcctgaatttctggctgaacacaggattgactttgtagcacatgacgatattccatactccagtgcaggtagcgacgacgtttacaagcatatcaaggaagccggaatgttcgctcccacacagagaactgaaggaatctctacaagcgacatcatcactcgtattgtgagagactacgacgtatatgcaaggagaaatttgcagcgaggatatactgccaaagagctaaacgtgagcttcattaacgagaagaagtatcatcttcaagaacgcgtggacaaggtgaagaaaaaagtgaaagatgtagaagagaagagcaaggaattcgtgcaaaaggtggaagagaagtctattgatctgatacagaagtgggaggagaagagccgggaattcatcggtagttttttggagatgtttggccctgaaggggccctcaagcacatgctgaaagagggcaaagggcgaatgttacaagctatcagcccgaagcagagccccagtagttccccaactcgagaacggtctccgtcccccagcttcaggtggcctttttccgggaagacatcacccccgtgcagccccgccaatctgtctcgccataaggccgccgcctacgacatctccgaggacgaagaagattag

SEQ ID NO: 152056 - DNA, 348 bp, Artificial Sequence
  derived and/or modified sequence
atggacgcccagtgcagcgccaaggtgaacgcccggaagcggcggaaagaggcaccaggtcctaacggggcaacagaggaggacggcgttccttcaaaggtgcagcggtgtgccgtggggctaaggcagccagcaccctttagcgatgagatcgaggtcgactttagcaagccctacgtgcgcgtcacaatggaggaagcctccagaggcaccccttgcgaaaggcccgttcgggtgtacgctgacggaatttttgatttgtttcactcaggacacgctagggccctgatgcaggccaagaacctgttcccaaacacatatttaatcgttggtgtatgcagtgactag

SEQ ID NO: 152057 - DNA, 5597 bp, Artificial Sequence
  derived and/or modified sequence
cccgggcgtctccccgcaacctcctcaacttccctagtcagtgacgcggcgccggccagaaatccgaccggaccgggctcgggggagcgtgagttgcagcatgtgccgaagcgccacctcagaagataaaaagaaatgagtctcatatttggcattcttttagttaaaagaagatggatgcacagtgttcagccaaggtcaatgcaaggaagaggagaaaagaggcgcccggacccaacggggcaacagaagaagatggggttccttccaaagtgcagcgctgtgcagtgggcttacggcaaccagctcctttttctgatgaaattgaagttgactttagtaagccctatgtcagggtaactatggaagaagccagcagaggaactccttgtgagcgacctgtgagagtttatgccgatggaatatttgacttatttcactctggtcacgcccgagctctgatgcaagcgaagaaccttttccctaatacgtacctcattgtgggagtttgcagtgatgagctcacacacaacttcaaaggcttcacggtgatgaacgagaatgagcgctatgacgcagtccagcactgccgctacgtggatgaggtggtgaggaatgcgccctggacgctgacacccgagttcctggccgaacaccggattgattttgtagcccatgatgatattccttattcatctgctggcagtgatgatgtttataagcacatcaaggaggcaggcatgtttgctccaacacagaggacagaaggtatctccacatcagacatcatcacccgaattgtgcgggattatgatgtgtatgcgaggcggaacctgcagaggggctacacagcaaaggagctcaatgtcagctttatcaacgagaagaaataccacttgcaggagagggttgacaaagtaaagaagaaagtgaaagatgtggaggaaaagtcaaaagaatttgttcagaaggtggaggaaaaaagcattgacctcattcagaagtgggaggagaagtcccgagaattcattggaagttttctggaaatgtttggtccggaaggagcactgaaacatatgctgaaagaggggaagggccggatgctgcaggccatcagcccgaagcagagccccagcagcagccctactcgcgagcgctccccctccccctctttccgatggcccttctccggcaagacttccccaccttgctccccagcaaatctctccaggcacaaggctgcagcctatgatatcagtgaggatgaagaagactaatgtttcctccctcctttcctgtcctccctttctgtcccattaccttcagaagctctctgttgaattccaaattgtgaccccaacactaaacctaaggacagctacaaaggaaagacaactggggaaagaagacctaggactgggggaacccaaacagcctgtcctgcaagtgacatcactcacccacacgaaggagggggactgcaccttagaagcctgctctgcatccatttacccccccccaagggctttgtttcactgtttatgttcacgtgatctcaacagggaaattgtcattttcattaattttttaaaaaattcgtctttcaaatgtagaactaattttttgcccctgaggagtgggcagaagaaggaggtagtgtaatacgcagaggccttttcttcccggtatactatagcatttgccttccgttctgaagctatgtggcttgccaagtccttcacgaaatgagccacgctgatgggtaatttgtggagaaatatcttaattttgatttccttaaggaaaagcgaaaagcagagttacagtcacaaatcccctgaacgtactgctgtcaccagtgtcattgtggctgcgggaaggagatctgaacctaacttttcttactccctgaggagtttcttgttggacccaatggggtccatgaagacactgatggggatggaagcagacccatggcatcaactgcagtgtttctgctgtgttcatcttctcagaaaactctgtgacccagttctttgggagcttttgtcagtctctttcgtgccatctaccttcgaaggaaggaacacttttagagttacaatgatgaggagaggagcgggacaatactcaatcctataccaagtcgattgagattagtttcctactgggagtaagtgcctggccctgctactcctatttgaatgctattaatattacctagccttttacaaaggatactttgtaaatgtctgctgttggaacttgatgttaatccattttggtcatagccatattagagagatttgcacagaatgtaaaggcaaaagcataggaaacaccttcctttctaaagcaacagccttatcaccttgacctctgtccctcttcagaacattcttccctggaaccagtgctccacatctttcttttcctctgagagctgcagctggcagggacctccctctgctgctcctccagcaagccacagagcataccctcacgtgacaagagtgtggtaggttttctccccacttttcacacacgcctggtggttgtggttccatctgccttgttggcttgcccggggggattcaacacttgactttcaaatcaaagaatgctaatgcttagcacttgctgttgagcatgctctaacttttaaagccctggcctcctgtctccttagctgcttagctacgcggcctagcagatcatcacccatcagtaatcctgtggctagatccaggggaaaattgcttatgtccaggccccacccctgtcactcataaataccccttgtgggggtggaattttagtgttttcagctaagaaaaccacattttctctttccttgcctctgctaggactgtgagcatctcatagtccactccctaaacactttctggtaacacctagttttccgcctgagggtcagaggctagaatcattgcctgcacagcaggactaccttggttcttaaaacttggatcacccaggcaaggcgtggtggctcacgcctgtcatctcagcactttgggagactgaggctggtggatcacttgaggccacgagtttgagaccagcctgaccaacgtggtgaaaccccatctctactaaaaatacaaaaattagccaggcgtggtggtgggcacctgtaatcccagctacttgggaggctgaggcaggagaatcccttgaacccaggaggcggaggttgcagtgagcagagatggtgccgctgcagtccagcctgggtgacagagcgagactctgtctccaaaacaaaacaaaaaccacacacacatacagaaataaagagaaataatcaactagaaaaaaaacaaaacttggatcacccagaaagagcgtcacagaggcgagggagaatgaagcctcttgttatcctgatcgcctatgacaacgacatttctaactcttctttgaagcgcagttcttactcttaaatctggtcatacaagctttggcttggaatcctgtctgtctttgaaacagctgaagttagtgttttcctgtgttacccagtgttacatagtctcatctttgaacttttctgcgtcagccttctctctttgggaatgctgcctgtttctgtctaacttattctccctggtgtggtgtggcagtgaagtctgtgctgaagcccatctgcttggttcctccaagtgcacattatgcaagtgtatttggatagacagggagatgcccggaacgtggttttcctcctccctccctattggagccatacctcctaaatatattgtctgggtcccaaatgtttgagccctcttcctctgctctcagtgggctgctcttggcatgccctgtgcttggaacgggacctgcaggctgacaggcctctgagactgctagggccagcaaacgtacatgttattgggaaactccctttccccttttggtgagcttctaccacctcagtctaatcgttttgactgaaagctatttgtctgactgaaagctaaaatcttttatagtgtggcctgttagatactttggggtaaatgtggtctgaggtgctggactagcacgggtagatggagaaagctgttgggaagttgcataatgtggtcatctgtgcctaattaaatgaggttagaggtgtgcacaccaccacaatgcctgggatctaaatcttcagatattaacgtttgaggctatggagctgtttccctgaatcacacacgagaaagcagtcaacatgggtgggccaaatgtggccaagatgagagagccagaagtgttggccttagagcagagcctctgtgtgtgagacattagaaggccagagccggggaggtgccggcgcagccactgccttccggtgggccggacggaaagcttggtcttatgctagattcagaagcactgaagaatggaggttgacactttagaggactaggaagggatcatttgtgctcttgcagctattgctgatagctagagccaaagaccattatattgctgaggcttgggtaagaaagttagggatgtgaggaggttgaaaatcctgaagaagagaaaaaatatgagggaggctaaggaaacttagccactttctgatcactgatgactccttaggctgcacctgagtgatggtggtgtttttggaggctgtacctgagtgatggtggtttttggggggctgcacctgagcgatagtgatttttttttggaggctgcacagctggtcagaccatctctagatgttctttccacagtggttcatagggcgtcattcccccttcctggattattttgactatgggtagcttattttcaagagctctttgcctttttaatcctgttccagatcacttatccaaaatctttccaaatcaattatattttgctgcttttctttaattccctaaaagccatagcttctagattttctatcagcacacattctcaccagaagttgaaccaatacaggtagaaaaagaaagcccccttaatgtttttaactgatgatatttttttaagcttaccaatataagtatttttaaaggttctatttttcaaagtcataacaatgattgttcttgttttctctcatagaatagactgccatcggataaagagtggtccctagcttctatttttccaagtaaataagtagaacatgttcttgggattataccattaaatgttaattttcttgaagaagaaagattgttgtctgccaagattttatgttagcgctcggattgaggcagaaaacggaagcaccaggtttaacactgggatgacttgggttgtgttcctggaggtttgaagtgggccttcccgccttttgagggggaaaactgactgttttgaacacatatcctggattagttgggttgttttgtattgaggatccctaaaagacaaaagagtcttggaaaggactgctggcttcgtcttgaacgttcgccccatcaccagtgtgagtccgtggggaagtcttcctcaagtggggttcagtctgtaattttcctgtctgttcttagtttgttctgagttattttggattttgttctttagccaaataaaggcagtgtggttttacctga

SEQ ID NO: 152058 - DNA, 1084 bp, Artificial Sequence
  derived and/or modified sequence
atcagctgccttccccgggcgtctccccgcaacctcctcaacttccctagtcagtgacgcggcgccggccagaaatccgaccggaccgggctcgggggagcgtgagttgcaggtgtgtgcctatctttgcgtctctgtttgagaggacaaactgtggggctgggaccgcgaggtgactgtgactgaggaagagtgttaaaagaagatggatgcacagtgttcagccaaggtcaatgcaaggaagaggagaaaagaggcgcccggacccaacggggcaacagaagaagatggggttccttccaaagtgcagcgctgtgcagtgggcttacggcaaccagctcctttttctgatgaaattgaagttgactttagtaagccctatgtcagggtaactatggaagaagccagcagaggaactccttgtgagcgacctgtgagagtttatgccgatggaatatttgacttatttcactctggtcacgcccgagctctgatgcaagcgaagaaccttttccctaatacgtacctcattgtgggagtttgcagtgatgagctcacacacaacttcaaaggcttcacggtgatgaacgagaatgagcgctatgacgcagtccagcactgccgctacgtggatgaggtggtgaggaatgcgccctggacgctgacacccgagttcctggccgaacaccggattgattttgtagcccatgatgatattccttattcatctgctggcagtgatgatgtttataagcacatcaaggaggcaggcatgtttgctccaacacagaggacagaaggtatctccacatcagacatcatcacccgaattgtgcgggattatgatgtgtatgcgaggcggaacctgcagaggggctacacagcaaaggagctcaatgtcagctttatcaacgagaagaaataccacttgcaggagagggttgacaaagtaaagaagaaagtgaaagatgtggaggaaaagtcaaaagaatttgttcagaaggtggaggaaaaaagcattgacctcattcagaagtgggaggagaagtcccgagaattcattggaagttttctggaaatgttt

SEQ ID NO: 152059 - DNA, 499 bp, Artificial Sequence
  derived and/or modified sequence
gcggccgcgaggggactccgacccagagcagtgacttcgaggggctgacttggagaagaggatggcatccgtgatgggcgatggcgctttaaaagaagatggatgcacagtgttcagccaaggtcaatgcaaggaagaggagaaaagaggcgcccggacccaacggggcaacagaagaagatggggttccttccaaagtgcagcgctgtgcagtgggcttacggcaaccagctcctttttctgatgaaattgaagttgactttagtaagccctatgtcagggtaactatggaagaagccagcagaggaactccttgtgagcgacctgtgagagtttatgccgatggaatatttgacttatttcactctggtcacgcccgagctctgatgcaagcgaagaaccttttccctaatacgtacctcattgtgggagtttgcagtgatgagctcacacacaacttcaaaggcttcacggtgatgaacgagaatgagcgctatga

SEQ ID NO: 152060 - DNA, 1598 bp, Artificial Sequence
  derived and/or modified sequence
atcagctgccttccccgggcgtctccccgcaacctcctcaacttccctagtcagtgacgcggcgccggccagaaatccgaccggaccgggctcgggggagcgtgagttgcagttaaaagaagatggatgcacagtgttcagccaaggtcaatgcaaggaagaggagaaaagaggcgcccggacccaacggggcaacagaagaagccagcagaggaactccttgtgagcgacctgtgagagtttatgccgatggaatatttgacttatttcactctggtcacgcccgagctctgatgcaagcgaagaaccttttccctaatacgtacctcattgtgggagtttgcagtgatgagctcacacacaacttcaaaggcttcacggtgatgaacgagaatgagcgctatgacgcagtccagcactgccgctacgtggatgaggtggtgaggaatgcgccctggacgctgacacccgagttcctggccgaacaccggattgattttgtagcccatgatgatattccttattcatctgctggcagtgatgatgtttataagcacatcaaggaggcaggcatgtttgctccaacacagaggacagaaggtatctccacatcagacatcatcacccgaattgtgcgggattatgatgtgtatgcgaggcggaacctgcagaggggctacacagcaaaggagctcaatgtcagctttatcaacgagaagaaataccacttgcaggagagggttgacaaagtaaagaagaaagtgaaagatgtggaggaaaagtcaaaagaatttgttcagaaggtggaggaaaaaagcattgacctcattcagaagtgggaggagaagtcccgagaattcattggaagttttctggaaatgtttggtccggaaggagcactgaaacatatgctgaaagaggggaagggccggatgctgcaggccatcagcccgaagcagagccccagcagcagccctactcgcgagcgctccccctccccctctttccgatggcccttctccggcaagacttccccaccttgctccccagcaaatctctccaggcacaaggctgcagcctatgatatcagtgaggatgaagaagactaatgtttcctccctcctttcctgtcctccctttctgtcccattaccttcagaagctctctgttgaattccaaattgtgaccccaacactaaacctaaggacagctacaaaggaaagacaactggggaaagaagacctaggactgggggaacccaaacagcctgtcctgcaagtgacatcactcacccacacgaaggagggggactgcaccttagaagcctgctctgcatccatttacccccccccaagggctttgtttcactgtttatgttcacgtgatctcaacagggaaattgtcattttcattaattttttaaaaaattcgtctttcaaatgtagaactaattttttgcccctgaggagtgggcagaagaaggaggtagtgtaatacgcagaggccttttcttcccggtatactatagcatttgccttccgttctgaagctatgtggcttgccaagtccttcacgaaatgagccacgctgatgggtaa

SEQ ID NO: 152061 - DNA, 1482 bp, Artificial Sequence
  derived and/or modified sequence
atcccgggggcctctgaggaggcggaactactgtgtcaggagtcgtggttttcaaggagaagtcgtggtcggattgacagaggtaggggaagtaggcggaacttccggctggctcttccatcagctgccttccccgggcgtctccccgcaacctcctcaacttccctagtcagtgacgcggcgccggccagaaatccgaccggaccgggctcgggggagcgtgagttgcagttaaaagaagatggatgcacagtgttcagccaaggtcaatgcaaggaagaggagaaaagaggcgcccggacccaacggggcaacagaagaagatggggttccttccaaagtgcagcgctgtgcagtgggcttacggcaaccagctcctttttctgatgaaattgaagttgactttagtaagccctatgtcagggtaactatggaagaagccagcagaggaactccttgtgagcgacctgtgagagtttatgccgatggaatatttgacttatttcactctggtcacgcccgagctctgatgcaagcgaagaaccttttccctaatacgtacctcattgtgggagtttgcagtgatgagctcacacacaacttcaaaggcttcacggtgatgaacgagaatgagcgctatgacgcagtccagcactgccgctacgtggatgaggtggtgaggaatgcgccctggacgctgacacccgagttcctggccgaacaccggattgattttgtagcccatgatgatattccttattcatctgctggcagtgatgatgtttataagcacatcaaggaggcaggcatgtttgctccaacacagaggacagaaggtatctccacatcagacatcatcacccgaattgtgcgggattatgatgtgtatgcgaggcggaacctgcagaggggctacacagcaaaggagctcaatgtcagctttatcaacgagaagaaataccacttgcaggagagggttgacaaagtaaagaagaaagtgaaagatgtggaggaaaagtcaaaagaatttgttcagaaggtggaggaaaaaagcattgacctcattcagaagtgggaggagaagtcccgagaattcattggaagttttctggaaatgtttggtccggaaggagcactgaaacatatgctgaaagaggggaagggccggatgctgcaggccatcagcccgaagcagagccccagcagcagccctactcgcgagcgctccccctccccctctttccgatggcccttctccggcaagacttccccaccttgctccccagcaaatctctccaggcacaaggctgcagcctatgatatcagtgaggatgaagaagactaatgtttcctccctcctttcctgtcctccctttctgtcccattaccttcagaagctctctgttgaattccaaattgtgaccccaacactaaacctaaggacagctacaaaggaaagacaactggggaaagaagacctag

SEQ ID NO: 152062 - DNA, 549 bp, Artificial Sequence
  derived and/or modified sequence
acatccgtatcccacttcaaggagacgtcttcgctgcatcctccggttccgggtggaggctgaccctgggccattccgtctccggtctctggtatttctgctgggtcacttcatcccgggggcctctgaggaggcggaactactgtgtcaggagtcgtggttttcaaggagaagtcgtggtcggattgacagagttaaaagaagatggatgcacagtgttcagccaaggtcaatgcaaggaagaggagaaaagaggcgcccggacccaacggggcaacagaagaagatggggttccttccaaagtgcagcgctgtgcagtgggcttacggcaaccagctcctttttctgatgaaattgaagttgactttagtaagccctatgtcagggtaactatggaagaagccagcagaggaactccttgtgagcgacctgtgagagtttatgccgatggaatatttgacttatttcactctggtcacgcccgagctctgatgcaagcgaagaaccttttccctaatacgtacctcattgtgggagtttgcagtgat

SEQ ID NO: 152063 - DNA, 1104 bp, Artificial Sequence
  derived and/or modified sequence
atggacgcccagtgctctgccaaagtgaatgccaggaagcgtcgcaaggaggcacctggccctaatggcgcaaccgaagaggacggcgtcccttccaaggttcagagatgcgcagttggactgagacagcctgcaccgttctctgacgagatcgaggttgacttcagcaaaccgtacgtaagagtgaccatggaggaggcctctcgcggtaccccctgcgagcggccagttagggtgtatgctgacgggatcttcgatctattccacagtggccatgccagagcccttatgcaagccaaaaatctattccccaatacgtacttgatcgtgggagtgtgcagtgacgagttaacccataactttaaagggtttaccgtcatgaacgaaaacgagaggtatgatgcagtacagcactgtcgctatgtggacgaggtggttcgtaacgccccatggacacttacccccgaatttctcgccgagcatcgaatcgatttcgtggcacatgatgatattccctatagctctgctggctccgacgatgtctataaacatataaaggaagccggaatgtttgctccaacccagcgcactgagggaatttctacatctgatattatcactaggatagtgcgcgactacgacgtgtacgccaggcggaatctccagcggggatataccgctaaagagttgaatgtatcgttcattaacgagaaaaagtaccacctgcaggaaagggtggacaaagtaaagaaaaaagttaaagacgtggaggaaaaatcaaaggagtttgtgcagaaggtcgaggagaagtcaattgacctcattcagaagtgggaagaaaagtccagggaattcattggctcgttcctggagatgtttggtcctgaaggtgcgctgaagcatatgctcaaggaggggaagggaaggatgctccaggctattagccccaagcaatcaccctccagtagtcctacacgtgagcggagtcctagcccatccttccggtggccattctcgggcaagacctcccctccgtgttctccggcaaacctgtctcggcataaagcagctgcctatgatatttcagaggatgaggaagactag

SEQ ID NO: 152064 - DNA, 882 bp, Artificial Sequence
  derived and/or modified sequence
atggacgctcaatgcagcgccaaagtgaatgcaaggaagaggaggaaggaggcacctggccctaacggagcaaccgaagaagatggagtgccgtcaaaggtgcagaggtgcgccgtcggcctacgtcagccggctcccttttccgacgaaatcgaggtggacttctctaaaccgtatgtgcgggtcactatggaggaggcgtctcgtggcactccgtgtgagcggccagtgcgcgtctacgctgacgggatctttgatctgttccatagcggacatgctagggcactcatgcaagccaagaacctctttccaaacacttacctgatagtgggagtgtgtagcgatgagctgactcataacttcaagggcttcaccgtgatgaatgaaaacgagcgttacgatgccgtccaacactgtcgatatgttgatgaggtcgtgagaaatgctccttggactctgacgccagagttcctggcagaacaccgaattgacttcgtggcccatgatgatatcccctactcttccgcgggatcagatgacgtgtacaaacatatcaaggaggctggaatgttcgccccaactcagagaactgagggaatctccacatcagatattattacaaggattgttcgggactatgacgtctatgcaaggcgtaatcttcagcggggatataccgctaaggaactgaacgtctcattcattaatgagaaaaaataccatctgcaggagcgtgtcgacaaggtgaagaaaaaagttaaggatgtggaagaaaaatcgaaggagtttgtgcagaaggttgaagaaaagtccatcgatctgatacagaagtgggaggagaagtcaagagagttcatcggatcatttctggagatgttttag

SEQ ID NO: 152065 - DNA, 402 bp, Artificial Sequence
  derived and/or modified sequence
atggatgcacagtgctctgctaaggttaatgccaggaagagaaggaaggaggcaccaggccctaatggggctaccgaagaagatggggttccctccaaggttcagaggtgtgcggtcggcctccgccagcccgcacctttctcggatgaaatagaggttgacttcagtaagccctacgtgagggtgacaatggaagaggcctctagaggcaccccgtgtgaacgcccagttcgcgtgtacgctgacggtatcttcgatctgttccactcagggcatgctcgagccttgatgcaggccaagaacctgtttccaaacacatatctgattgtgggcgtgtgttctgatgagctcacccacaactttaaaggatttacggtcatgaatgagaatgagagatactag

SEQ ID NO: 152066 - DNA, 987 bp, Artificial Sequence
  derived and/or modified sequence
atggatgctcagtgtagcgccaaagtgaatgcgagaaagcggaggaaggaggcgcctggcccaaatggcgcaactgaagaggcttctagaggtaccccctgtgaacgccctgtgagagtgtacgccgacgggatcttcgatttgttccattccggccacgccagagccctgatgcaagctaagaacttgttccccaatacatacctcatcgttggggtgtgttctgatgaactaacacacaattttaaagggttcactgtgatgaacgagaacgagcgatacgacgcggtccagcactgccgatatgtggatgaagtcgttaggaacgccccatggaccctgacacccgagtttctggccgagcatcgcattgattttgtcgcccacgatgatatcccttactcctccgccggatctgacgacgtgtacaagcacatcaaagaagccggtatgtttgcacccacacagcggacagaaggcatcagcacaagtgatattatcacccggatcgttagggattacgatgtgtacgcgagaaggaatctccagcgaggatacacggccaaggagctgaacgtgtctttcattaatgaaaagaagtaccatctccaagaaagagtggacaaagttaaaaaaaaagtaaaagacgtcgaagagaagtccaaggagttcgtgcagaaagtcgaggaaaagagtattgacctcatacaaaagtgggaagagaagagcagagagtttattggctcctttctggagatgttcggaccagagggtgccttaaagcacatgcttaaggagggcaagggaaggatgctgcaggccatctctccgaagcagtctccatcgtctagcccgactagagaacgctctcccagcccgagcttccggtggcctttttctggaaagacttccccaccttgttcaccagccaacttgtcacgccataaggccgcagcttatgatatctctgaggatgaggaagactag

SEQ ID NO: 152067 - DNA, 1104 bp, Artificial Sequence
  derived and/or modified sequence
atggacgcccagtgcagcgccaaggtcaatgcacggaagcgacggaaggaggctcccggaccgaacggcgcaaccgaagaagatggcgtgccctcaaaggtgcaacggtgcgctgtgggtctgcgtcaacccgcacctttctcggatgaaatcgaagtggatttcagcaagccttatgtgagagtaacaatggaggaggcgagtcgtggcaccccttgcgagcgacccgttcgcgtgtatgctgatggcatcttcgacctctttcactccggtcacgccagggcattgatgcaggctaagaacctatttccgaacacctaccttatcgttggggtgtgttcggatgagttgactcacaatttcaagggcttcacggtgatgaacgaaaacgaacgatacgacgccgtgcagcattgtagatatgtggacgaagtggtgaggaatgccccatggacactcacaccagagttcctcgccgaacatcggatagactttgtggcccacgacgacataccctattcctctgcaggctctgacgatgtgtataaacacatcaaggaggctggaatgtttgctccaacacagaggaccgagggcatcagtaccagtgatatcattacacgcatcgttagagactatgatgtctatgcgaggagaaatctgcaacgaggttacacagccaaggagttgaacgttagctttataaatgaaaaaaaatatcacctccaggaaagggtagacaaagttaaaaagaaggtgaaggacgtggaagaaaaatccaaagagttcgtgcaaaaggtggaagaaaagagtattgacctgatccaaaagtgggaagagaaatctagggaattcattggatccttcctggaaatgtttgggccagaaggcgcactgaagcatatgctcaaggagggaaagggacggatgctgcaggcgatctctccgaaacaatccccctctagcagccccaccagggaaagatctccatctccaagcttccggtggccattcagcggtaaaacgagtcctccctgtagtcccgctaacctgtctcgccacaaagccgcagcttacgacatcagcgaggacgaggaggattag

SEQ ID NO: 152068 - DNA, 348 bp, Artificial Sequence
  derived and/or modified sequence
atggacgctcaatgcagtgccaaggtgaatgctaggaaaagaaggaaagaggcaccgggacctaacggcgctacagaggaggacggagttccaagcaaggtgcagaggtgtgctgtgggcctgcgacagccagcacctttcagtgacgaaattgaagtagacttctctaagccctatgtcagagtcacaatggaggaagcaagcaggggtacaccatgcgagaggcccgtgagagtctatgcagatggaatcttcgatctatttcactctggacatgccagggcgcttatgcaggctaaaaatctctttcctaatacctacttaatcgtaggtgtgtgcagcgactag

SEQ ID NO: 152069 - DNA, 1104 bp, Artificial Sequence
  derived and/or modified sequence
atggacgcccagtgcagcgccaaggtgaacgccagaaagagaagaaaggaggcccccggccccaacggcgccaccgaggaggacggcgtgcccagcaaggtgcagagatgcgccgtgggcctgagacagcccgcccccttcagcgacgagatcgaggtggacttcagcaagccctacgtgagagtgaccatggaggaggccagcagaggcaccccctgcgagagacccgtgagagtgtacgccgacggcatcttcgacctgttccacagcggccacgccagagccctgatgcaggccaagaacctgttccccaacacctacctgatcgtgggcgtgtgcagcgacgagctgacccacaacttcaagggcttcaccgtgatgaacgagaacgagagatacgacgccgtgcagcactgcagatacgtggacgaggtggtgagaaacgccccctggaccctgacccccgagttcctggccgagcacagaatcgacttcgtggcccacgacgacatcccctacagcagcgccggcagcgacgacgtgtacaagcacatcaaggaggccggcatgttcgcccccacccagagaaccgagggcatcagcaccagcgacatcatcaccagaatcgtgagagactacgacgtgtacgccagaagaaacctgcagagaggctacaccgccaaggagctgaacgtgagcttcatcaacgagaagaagtaccacctgcaggagagagtggacaaggtgaagaagaaggtgaaggacgtggaggagaagagcaaggagttcgtgcagaaggtggaggagaagagcatcgacctgatccagaagtgggaggagaagagcagagagttcatcggcagcttcctggagatgttcggccccgagggcgccctgaagcacatgctgaaggagggcaagggcagaatgctgcaggccatcagccccaagcagagccccagcagcagccccaccagagagagaagccccagccccagcttcagatggcccttcagcggcaagaccagccccccctgcagccccgccaacctgagcagacacaaggccgccgcctacgacatcagcgaggacgaggaggactag

SEQ ID NO: 152070 - DNA, 882 bp, Artificial Sequence
  derived and/or modified sequence
atggacgcccagtgcagcgccaaggtgaacgccagaaagagaagaaaggaggcccccggccccaacggcgccaccgaggaggacggcgtgcccagcaaggtgcagagatgcgccgtgggcctgagacagcccgcccccttcagcgacgagatcgaggtggacttcagcaagccctacgtgagagtgaccatggaggaggccagcagaggcaccccctgcgagagacccgtgagagtgtacgccgacggcatcttcgacctgttccacagcggccacgccagagccctgatgcaggccaagaacctgttccccaacacctacctgatcgtgggcgtgtgcagcgacgagctgacccacaacttcaagggcttcaccgtgatgaacgagaacgagagatacgacgccgtgcagcactgcagatacgtggacgaggtggtgagaaacgccccctggaccctgacccccgagttcctggccgagcacagaatcgacttcgtggcccacgacgacatcccctacagcagcgccggcagcgacgacgtgtacaagcacatcaaggaggccggcatgttcgcccccacccagagaaccgagggcatcagcaccagcgacatcatcaccagaatcgtgagagactacgacgtgtacgccagaagaaacctgcagagaggctacaccgccaaggagctgaacgtgagcttcatcaacgagaagaagtaccacctgcaggagagagtggacaaggtgaagaagaaggtgaaggacgtggaggagaagagcaaggagttcgtgcagaaggtggaggagaagagcatcgacctgatccagaagtgggaggagaagagcagagagttcatcggcagcttcctggagatgttctag

SEQ ID NO: 152071 - DNA, 402 bp, Artificial Sequence
  derived and/or modified sequence
atggacgcccagtgcagcgccaaggtgaacgccagaaagagaagaaaggaggcccccggccccaacggcgccaccgaggaggacggcgtgcccagcaaggtgcagagatgcgccgtgggcctgagacagcccgcccccttcagcgacgagatcgaggtggacttcagcaagccctacgtgagagtgaccatggaggaggccagcagaggcaccccctgcgagagacccgtgagagtgtacgccgacggcatcttcgacctgttccacagcggccacgccagagccctgatgcaggccaagaacctgttccccaacacctacctgatcgtgggcgtgtgcagcgacgagctgacccacaacttcaagggcttcaccgtgatgaacgagaacgagagatactag

SEQ ID NO: 152072 - DNA, 987 bp, Artificial Sequence
  derived and/or modified sequence
atggacgcccagtgcagcgccaaggtgaacgccagaaagagaagaaaggaggcccccggccccaacggcgccaccgaggaggccagcagaggcaccccctgcgagagacccgtgagagtgtacgccgacggcatcttcgacctgttccacagcggccacgccagagccctgatgcaggccaagaacctgttccccaacacctacctgatcgtgggcgtgtgcagcgacgagctgacccacaacttcaagggcttcaccgtgatgaacgagaacgagagatacgacgccgtgcagcactgcagatacgtggacgaggtggtgagaaacgccccctggaccctgacccccgagttcctggccgagcacagaatcgacttcgtggcccacgacgacatcccctacagcagcgccggcagcgacgacgtgtacaagcacatcaaggaggccggcatgttcgcccccacccagagaaccgagggcatcagcaccagcgacatcatcaccagaatcgtgagagactacgacgtgtacgccagaagaaacctgcagagaggctacaccgccaaggagctgaacgtgagcttcatcaacgagaagaagtaccacctgcaggagagagtggacaaggtgaagaagaaggtgaaggacgtggaggagaagagcaaggagttcgtgcagaaggtggaggagaagagcatcgacctgatccagaagtgggaggagaagagcagagagttcatcggcagcttcctggagatgttcggccccgagggcgccctgaagcacatgctgaaggagggcaagggcagaatgctgcaggccatcagccccaagcagagccccagcagcagccccaccagagagagaagccccagccccagcttcagatggcccttcagcggcaagaccagccccccctgcagccccgccaacctgagcagacacaaggccgccgcctacgacatcagcgaggacgaggaggactag

SEQ ID NO: 152073 - DNA, 348 bp, Artificial Sequence
  derived and/or modified sequence
atggacgcccagtgcagcgccaaggtgaacgccagaaagagaagaaaggaggcccccggccccaacggcgccaccgaggaggacggcgtgcccagcaaggtgcagagatgcgccgtgggcctgagacagcccgcccccttcagcgacgagatcgaggtggacttcagcaagccctacgtgagagtgaccatggaggaggccagcagaggcaccccctgcgagagacccgtgagagtgtacgccgacggcatcttcgacctgttccacagcggccacgccagagccctgatgcaggccaagaacctgttccccaacacctacctgatcgtgggcgtgtgcagcgactag

SEQ ID NO: 152074 - protein, 288 aa, Artificial Sequence
  derived and/or modified sequence
MQIPQAPWPVVWAVLQLGWRPGWFLDSPDRPWNPPTFSPALLVVTEGDNATFTCSFSNTSESFVLNWYRMSPSNQTDKLAAFPEDRSQPGQDCRFRVTQLPNGRDFHMSVVRARRNDSGTYLCGAISLAPKAQIKESLRAELRVTERRAEVPTAHPSPSPRPAGQFQTLVVGVVGGLLGSLVLLVWVLAVICSRAARGTIGARRTGQPLKEDPSAVPVFSVDYGELDFQWREKTPEPPVPCVPEQTEYATIVFPSGMGTSSPARRGSADGPRSAQPLRPEDGHCSWPL

SEQ ID NO: 152075 - protein, 179 aa, Artificial Sequence
  derived and/or modified sequence
MQIPQAPWPVVWAVLQLGWRPGWFLDSPDRPWNPPTFSPALLVVTEGDNATFTCSFSNTSESFVLNWYRMSPSNQTDKLAAFPEDRSQPGQDCRFRVTQLPNGRDFHMSVVRARRNDSGTYLCGAISLAPKAQIKESLRAELRVTGTIGARRTGQPLKEDPSAVPVFSVDYGELDFQWR

SEQ ID NO: 152076 - DNA, 867 bp, Artificial Sequence
  derived and/or modified sequence
atgcagatcccccaggctccttggcctgtggtctgggcggtgctgcagttgggctggcggcctggatggttcttagacagcccggatcgcccatggaacccccctacctttagtccagctttgctagtggtcacggaaggagataatgccaccttcacttgctcattcagcaatacttccgaatcattcgttttgaactggtatcgtatgtctccaagcaatcagacagataaacttgcagcctttcctgaagaccgttcacagcctggtcaggactgtcggttccgggtgacgcagcttcctaacgggcgggattttcatatgtccgtcgtgcgagccaggaggaacgatagcggaacttatctttgcggcgccatttccctcgcccccaaggcccaaatcaaagagagcctacgagccgaactccgcgttactgaaagaagggctgaggtgcccacagcccatccctctccaagtcctagacccgctggacagttccagaccttagtcgtgggtgtggtcggcggcctgctgggctccttggttttgcttgtgtgggttctagctgttatttgctcaagggccgcccgtggcactattggtgccagacgcacaggacaacctcttaaggaggatcctagtgctgttccagttttttctgtcgattacggagagcttgattttcagtggcgagaaaagactcccgagcccccagtcccctgcgtgcccgaacagaccgaatacgcaacaatcgtctttccgtcagggatgggaacgagttctccagcccgacgaggctctgccgacggacccagaagcgctcagcctctgagacccgaagacgggcactgttcttggcctctgtag

SEQ ID NO: 152077 - DNA, 540 bp, Artificial Sequence
  derived and/or modified sequence
atgcagatccctcaggccccctggcctgtcgtgtgggccgtcctacagctgggctggagaccaggatggtttctggacagccccgaccgcccttggaaccccccaacattttcgcctgcactcctggtggttactgaaggcgacaatgcgacattcacatgttccttttccaatacctccgagagcttcgttctgaattggtatcggatgtccccttctaatcaaaccgacaaactggcggctttccccgaagaccgtagtcagccaggtcaggattgccggtttcgagtgacccagctccccaacggacgcgactttcacatgagcgtggtccgcgccaggcggaatgactccggcacgtacttgtgtggggccatcagtcttgcgccgaaggctcagattaaggaatccctccgagcagaactccgggtgactggtaccatcggcgcccggcggactggccagcctctgaaggaagatccttcagctgtgccggtcttctccgttgattacggtgagctggacttccagtggcggtag

SEQ ID NO: 152078 - DNA, 867 bp, Artificial Sequence
  derived and/or modified sequence
atgcagatcccccaggccccctggcctgtggtgtgggccgtgctgcagctgggctggaggcctggctggttcctggacagcccagaccggccctggaacccccccaccttctccccagccctgctggtggtgacagaaggagacaatgccaccttcacctgcagcttcagcaacaccagcgagagctttgtgctgaactggtacaggatgagccccagcaaccagacagacaagctggccgccttccctgaggacaggagccagcccggccaggactgccgcttccgggtgacccagctgcccaacggccgggacttccacatgtctgtggtgcgggccaggagaaatgacagcggcacctacctgtgtggggccatcagcctggcccccaaggcccagatcaaggagagcctgcgggcagagctgcgggtgacagaaagaagagctgaggtgcccacagcccaccccagccccagccccaggcctgctggccagttccagaccctggtggtgggcgtggtgggcggcctgctgggcagcctggtgctgctggtgtgggtgctggccgtcatctgcagcagagctgcccggggcaccatcggggccaggagaacaggccagcccctgaaggaggaccccagcgctgtgcctgtgttttctgtggactatggagagctggacttccagtggagggagaagaccccagagccccctgtgccctgtgtgcctgagcagacagaatatgccaccatcgtgttccccagcggcatgggcaccagcagccctgcccggcggggcagcgcagatggccccaggtctgcccagcccctgcggccagaagatggccactgctcctggcccctgtag

SEQ ID NO: 152079 - DNA, 540 bp, Artificial Sequence
  derived and/or modified sequence
atgcagatcccccaggccccctggcctgtggtgtgggccgtgctgcagctgggctggaggcctggctggttcctggacagcccagaccggccctggaacccccccaccttctccccagccctgctggtggtgacagaaggagacaatgccaccttcacctgcagcttcagcaacaccagcgagagctttgtgctgaactggtacaggatgagccccagcaaccagacagacaagctggccgccttccctgaggacaggagccagcccggccaggactgccgcttccgggtgacccagctgcccaacggccgggacttccacatgtctgtggtgcgggccaggagaaatgacagcggcacctacctgtgtggggccatcagcctggcccccaaggcccagatcaaggagagcctgcgggcagagctgcgggtgacaggcaccatcggggccaggagaacaggccagcccctgaaggaggaccccagcgctgtgcctgtgttttctgtggactatggagagctggacttccagtggaggtag

SEQ ID NO: 152080 - DNA, 867 bp, Artificial Sequence
  derived and/or modified sequence
atgcagatcccccaggccccctggcccgtggtgtgggccgtgctgcaactaggttggcgaccagggtggttcttggactctcccgacagaccttggaacccccccaccttctcccctgcactcctggttgtcacagagggagacaacgccacatttacctgtagtttcagcaacacttcagaatcgtttgttctgaattggtatcgtatgtcaccgtcaaatcagactgataaattggccgcattccctgaagataggagtcagcctgggcaagactgtcgctttcgtgtcacacagctcccaaacggtcgagacttccatatgagtgtggtcagggcccggcgtaatgacagtggaacatacttatgtggcgctattagccttgccccaaaggcacagattaaggagtccctccgggcagagctgcgagtgactgaacgcagggccgaggtcccgactgcccatccctcccccagtcctagacccgctggccaattccagacactggtagttggcgtagtgggagggctccttggcagcttggtattgctggtgtgggtgttagccgtaatatgtagtagggccgcccgaggcactatcggggcccgacgcacagggcagccactcaaggaagatccgtcggcagtccccgtgttcagcgtggactatggagagttagatttccagtggcgggagaagactcccgaaccgcccgtgccatgtgtgcccgaacagaccgaatacgctacgatcgtatttccctccggcatgggaacttcaagtccagcacgccgcgggagcgccgatgggccgaggagcgcgcagcctctccggcctgaggatggtcattgctcttggcctctctag

SEQ ID NO: 152081 - DNA, 540 bp, Artificial Sequence
  derived and/or modified sequence
atgcagatcccccaggccccctggcccgtggtgtgggccgtgctgcaattaggctggcggccaggatggtttctggactcacccgaccgcccttggaaccctccgactttctctccagccctgctcgtggttaccgaaggcgacaatgctacgttcacttgtagcttcagcaacacctcggagtcttttgtgctgaattggtaccgcatgtcgcctagcaatcagactgacaagctcgctgccttcccagaagacagatcccagcctgggcaagattgcagattccgcgtgactcagctgccaaatgggagggattttcacatgagcgtggtgagagcaagacggaacgactctgggacttatttatgcggggcaattagtctggctcccaaagcacaaattaaggagtcccttcgcgccgagcttagggtaacaggaaccattggggcacgcaggaccggtcagccattaaaagaggatccaagcgccgtaccagtgtttagtgttgactacggcgagttggacttccagtggcgctag

SEQ ID NO: 152082 - DNA, 867 bp, Artificial Sequence
  derived and/or modified sequence
atgcagatcccccaagcaccatggccagtcgtctgggccgtattacagctgggctggcgaccaggatggtttttggactctcctgacaggccttggaaccctcctacattctctcccgctttgctcgtggttactgaaggggataacgccacgtttacatgtagcttcagcaacacatccgagagttttgtcttgaattggtaccggatgtcacccagcaaccaaacagacaaactcgcggcttttcctgaagaccggtcgcagccaggacaggactgcagatttcgagtgacacaactgcccaacgggcgagacttccacatgagtgtggtgagagctcggagaaacgactctggcacatacctgtgtggagccatcagcctggcgccaaaggcccagatcaaagagtccctgcgggctgaactgcgtgttaccgagcgcagggcagaggtcccaaccgcccatccatctccaagcccccgaccagctggacaatttcagactctggtggtgggagtagtcggcggacttctggggtctctggtcctgttggtgtgggtgctggccgtaatatgcagcagggccgctaggggcacaattggggcaagacgtaccggccagccgcttaaagaggatccttcagcagtacctgtatttagcgtcgactacggcgaacttgacttccagtggcgagaaaagactcccgaacctcctgtgccttgtgtgcctgaacagaccgagtacgccaccattgtctttcccagcggcatgggaaccagcagccccgctcgacgcggtagtgctgacgggcctcgctccgcgcagccgcttaggcccgaagatggccattgctcctggccgctttag

SEQ ID NO: 152083 - DNA, 540 bp, Artificial Sequence
  derived and/or modified sequence
atgcagatccctcaggcaccatggccagtggtgtgggctgtcttgcagttgggctggagaccgggatggttcctagattcacctgatagaccttggaatccacccaccttctcccctgcgttgctcgtcgtgactgaaggtgataatgcaacttttacgtgctccttctctaacacctccgagtcgtttgtcttaaactggtaccgcatgtccccatcaaatcagactgataagctggctgcattccccgaggaccgatctcaaccgggtcaggactgtaggtttcgtgtgacccagcttcctaacgggagagacttccacatgtccgtagtaagagcaagaaggaacgattccggcacctatctgtgtggagctatcagtctggcaccgaaagcccaaatcaaggaatcacttagagcggagttgcgagtgacagggactatcggggcaagacgcaccggacaaccactaaaggaggacccatctgccgtccctgtgttttcagtggactacggggaactggattttcagtggcgatag

SEQ ID NO: 152084 - DNA, 2114 bp, Artificial Sequence
  derived and/or modified sequence
acagtttcccttccgctcacctccgcctgagcagtggagaaggcggcactctggtggggctgctccaggcatgcagatcccacaggcgccctggccagtcgtctgggcggtgctacaactgggctggcggccaggatggttcttagactccccagacaggccctggaacccccccaccttctccccagccctgctcgtggtgaccgaaggggacaacgccaccttcacctgcagcttctccaacacatcggagagcttcgtgctaaactggtaccgcatgagccccagcaaccagacggacaagctggccgccttccccgaggaccgcagccagcccggccaggactgccgcttccgtgtcacacaactgcccaacgggcgtgacttccacatgagcgtggtcagggcccggcgcaatgacagcggcacctacctctgtggggccatctccctggcccccaaggcgcagatcaaagagagcctgcgggcagagctcagggtgacagagagaagggcagaagtgcccacagcccaccccagcccctcacccaggccagccggccagttccaaaccctggtggttggtgtcgtgggcggcctgctgggcagcctggtgctgctagtctgggtcctggccgtcatctgctcccgggccgcacgagggacaataggagccaggcgcaccggccagcccctgaaggaggacccctcagccgtgcctgtgttctctgtggactatggggagctggatttccagtggcgagagaagaccccggagccccccgtgccctgtgtccctgagcagacggagtatgccaccattgtctttcctagcggaatgggcacctcatcccccgcccgcaggggctcagctgacggccctcggagtgcccagccactgaggcctgaggatggacactgctcttggcccctctgaccggcttccttggccaccagtgttctgcagaccctccaccatgagcccgggtcagcgcatttcctcaggagaagcaggcagggtgcaggccattgcaggccgtccaggggctgagctgcctgggggcgaccggggctccagcctgcacctgcaccaggcacagccccaccacaggactcatgtctcaatgcccacagtgagcccaggcagcaggtgtcaccgtcccctacagggagggccagatgcagtcactgcttcaggtcctgccagcacagagctgcctgcgtccagctccctgaatctctgctgctgctgctgctgctgctgctgctgcctgcggcccggggctgaaggcgccgtggccctgcctgacgccccggagcctcctgcctgaacttgggggctggttggagatggccttggagcagccaaggtgcccctggcagtggcatcccgaaacgccctggacgcagggcccaagactgggcacaggagtgggaggtacatggggctggggactccccaggagttatctgctccctgcaggcctagagaagtttcagggaaggtcagaagagctcctggctgtggtgggcagggcaggaaacccctccacctttacacatgcccaggcagcacctcaggccctttgtggggcagggaagctgaggcagtaagcgggcaggcagagctggaggcctttcaggcccagccagcactctggcctcctgccgccgcattccaccccagcccctcacaccactcgggagagggacatcctacggtcccaaggtcaggagggcagggctggggttgactcaggcccctcccagctgtggccacctgggtgttgggagggcagaagtgcaggcacctagggccccccatgtgcccaccctgggagctctccttggaacccattcctgaaattatttaaaggggttggccgggctcccaccagggcctgggtgggaaggtacaggcgttcccccggggcctagtacccccgccgtggcctatccactcctcacatccacacactgcacccccactcctggggcagggccaccagcatccaggcggccagcaggcacctgagtggctgggacaagggatcccccttccctgtggttctattatattataattataattaaatatgagagcatgctaagga

SEQ ID NO: 152085 - DNA, 1956 bp, Artificial Sequence
  derived and/or modified sequence
agtttcccttccgctcacctccgcctgagcagtggagaaggcggcactctggtggggctgctccaggcatgcagatcccacaggcgccctggccagtcgtctgggcggtgctacaactgggctggcggccaggatggttcttagactccccagacaggccctggaacccccccaccttctccccagccctgctcgtggtgaccgaaggggacaacgccaccttcacctgcagcttctccaacacatcggagagcttcgtgctaaactggtaccgcatgagccccagcaaccagacggacaagctggccgccttccccgaggaccgcagccagcccggccaggactgccgcttccgtgtcacacaactgcccaacgggcgtgacttccacatgagcgtggtcagggcccggcgcaatgacagcggcacctacctctgtggggccatctccctggcccccaaggcgcagatcaaagagagcctgcgggcagagctcagggtgacagggacaataggagccaggcgcaccggccagcccctgaaggaggacccctcagccgtgcctgtgttctctgtggactatggggagctggatttccagtggcgagagaagaccccggagccccccgtgccctgtgtccctgagcagacggagtatgccaccattgtctttcctagcggaatgggcacctcatcccccgcccgcaggggctcagctgacggccctcggagtgcccagccactgaggcctgaggatggacactgctcttggcccctctgaccggcttccttggccaccagtgttctgcagaccctccaccatgagcccgggtcagcgcatttcctcaggagaagcaggcagggtgcaggccattgcaggccgtccaggggctgagctgcctgggggcgaccggggctccagcctgcacctgcaccaggcacagccccaccacaggactcatgtctcaatgcccacagtgagcccaggcagcaggtgtcaccgtcccctacagggagggccagatgcagtcactgcttcaggtcctgccagcacagagctgcctgcgtccagctccctgaatctctgctgctgctgctgctgctgctgctgctgcctgcggcccggggctgaaggcgccgtggccctgcctgacgccccggagcctcctgcctgaacttgggggctggttggagatggccttggagcagccaaggtgcccctggcagtggcatcccgaaacgccctggacgcagggcccaagactgggcacaggagtgggaggtacatggggctggggactccccaggagttatctgctccctgcaggcctagagaagtttcagggaaggtcagaagagctcctggctgtggtgggcagggcaggaaacccctccacctttacacatgcccaggcagcacctcaggccctttgtggggcagggaagctgaggcagtaagcgggcaggcagagctggaggcctttcaggcccagccagcactctggcctcctgccgccgcattccaccccagcccctcacaccactcgggagagggacatcctacggtcccaaggtcaggagggcagggctggggttgactcaggcccctcccagctgtggccacctgggtgttgggagggcagaagtgcaggcacctagggccccccatgtgcccaccctgggagctctccttggaacccattcctgaaattatttaaaggggttggccgggctcccaccagggcctgggtgggaaggtacaggcgttcccccggggcctagtacccccgccgtggcctatccactcctcacatccacacactgcacccccactcctggggcagggccaccagcatccaggcggccagcaggcacctgagtggctgggacaagggatcccccttccctgtggttctattatattataattataattaaatatgagagcatgctaagga

SEQ ID NO: 152086 - DNA, 867 bp, Artificial Sequence
  derived and/or modified sequence
atgcagatcccccaggccccctggcccgtggtgtgggccgtgctgcagctgggctggagacccggctggttcctggacagccccgacagaccctggaacccccccaccttcagccccgccctgctggtggtgaccgagggcgacaacgccaccttcacctgcagcttcagcaacaccagcgagagcttcgtgctgaactggtacagaatgagccccagcaaccagaccgacaagctggccgccttccccgaggacagaagccagcccggccaggactgcagattcagagtgacccagctgcccaacggcagagacttccacatgagcgtggtgagagccagaagaaacgacagcggcacctacctgtgcggcgccatcagcctggcccccaaggcccagatcaaggagagcctgagagccgagctgagagtgaccgagagaagagccgaggtgcccaccgcccaccccagccccagccccagacccgccggccagttccagaccctggtggtgggcgtggtgggcggcctgctgggcagcctggtgctgctggtgtgggtgctggccgtgatctgcagcagagccgccagaggcaccatcggcgccagaagaaccggccagcccctgaaggaggaccccagcgccgtgcccgtgttcagcgtggactacggcgagctggacttccagtggagagagaagacccccgagccccccgtgccctgcgtgcccgagcagaccgagtacgccaccatcgtgttccccagcggcatgggcaccagcagccccgccagaagaggcagcgccgacggccccagaagcgcccagcccctgagacccgaggacggccactgcagctggcccctgtag

SEQ ID NO: 152087 - DNA, 540 bp, Artificial Sequence
  derived and/or modified sequence
atgcagatcccccaggccccctggcccgtggtgtgggccgtgctgcagctgggctggagacccggctggttcctggacagccccgacagaccctggaacccccccaccttcagccccgccctgctggtggtgaccgagggcgacaacgccaccttcacctgcagcttcagcaacaccagcgagagcttcgtgctgaactggtacagaatgagccccagcaaccagaccgacaagctggccgccttccccgaggacagaagccagcccggccaggactgcagattcagagtgacccagctgcccaacggcagagacttccacatgagcgtggtgagagccagaagaaacgacagcggcacctacctgtgcggcgccatcagcctggcccccaaggcccagatcaaggagagcctgagagccgagctgagagtgaccggcaccatcggcgccagaagaaccggccagcccctgaaggaggaccccagcgccgtgcccgtgttcagcgtggactacggcgagctggacttccagtggagatag

SEQ ID NO: 152088 - DNA, 1638 bp, Artificial Sequence
  derived and/or modified sequence
atgggaagctcggcaaccgagattgaagaactggaaaatactacattcaagtacctgactggcgaacagacagaaaagatgtggcagagattaaagggaatcctgaggtgtctcgtgaagcagctagaaagaggagatgtcaatgtggtcgacctgaagaaaaatatagagtacgctgcctcagtgctggaggcagtctacatcgacgagactagaaggctcttggacacagaagacgagctgagtgacatccagacggatagcgttccttcagaagtgagggactggcttgcgagtacttttactcgtaagatgggaatgaccaagaaaaagcccgaggaaaaacctaagtttaggtctattgtgcacgccgttcaggccggtatcttcgtcgagcggatgtaccgcaagacatatcacatggtcggtctggcctaccccgcagctgtcatagttaccctcaaggacgtggacaaatggtcattcgatgtcttcgcgctgaatgaggcctccggagagcactctttgaaattcatgatatacgaactgttcacgaggtacgatctcattaaccggtttaagatccccgtgagttgcctgataaccttcgcagaagctctggaggtggggtattccaagtacaagaacccctatcataacctgatccacgcagcagatgtgacccaaactgtgcactacatcatgctgcacacgggcatcatgcattggctcaccgagctggagattctggccatggttttcgcagctgcaattcacgactacgagcacactgggacaaccaacaattttcacatccagaccaggtctgacgtggcaatactgtataatgacaggagtgtgctggagaaccatcacgtgagcgctgcctataggctaatgcaagaagaagaaatgaacattctgataaatttgagcaaggacgattggcgcgacctgcggaacctggttattgaaatggtactgagtacagatatgtcgggccattttcagcagatcaaaaacatcaggaactcactacagcagcccgaaggaatcgacagggctaaaacaatgtccctaatcctgcacgcagccgatatttcccaccccgctaaaagttggaagctgcattacaggtggaccatggcccttatggaagagtttttcctccaaggggacaaagaagcagagctgggcctgcctttcagtccactatgcgatcgtaagagtactatggtggcgcagtcccagattggctttattgattttatcgtcgagcccacctttagtctgctgaccgacagcacggaaaaaattgtgatcccactgattgaggaagcctcaaaggccgaaacctcttcctatgttgcctcaagcagtactacaattgtagggcttcatattgctgatgcacttcggaggtccaacactaagggaagcatgagcgacggttcatactcacccgattacagcctggcagcagtggatctcaagagctttaagaacaatctggtcgacattatacagcagaacaaggaaagatggaaagaattggctgcccagggtgaaagcgatctccataaaaactctgaggatctcgtcaacgccgaggagaagcacgatgaaacacatagttag

SEQ ID NO: 152089 - DNA, 1590 bp, Artificial Sequence
  derived and/or modified sequence
atggatgaccatgtgacaatcagaaagaagcatttacagcgacctatttttcgcctgcgctgccttgtgaaacaattagagcgtggagatgttaacgtggtcgatctcaagaaaaacatcgagtacgctgccagcgtgctggaggccgtgtatatagacgaaacaaggaggctcctggacaccgaggacgaattgtcggatattcagacggattcggtcccttcagaggtgagggactggttggcctcaacttttacgagaaagatgggcatgaccaagaagaagcctgaagagaaacccaagtttcggtccatcgttcatgccgtgcaggctggcatctttgttgaacgtatgtacagaaaaacatatcatatggtggggctggcttacccggcagcagtcattgtcactctcaaggatgtggacaaatggagctttgacgtgttcgctctgaatgaggcgagtggcgaacattcgctgaagttcatgatttacgaactgttcacgcgatatgacttgatcaatcgatttaaaattccagtgtcatgtctgataacctttgccgaggccctggaggtggggtattctaagtacaaaaatccatatcataacctcatacacgccgctgatgtcacccagacagtgcattacattatgctgcatacggggataatgcattggctcactgagctcgagattttggccatggtttttgccgcagctatccacgactacgaacacacggggacgaccaataactttcacatccaaaccaggagtgacgtggccattctgtataatgacaggtccgttctggaaaaccaccatgtatcagccgcgtatcgactcatgcaagaagaggagatgaatattctgatcaatctgtccaaggacgattggcgagatctcaggaacctggtaatagagatggtcctcagcacagacatgagtggccacttccaacagatcaagaacattcggaacagcctacaacagcccgaggggatcgatcgcgccaaaacaatgtcactgatcctgcacgccgctgatataagtcatcctgctaagtcctggaaactccactaccggtggacaatggccctgatggaggagttctttctccagggggataaggaggcagagctcggactgcccttcagccccctgtgtgacaggaagagtactatggtagcccagtcccaaatcgggttcatcgacttcattgttgaaccaacgttcagtctgttgaccgacagcacagagaagattgtcatacctctcatcgaggaagctagcaaagctgaaacttcctcctacgtcgcttccagttcaaccacaattgttggactgcacatcgctgatgcattgagaagatccaacacaaagggaagtatgtctgacggttcatactcaccagattatagcctcgcagcagtggacctaaagagcttcaaaaataaccttgtcgacataatccagcagaataaagagcgatggaaggagctcgccgctcaaggagagtcggatctgcacaagaattccgaggacttggttaacgccgaggagaaacatgatgagacacacagctag

SEQ ID NO: 152090 - DNA, 1638 bp, Artificial Sequence
  derived and/or modified sequence
atggggagcagtgcgaccgaaattgaagagctggaaaacaccactttcaagtatctaacaggcgaacagaccgagaagatgtggcaacggctgaaaggaattcttcgctgcctggtcaaacagctcgagcgcggagacgtgaatgtcgtggacctgaagaagaacatcgagtacgctgcctcagtccttgaggctgtctatatcgatgaaactagaagacttctggacaccgaagatgaactaagcgacatccagaccgactccgtaccatctgaggtgagagactggttagcctctacttttacgcggaaaatgggtatgacaaaaaagaaacctgaagaaaagccaaagttcagaagcattgtgcacgccgtgcaggccggcatctttgtggaacgcatgtaccggaagacataccacatggtagggttagcgtaccctgcagccgtcatcgtgaccctcaaggacgtggacaagtggtcctttgatgtgttcgcactcaacgaagcttccggtgagcactccctgaagttcatgatttacgaactgttcacccgttacgatctaattaataggttcaagatccccgtttcctgtctaataacattcgccgaagcactcgaagtcggctatagcaagtataagaacccgtaccacaaccttatacacgcggccgatgtgacccagacagttcactacattatgctccacaccggtatcatgcactggttgaccgagctcgaaatactggccatggtctttgccgccgcaatccacgattatgaacatactggaaccaccaacaactttcacatccaaactagatctgatgtcgccatcctatacaacgatcgctcagtcctggagaaccatcatgtgagtgccgcatacagactgatgcaggaggaagaaatgaatattctcataaacttgtctaaggatgattggagggacctacggaacctggtgatcgaaatggtgctgtccactgatatgagcggtcatttccaacagatcaagaatattcgcaattcactccagcagcccgagggcatagaccgtgccaaaacaatgtcactgatcctgcatgctgccgacatctcccatccagcgaagtcttggaaactgcactaccgatggaccatggctttaatggaagagttttttctccagggtgacaaggaggccgaactcggcctccccttttcacctctctgcgatcgaaaatcaaccatggtagctcagagccagatcggctttattgacttcatcgtggaacctacgttctctctgctcacagatagcacggaaaaaattgtgatcccgcttatagaggaagccagcaaagccgaaacttcctcttacgtggcctccagctctactactattgtggggcttcatatagccgacgcactgcgtcgttccaatacaaagggatctatgtccgacgggtcttacagcccagactacagtcttgccgctgttgacctcaaaagttttaagaacaatctggtggatattattcagcagaataaggagcgatggaaagagttagctgcccaaggcgagagcgatttgcataagaattccgaagatctagtgaacgctgaagaaaaacatgatgaaactcattcctag

SEQ ID NO: 152091 - DNA, 1659 bp, Artificial Sequence
  derived and/or modified sequence
atgggatcctccgcaactgaaatcgaagagcttgagaatacaactttcaagtacctgactggggagcagacagaaaagatgtggcagcgactcaaaggcatcctgaggtgtctcgtgaaacagcttgaaaggggggacgtgaacgtggtggatctaaaaaagaacatagagtatgccgcctcggttcttgaggcagtgtatatcgacgaaactagaagacttctagataccgaagacgaactttccgacatccaaacagacagtgtgccatcagaggtccgagactggctcgcctcaacctttacacgcaagatgggcatgaccaaaaaaaagccggaggagaaacccaaattcaggagtattgtgcatgctgttcaagctggtattttcgtggaaagaatgtatcgcaagacatatcacatggtgggcctggcttatcctgccgccgtgattgtcaccctgaaagacgtggataaatggagtttcgatgtatttgcactgaatgaagcttccggggagcatagcctcaagttcatgatttacgaactgttcaccagatatgacctgatcaaccgcttcaagatacctgtcagctgtctgatcacctttgctgaagctttagaagttgggtactctaagtataaaaacccctatcataatctgatccacgctgccgacgtgactcagaccgttcattacatcatgttgcacactggcatcatgcactggcttacagagttggaaatcctggccatggtcttcgctgccgctatccatgactacgagcacacaggaacaactaacaattttcatatccagacacgaagtgacgtcgctatcctatacaacgacaggtctgttttggagaatcatcacgtgagtgccgcctataggcttatgcaggaagaagagatgaacattctgattaacttgtcaaaggatgactggagggaccttagaaacctggtgattgagatggtcctgagcacggatatgagcggacattttcagcagatcaagaatatccgcaactcattgcaacaacctgagggaatcgaccgggctaaaaccatgtctctgattctgcacgcggccgatatttctcatccggctaagagttggaagctccattataggtggactatggcgctgatggaggagtttttccttcagggcgataaggaagccgaactaggactaccattttccccattgtgtgaccgcaaaagcactatggtagcccagagtcagataggcttcatcgattttatagtggagccaactttttctctgctgactgattcaacagaaaaaatagttatccccttgatagaggaggcatcaaaggctgaaactagcagctatgtcgcctcttcatctaccactattgttggacttcacatcgcagacgccctacgccgcagcaacactaaagggagcatgtcggatggaagctactctcctgactatagtctggccgctgtcgacctgaaaagctttaagaataatctagttgacatcattcagcagaacaaggaacgctggaaagagttagctgcccagggtagcgtggtctatgaagccttactcccttcattgagtgtatttacttcgccgcttcgagtgtggatcacctcatcccggttccttctgctctag

SEQ ID NO: 152092 - DNA, 1326 bp, Artificial Sequence
  derived and/or modified sequence
atgggaatgaccaagaagaaacctgaagaaaagccgaagtttcgtagcatcgtacacgctgtgcaggcaggaatctttgtggaaagaatgtaccgtaagacctaccacatggttggcctggcgtacccagccgctgtcatcgtgacgctgaaagacgttgataagtggtcattcgacgtgttcgcattaaatgaagcgtccggggaacactccctcaaatttatgatatatgaattgttcacccggtacgacttaataaatcgctttaagatacccgtcagctgcctcataactttcgctgaggcattggaggtgggctatagtaagtacaagaatccctatcacaatttgatccatgctgcagacgtgacgcagaccgtgcactacattatgctccacacagggatcatgcactggctgacagagctggaaatactagctatggttttcgccgccgcgattcacgactacgagcatacgggcaccacaaataacttccacatccagactagatcagatgtggccatattgtacaacgataggtctgtgctggaaaatcatcatgttagcgcagcataccgcctgatgcaggaggaggagatgaatatcctgatcaatctgtctaaggacgattggcgggatctgaggaatctcgttatcgagatggtgctgtcaaccgatatgagcgggcattttcaacaaatcaaaaacatcagaaactccctgcagcagccagagggaattgatcgtgctaaaacaatgagcctgattttgcacgccgcggatatctcccacccagccaagagctggaaactccattaccgatggacaatggctctcatggaggaattttttctgcaaggagataaggaagcagagctgggactgcctttcagtcctctgtgtgatcgtaaaagcacgatggtggctcagtctcagatcggctttatagattttatcgtggaaccaaccttctccctgcttacagactctactgagaaaatcgtgatcccactgattgaggaggcctccaaggccgaaacgagtagctatgtggcgtcctcctcaacaaccatcgtagggctgcacatagccgacgccttgcgccgaagcaatacgaaaggctcaatgtccgatgggtcctactcacctgattattctctggcagccgtcgacctgaagtcattcaagaacaacctcgtcgatataatccaacagaacaaagagaggtggaaagagctggctgcacagggtgagtcagatttgcacaagaactcggaggacctagtcaacgctgaagaaaagcacgacgaaacccatagctag

SEQ ID NO: 152093 - DNA, 1638 bp, Artificial Sequence
  derived and/or modified sequence
atgggcagcagcgccacagaaattgaggagctggagaacaccaccttcaagtacctgaccggggagcagacagagaagatgtggcagaggctgaagggcatcctgcgctgcctggtgaagcagctggagagaggagatgtgaatgtggtggacctgaagaagaacatcgagtatgctgcctctgtgctggaggccgtgtacattgatgagacccggcggctgctggacacagaagatgagctgagtgacatccagacagacagcgtgcccagcgaggtgcgggactggctggccagcaccttcaccaggaagatgggcatgaccaagaagaagccagaggagaagcccaagttccgcagcatcgtgcatgctgtgcaggccggcatctttgtggagaggatgtacaggaagacctaccacatggtgggcctggcctacccagctgctgtgattgtgaccctgaaggatgtggacaagtggagctttgatgtgtttgccctgaatgaggccagcggggagcacagcctgaagttcatgatctatgagctgttcaccaggtatgacctgatcaaccgcttcaagatccctgtgtcctgcctgatcacctttgctgaggccctggaggtgggctacagcaagtacaagaacccctaccacaacctgattcatgctgctgatgtgacccagacagtgcactacatcatgctgcacacaggcatcatgcactggctgacagagctggagatcctggccatggtgtttgctgctgccatccatgactatgagcacacaggcaccaccaacaacttccacatccagaccaggagtgatgtggccatcctgtacaatgacagatctgtgctggagaaccaccacgtgtctgctgcctaccgcctgatgcaggaggaggagatgaacatcctgatcaacctgagcaaggatgactggagggacctgaggaacctggtgattgagatggtgctgagcacagacatgagcggccacttccagcagatcaagaacatccggaacagcctgcagcagcctgagggcatcgaccgggccaagaccatgagcctcatcctgcacgccgctgacatcagccacccagccaagtcctggaagctgcactaccgctggaccatggccctgatggaggagttcttcctgcagggcgacaaggaggccgagctgggcctgcccttcagccccctgtgtgacaggaagagcaccatggtggcccagagccagatcggcttcatcgacttcatcgtggagcccaccttcagcctgctgacagacagcacagagaagatcgtcatccccctcatcgaggaggccagcaaggccgagaccagcagctatgtggccagcagcagcaccaccatcgtgggcctgcacatcgcagatgccctgcggcgcagcaacaccaagggctccatgtctgatggcagctacagcccagactacagcctggccgctgtggacctgaagagcttcaagaacaacctggtggacatcatccagcagaacaaggagcgctggaaggagctggccgcccagggcgagagtgacctgcacaagaacagcgaggacctggtgaatgctgaggagaagcatgatgagacccacagctag

SEQ ID NO: 152094 - DNA, 1590 bp, Artificial Sequence
  derived and/or modified sequence
atggatgaccacgtgaccatcaggaagaagcacctgcagaggcccatcttccggctgcgctgcctggtgaagcagctggagagaggagatgtgaatgtggtggacctgaagaagaacatcgagtatgctgcctctgtgctggaggccgtgtacattgatgagacccggcggctgctggacacagaagatgagctgagtgacatccagacagacagcgtgcccagcgaggtgcgggactggctggccagcaccttcaccaggaagatgggcatgaccaagaagaagccagaggagaagcccaagttccgcagcatcgtgcatgctgtgcaggccggcatctttgtggagaggatgtacaggaagacctaccacatggtgggcctggcctacccagctgctgtgattgtgaccctgaaggatgtggacaagtggagctttgatgtgtttgccctgaatgaggccagcggggagcacagcctgaagttcatgatctatgagctgttcaccaggtatgacctgatcaaccgcttcaagatccctgtgtcctgcctgatcacctttgctgaggccctggaggtgggctacagcaagtacaagaacccctaccacaacctgattcatgctgctgatgtgacccagacagtgcactacatcatgctgcacacaggcatcatgcactggctgacagagctggagatcctggccatggtgtttgctgctgccatccatgactatgagcacacaggcaccaccaacaacttccacatccagaccaggagtgatgtggccatcctgtacaatgacagatctgtgctggagaaccaccacgtgtctgctgcctaccgcctgatgcaggaggaggagatgaacatcctgatcaacctgagcaaggatgactggagggacctgaggaacctggtgattgagatggtgctgagcacagacatgagcggccacttccagcagatcaagaacatccggaacagcctgcagcagcctgagggcatcgaccgggccaagaccatgagcctcatcctgcacgccgctgacatcagccacccagccaagtcctggaagctgcactaccgctggaccatggccctgatggaggagttcttcctgcagggcgacaaggaggccgagctgggcctgcccttcagccccctgtgtgacaggaagagcaccatggtggcccagagccagatcggcttcatcgacttcatcgtggagcccaccttcagcctgctgacagacagcacagagaagatcgtcatccccctcatcgaggaggccagcaaggccgagaccagcagctatgtggccagcagcagcaccaccatcgtgggcctgcacatcgcagatgccctgcggcgcagcaacaccaagggctccatgtctgatggcagctacagcccagactacagcctggccgctgtggacctgaagagcttcaagaacaacctggtggacatcatccagcagaacaaggagcgctggaaggagctggccgcccagggcgagagtgacctgcacaagaacagcgaggacctggtgaatgctgaggagaagcatgatgagacccacagctag

SEQ ID NO: 152095 - DNA, 1659 bp, Artificial Sequence
  derived and/or modified sequence
atgggcagcagcgccacagaaattgaggagctggagaacaccaccttcaagtacctgaccggggagcagacagagaagatgtggcagaggctgaagggcatcctgcgctgcctggtgaagcagctggagagaggagatgtgaatgtggtggacctgaagaagaacatcgagtatgctgcctctgtgctggaggccgtgtacattgatgagacccggcggctgctggacacagaagatgagctgagtgacatccagacagacagcgtgcccagcgaggtgcgggactggctggccagcaccttcaccaggaagatgggcatgaccaagaagaagccagaggagaagcccaagttccgcagcatcgtgcatgctgtgcaggccggcatctttgtggagaggatgtacaggaagacctaccacatggtgggcctggcctacccagctgctgtgattgtgaccctgaaggatgtggacaagtggagctttgatgtgtttgccctgaatgaggccagcggggagcacagcctgaagttcatgatctatgagctgttcaccaggtatgacctgatcaaccgcttcaagatccctgtgtcctgcctgatcacctttgctgaggccctggaggtgggctacagcaagtacaagaacccctaccacaacctgattcatgctgctgatgtgacccagacagtgcactacatcatgctgcacacaggcatcatgcactggctgacagagctggagatcctggccatggtgtttgctgctgccatccatgactatgagcacacaggcaccaccaacaacttccacatccagaccaggagtgatgtggccatcctgtacaatgacagatctgtgctggagaaccaccacgtgtctgctgcctaccgcctgatgcaggaggaggagatgaacatcctgatcaacctgagcaaggatgactggagggacctgaggaacctggtgattgagatggtgctgagcacagacatgagcggccacttccagcagatcaagaacatccggaacagcctgcagcagcctgagggcatcgaccgggccaagaccatgagcctcatcctgcacgccgctgacatcagccacccagccaagtcctggaagctgcactaccgctggaccatggccctgatggaggagttcttcctgcagggcgacaaggaggccgagctgggcctgcccttcagccccctgtgtgacaggaagagcaccatggtggcccagagccagatcggcttcatcgacttcatcgtggagcccaccttcagcctgctgacagacagcacagagaagatcgtcatccccctcatcgaggaggccagcaaggccgagaccagcagctatgtggccagcagcagcaccaccatcgtgggcctgcacatcgcagatgccctgcggcgcagcaacaccaagggctccatgtctgatggcagctacagcccagactacagcctggccgctgtggacctgaagagcttcaagaacaacctggtggacatcatccagcagaacaaggagcgctggaaggagctggccgcccagggctctgtggtgtatgaggccctgctgcccagcctgagcgtcttcaccagccccctgcgggtgtggatcaccagcagccgcttcctgctgctgtag

SEQ ID NO: 152096 - DNA, 1326 bp, Artificial Sequence
  derived and/or modified sequence
atgggcatgaccaagaagaagccagaggagaagcccaagttccgcagcatcgtgcatgctgtgcaggccggcatctttgtggagaggatgtacaggaagacctaccacatggtgggcctggcctacccagctgctgtgattgtgaccctgaaggatgtggacaagtggagctttgatgtgtttgccctgaatgaggccagcggggagcacagcctgaagttcatgatctatgagctgttcaccaggtatgacctgatcaaccgcttcaagatccctgtgtcctgcctgatcacctttgctgaggccctggaggtgggctacagcaagtacaagaacccctaccacaacctgattcatgctgctgatgtgacccagacagtgcactacatcatgctgcacacaggcatcatgcactggctgacagagctggagatcctggccatggtgtttgctgctgccatccatgactatgagcacacaggcaccaccaacaacttccacatccagaccaggagtgatgtggccatcctgtacaatgacagatctgtgctggagaaccaccacgtgtctgctgcctaccgcctgatgcaggaggaggagatgaacatcctgatcaacctgagcaaggatgactggagggacctgaggaacctggtgattgagatggtgctgagcacagacatgagcggccacttccagcagatcaagaacatccggaacagcctgcagcagcctgagggcatcgaccgggccaagaccatgagcctcatcctgcacgccgctgacatcagccacccagccaagtcctggaagctgcactaccgctggaccatggccctgatggaggagttcttcctgcagggcgacaaggaggccgagctgggcctgcccttcagccccctgtgtgacaggaagagcaccatggtggcccagagccagatcggcttcatcgacttcatcgtggagcccaccttcagcctgctgacagacagcacagagaagatcgtcatccccctcatcgaggaggccagcaaggccgagaccagcagctatgtggccagcagcagcaccaccatcgtgggcctgcacatcgcagatgccctgcggcgcagcaacaccaagggctccatgtctgatggcagctacagcccagactacagcctggccgctgtggacctgaagagcttcaagaacaacctggtggacatcatccagcagaacaaggagcgctggaaggagctggccgcccagggcgagagtgacctgcacaagaacagcgaggacctggtgaatgctgaggagaagcatgatgagacccacagctag

SEQ ID NO: 152097 - DNA, 1638 bp, Artificial Sequence
  derived and/or modified sequence
atgggcagcagcgccaccgagatcgaggagctggagaacaccaccttcaagtatcttactggtgagcaaaccgagaagatgtggcagcggcttaagggcattctccgctgcctggtgaagcagctcgaacgaggcgacgtaaacgttgtcgacttgaaaaaaaatatcgaatacgcagcctccgtgctggaggccgtgtatatagacgaaacgcgaaggttacttgacacagaagatgaactctctgacatccagactgattccgtgccttccgaggtgagagattggcttgcctccactttcacgcgcaagatgggtatgactaaaaagaaaccagaggaaaaacctaagttccgctcaattgtccacgccgtgcaggcgggcatattcgtggaaagaatgtataggaaaacctatcacatggtgggactcgcgtaccctgccgctgtgatcgtcactctaaaagatgttgacaaatggagttttgatgtgtttgcccttaatgaggcgtccggtgagcactctctcaaatttatgatatatgaactgttcacaaggtatgacctgatcaaccggttcaaaatcccggtctcttgcttaattacctttgcggaggcgctggaagtgggctactcaaaatacaagaacccctaccataatctcattcacgcggccgatgttacgcagaccgtacattacataatgctgcacactggcatcatgcactggttaaccgagctggaaattttggcaatggtttttgccgccgcgatccacgactatgaacatacgggaacaacaaataactttcatatacaaacccgtagtgatgtggccatcctgtataatgatagaagcgtattggagaatcaccacgtctccgctgcttatcgtctcatgcaggaagaagaaatgaatatcctgattaatctgagcaaggatgattggagggacctcagaaaccttgtgatcgagatggtgctgtccaccgatatgtctggccacttccagcaaatcaagaatatccgaaattccctgcaacagccagagggaattgaccgggccaaaaccatgtctttgatcttacacgctgccgatatcagtcatcctgccaagtcttggaaactccattacagatggacaatggccctcatggaagaatttttcctccaaggcgacaaggaagcagagttggggcttcccttttctcccctctgcgatagaaaatccacaatggtggctcaatctcagatcggattcatcgattttattgtggaaccgaccttctcattgcttactgattctaccgagaaaatagtgatcccccttatcgaagaggcaagtaaagcagaaacctcctcgtacgtggccagctcctctactaccatcgtgggtctgcacattgccgatgcactccggcgctcaaatactaagggctctatgagcgacggaagttacagtcccgattactcactggccgcagtcgacctgaagtctttcaagaacaacctggttgacatcatccaacaaaataaagagagatggaaggaactggccgcacagggggagtctgatctgcacaagaatagcgaagacctggtgaatgccgaagaaaaacacgacgaaacccactcctag

SEQ ID NO: 152098 - DNA, 1590 bp, Artificial Sequence
  derived and/or modified sequence
atggacgaccacgtgaccatccggaagaagcacctgcagcggcccatctttagactccgctgcctagtgaagcaactcgagcggggagacgtgaacgtggtggatttaaaaaagaatatagagtacgcggctagcgtcctggaagctgtctacatcgacgagactcggagactgttggatacagaagacgagctctcagatattcaaactgatagtgtgccctctgaagtgcgggactggctcgccagcacattcacccgcaagatgggtatgaccaagaaaaagcccgaggagaaaccaaagtttcgtagtatcgtccatgctgtccaggctggcatttttgtcgagcgaatgtacaggaagacctatcatatggtcggcctggcctacccagctgcggtgatcgtcaccttaaaggatgtggacaaatggagctttgacgtattcgcactgaacgaggcctccggggagcactccctcaaatttatgatctatgagctgttcacacgttacgacctgataaataggttcaagatcccggtcagctgcctcatcacttttgctgaggcattggaggtcggctactcgaagtacaagaatccttaccacaacttaatccatgccgctgacgtgacacaaacagtacactacataatgctccacacaggtataatgcactggttaacagaattagagatcctagcgatggtctttgctgccgcgatccatgactacgaacataccggcactaccaataactttcatattcagactcgctctgatgtggctattttgtataatgatcggtccgtgctggaaaatcatcatgtgagtgcagcgtataggttaatgcaggaggaggagatgaacatcctgattaacttatcaaaggatgattggcgcgacctccggaacctggtgattgagatggtactgtccaccgacatgagcgggcacttccagcagattaagaacattcgcaacagcttacaacagcctgaaggcatcgatcgtgcaaaaaccatgtcattaatactgcacgccgcagacatctcccatccggcaaagtcttggaaacttcactatagatggacgatggctttgatggaagaattcttccttcaaggggacaaagaggctgagctaggcctgccgttttcgcccctgtgcgatagaaaaagtaccatggtagcccagagccagattggcttcatcgactttatagtcgaaccaactttttccttattgaccgacagcacggaaaaaatagtcatcccgctgatcgaggaggcctctaaggccgagacaagcagctacgtggcgagctcttccacaacaatcgtagggttacacatagccgatgcacttcgccggtcaaacacgaaggggagcatgagcgacggttcctactccccagactactcactcgcggccgtggaccttaagtcgtttaaaaacaatttagtggacatcattcagcagaacaaagagcggtggaaggaactggcggctcagggcgagagcgatctgcataagaattcggaagatctggtcaatgccgaagagaagcacgatgagacgcattcctag

SEQ ID NO: 152099 - DNA, 1638 bp, Artificial Sequence
  derived and/or modified sequence
atgggcagcagcgccaccgagatcgaggagctggagaacaccaccttcaagtatctgactggagagcaaacagagaagatgtggcagaggcttaaaggaattctgaggtgtttagtgaaacagttagaacgcggggatgtaaatgtggttgatctgaaaaaaaatatcgaatatgccgccagcgtcttggaagcagtctatattgatgaaacgcgccggttgctggatacagaggatgagcttagcgatatacagaccgattctgtgcccagcgaagtcagagactggttagcctcaacctttactaggaagatggggatgaccaagaaaaaacctgaagagaaacctaagttccgcagtatcgtgcatgcagtacaggctggtatcttcgtcgagagaatgtatcggaaaacttaccatatggtcgggcttgcctatcccgccgctgtgatagtgaccctcaaagacgtagataagtggtctttcgatgttttcgctctgaacgaggcgtccggcgagcactctcttaaattcatgatctacgagctgtttactagatatgatctcatcaaccgctttaaaatacctgtgagctgccttatcacttttgctgaggctcttgaggttggctacagtaaatacaagaacccatatcacaatctcatacacgctgctgacgtgacccagactgtgcattacatcatgctgcacactgggatcatgcactggctaacagaactggaaattctggctatggtgttcgctgccgctatccacgattatgaacataccggcactacaaacaatttccatattcagacccgttcagacgtggctatcctgtataacgacagaagcgtcttggagaatcatcatgtctcagcagcgtaccgtctaatgcaggaggaggaaatgaatattttaattaatctttcaaaagatgattggcgggacctcaggaacctggtaatcgagatggtgcttagcacagacatgtcggggcatttccagcagatcaagaacatcaggaacagtcttcagcagcctgagggcatcgaccgcgccaagactatgtccctcatactacatgcggccgacattagccaccctgctaaatcttggaaactgcactataggtggacaatggccctgatggaagagttctttttgcagggcgacaaagaagctgagctgggattacctttctctcccctgtgcgatcggaaatcgacaatggttgcacagagtcagatcggctttatcgacttcatcgtcgagcccacattttctctgttaaccgatagtaccgagaagattgtcattccactcattgaagaggctagtaaagctgaaacgagctcctatgtggctagcagctcaaccacgatcgtgggactgcacatcgctgatgccttaagacgcagcaacacaaagggctctatgtcagatgggagttattctccagattattccctggccgccgtcgacctgaagagcttcaagaacaatctggtggacatcattcaacagaacaaggaacgctggaaggaactggccgctcaaggggaatccgacctccacaagaatagcgaagatctcgtcaatgctgaggagaagcacgacgaaactcatagttag

SEQ ID NO: 152100 - DNA, 1659 bp, Artificial Sequence
  derived and/or modified sequence
atgggcagcagcgccaccgagatcgaggagctggagaacaccacctttaagtacctcactggcgagcagactgaaaagatgtggcagcggctaaaagggattctccgctgtttggtgaaacaactcgagcgtggtgatgttaacgtagtcgacctgaagaaaaacatcgaatatgcggcctcagttctcgaggcggtctatatcgatgaaacaagaaggctgctcgacactgaagatgagctgtcggatatacagactgacagcgtgcctagcgaggtgcgcgactggctggccagcacatttactcgaaaaatgggcatgaccaagaaaaaaccagaggagaaacccaagtttcgctccatcgtgcatgccgtgcaagccggtatattcgtggaaagaatgtaccgcaaaacttatcacatggtaggccttgcatatcccgcagccgtgatcgtgactcttaaagacgtggacaagtggtcattcgatgtgttcgcattaaatgaggcctctggcgaacattccctcaaatttatgatctacgagctgttcacccgttatgatttgataaatagattcaaaattcccgtgagttgcttgatcacgtttgctgaggcactggaggtgggctactctaagtataaaaatccataccataacttgatccatgccgccgacgtgacccagaccgtgcattacattatgcttcacaccggcattatgcactggttgacagagttagaaatattggcaatggtcttcgcggcagcaatccacgattatgagcatactgggaccactaacaactttcacatccaaacgcggagcgacgtcgctatcctctacaacgacagatccgtactggagaaccaccacgtatccgcagcctaccggcttatgcaggaggaggagatgaacatccttatcaatctatccaaagatgattggcgtgatctacgtaatctcgtcattgaaatggttctttccacagatatgtcaggccactttcagcagattaagaacattcgcaactccttgcagcagcctgagggaattgatcgggcaaagaccatgagcctcatactgcacgcagccgacatatctcatcccgccaaaagctggaaactgcactaccgatggaccatggccctcatggaggaattttttctgcaaggcgacaaggaagcggaacttggactgcctttctccccactgtgtgaccgcaagtctacgatggtcgcccaatcccagattggattcattgacttcatagtggagcccacattcagcttactcactgacagcacggagaaaatagtgatacctctaatcgaggaggccagtaaagccgagacgagttcttacgttgccagcagtagcacaacgatcgtgggcctgcacatcgccgacgctctccggagaagtaacaccaaaggcagcatgtcggacggctcatattctcctgattacagtctggccgcggtagacctgaagagcttcaaaaacaatttggttgacattattcaacagaataaagagaggtggaaagaacttgccgcacagggctccgtggtatatgaggcactgcttccaagtctgtcagtgtttaccagccccctacgggtatggatcacaagcagtagatttttgctgttatag

SEQ ID NO: 152101 - DNA, 1326 bp, Artificial Sequence
  derived and/or modified sequence
atgggcatgaccaagaagaagcccgaggagaagcccaagttccggtccattgtgcacgccgtgcaggccgggatctttgtggaaaggatgtacagaaagacatatcatatggttggcctggcctacccagccgctgtgatcgtgacactcaaagacgtggacaagtggagctttgatgtgttcgcactcaacgaggcctctggcgagcattccctgaagttcatgatctacgagttgttcacaaggtatgacttgataaaccggttcaaaattccagtatcttgcttaatcacttttgcagaggccctcgaggttgggtactccaagtacaagaatccctaccacaatctaattcacgccgcagatgtcacccaaaccgtccactatatcatgttgcacacagggattatgcactggctgactgaactcgaaattcttgctatggtttttgcggccgcaattcacgactatgagcatacggggaccaccaataatttccatatacaaaccaggtccgatgtcgcaatcctgtataacgatcgatcagttcttgagaaccaccatgtgtccgccgcataccggttgatgcaagaagaggaaatgaatatcctgatcaatctgtccaaagatgactggcgcgatctgcgcaatctggtaatagagatggtcttgagcacggacatgagtggacattttcagcaaattaagaacattcggaactcgctgcagcaacccgagggcattgatcgggccaaaaccatgtccctcatcttgcatgccgctgatataagccacccggccaagagctggaaacttcattatcgctggacgatggctctgatggaggagttctttctgcagggggataaagaggcagaactcggcctgcctttttcccccctgtgtgatcgtaagtcaaccatggtcgcccagtctcagattggcttcatcgatttcattgtagaaccaactttttcattactgactgacagcacggagaaaatcgtgatacctctgatagaagaggcttccaaggcagaaacttctagctacgtcgctagctcctctaccacaattgtggggctgcacatcgctgacgcgctccgtaggagcaacacaaaagggtcgatgagcgacggcagctactctcctgactactcactcgcagcagtggatctcaagtcctttaaaaacaatctggttgatatcattcaacagaacaaagaaaggtggaaggagctcgcagcccagggagagagcgacctgcataagaactccgaagatcttgtgaacgctgaggaaaagcacgacgaaacacattcctag

SEQ ID NO: 152102 - DNA, 1638 bp, Artificial Sequence
  derived and/or modified sequence
atggggtctagtgccacagagattgaagaattggaaaacaccacttttaagtatcttacaggagaacagactgaaaaaatgtggcagcgcctgaaaggaatactaagatgcttggtgaagcagctggaaagaggtgatgttaacgtcgtcgacttaaagaagaatattgaatatgcggcatctgtgctggaagcagtttatatcgatgaaacaagaagacttctggatactgaagatgagctcagtgacattcagactgactcagtcccatctgaagtccgggactggttggcttctacctttacacggaaaatggggatgacaaaaaagaaacctgaggaaaaaccaaaatttcggagcattgtgcatgctgttcaagctggaatttttgtggaaagaatgtaccgaaaaacatatcatatggttggtttggcatatccagcagctgtcatcgtaacattaaaggatgttgataaatggtctttcgatgtatttgccctaaatgaagcaagtggagagcatagtctgaagtttatgatttatgaactgtttaccagatatgatcttatcaaccgtttcaagattcctgtttcttgcctaatcacctttgcagaagctttagaagttggttacagcaagtacaaaaatccatatcacaatttgattcatgcagctgatgtcactcaaactgtgcattacataatgcttcatacaggtatcatgcactggctcactgaactggaaattttagcaatggtctttgctgctgccattcatgattatgagcatacagggacaacaaacaactttcacattcagacaaggtcagatgttgccattttgtataatgatcgctctgtccttgagaatcaccacgtgagtgcagcttatcgacttatgcaagaagaagaaatgaatatcttgataaatttatccaaagatgactggagggatcttcggaacctagtgattgaaatggttttatctacagacatgtcaggtcacttccagcaaattaaaaatataagaaacagtttgcagcagcctgaagggattgacagagccaaaaccatgtccctgattctccacgcagcagacatcagccacccagccaaatcctggaagctgcattatcggtggaccatggccctaatggaggagtttttcctgcagggagataaagaagctgaattagggcttccattttccccactttgtgatcggaagtcaaccatggtggcccagtcacaaataggtttcatcgatttcatagtagagccaacattttctcttctgacagactcaacagagaaaattgttattcctcttatagaggaagcctcaaaagccgaaacttcttcctatgtggcaagcagctcaaccaccattgtggggttacacattgctgatgcactaagacgatcaaatacaaaaggctccatgagtgatgggtcctattccccagactactcccttgcagcagtggacctgaagagtttcaagaacaacctggtggacatcattcagcagaacaaagagaggtggaaagagttagctgcacaaggtgaatctgatcttcataagaactcagaagacttagtaaatgctgaagaaaaacatgatgagacacattcatag

SEQ ID NO: 152103 - DNA, 2034 bp, Artificial Sequence
  derived and/or modified sequence
ggagcttgaccagcatgtggaaggagagctctcatggctgcaataacttagggagttcctacctggatgacactggggtaggaagttttctgtttgttttgttctgtttcggagggtcccgtgcacttctcttgcctggatcaacgtgactcttggtggtttttgcacaccctgctctgtgggggagtgccccaacgtgcctgtcttatgtggcctctatggacacactgctcagctggcagagaacagggaagttttctcccagcacccaaaaagagaaagaggaaactactttttctttctgggctccttgcagcacaatagatcaggataagcttccacatttcctctctggagtttctggagtggtttccaggaagaagttaaaccttcacctttaaatggatgaccatgtcacaatcaggaagaaacatctccaaagacccatctttagactaagatgcttggtgaagcagctggaaagaggtgatgttaacgtcgtcgacttaaagaagaatattgaatatgcggcatctgtgctggaagcagtttatatcgatgaaacaagaagacttctggatactgaagatgagctcagtgacattcagactgactcagtcccatctgaagtccgggactggttggcttctacctttacacggaaaatggggatgacaaaaaagaaacctgaggaaaaaccaaaatttcggagcattgtgcatgctgttcaagctggaatttttgtggaaagaatgtaccgaaaaacatatcatatggttggtttggcatatccagcagctgtcatcgtaacattaaaggatgttgataaatggtctttcgatgtatttgccctaaatgaagcaagtggagagcatagtctgaagtttatgatttatgaactgtttaccagatatgatcttatcaaccgtttcaagattcctgtttcttgcctaatcacctttgcagaagctttagaagttggttacagcaagtacaaaaatccatatcacaatttgattcatgcagctgatgtcactcaaactgtgcattacataatgcttcatacaggtatcatgcactggctcactgaactggaaattttagcaatggtctttgctgctgccattcatgattatgagcatacagggacaacaaacaactttcacattcagacaaggtcagatgttgccattttgtataatgatcgctctgtccttgagaatcaccacgtgagtgcagcttatcgacttatgcaagaagaagaaatgaatatcttgataaatttatccaaagatgactggagggatcttcggaacctagtgattgaaatggttttatctacagacatgtcaggtcacttccagcaaattaaaaatataagaaacagtttgcagcagcctgaagggattgacagagccaaaaccatgtccctgattctccacgcagcagacatcagccacccagccaaatcctggaagctgcattatcggtggaccatggccctaatggaggagtttttcctgcagggagataaagaagctgaattagggcttccattttccccactttgtgatcggaagtcaaccatggtggcccagtcacaaataggtttcatcgatttcatagtagagccaacattttctcttctgacagactcaacagagaaaattgttattcctcttatagaggaagcctcaaaagccgaaacttcttcctatgtggcaagcagctcaaccaccattgtggggttacacattgctgatgcactaagacgatcaaatacaaaaggctccatgagtgatgggtcctattccccagactactcccttgcagcagtggacctgaagagtttcaagaacaacctggtggacatcattcagcagaacaaagagaggtggaaagagttagctgcacaaggtgaatctgatcttcataagaactcagaagacttagtaaatgctgaagaaaaacatgatgagacacattcataggcccgaaacaccttaaagacttctgtcattttaaacatgagag

SEQ ID NO: 152104 - DNA, 1659 bp, Artificial Sequence
  derived and/or modified sequence
atggggtctagtgccacagagattgaagaattggaaaacaccacttttaagtatcttacaggagaacagactgaaaaaatgtggcagcgcctgaaaggaatactaagatgcttggtgaagcagctggaaagaggtgatgttaacgtcgtcgacttaaagaagaatattgaatatgcggcatctgtgctggaagcagtttatatcgatgaaacaagaagacttctggatactgaagatgagctcagtgacattcagactgactcagtcccatctgaagtccgggactggttggcttctacctttacacggaaaatggggatgacaaaaaagaaacctgaggaaaaaccaaaatttcggagcattgtgcatgctgttcaagctggaatttttgtggaaagaatgtaccgaaaaacatatcatatggttggtttggcatatccagcagctgtcatcgtaacattaaaggatgttgataaatggtctttcgatgtatttgccctaaatgaagcaagtggagagcatagtctgaagtttatgatttatgaactgtttaccagatatgatcttatcaaccgtttcaagattcctgtttcttgcctaatcacctttgcagaagctttagaagttggttacagcaagtacaaaaatccatatcacaatttgattcatgcagctgatgtcactcaaactgtgcattacataatgcttcatacaggtatcatgcactggctcactgaactggaaattttagcaatggtctttgctgctgccattcatgattatgagcatacagggacaacaaacaactttcacattcagacaaggtcagatgttgccattttgtataatgatcgctctgtccttgagaatcaccacgtgagtgcagcttatcgacttatgcaagaagaagaaatgaatatcttgataaatttatccaaagatgactggagggatcttcggaacctagtgattgaaatggttttatctacagacatgtcaggtcacttccagcaaattaaaaatataagaaacagtttgcagcagcctgaagggattgacagagccaaaaccatgtccctgattctccacgcagcagacatcagccacccagccaaatcctggaagctgcattatcggtggaccatggccctaatggaggagtttttcctgcagggagataaagaagctgaattagggcttccattttccccactttgtgatcggaagtcaaccatggtggcccagtcacaaataggtttcatcgatttcatagtagagccaacattttctcttctgacagactcaacagagaaaattgttattcctcttatagaggaagcctcaaaagccgaaacttcttcctatgtggcaagcagctcaaccaccattgtggggttacacattgctgatgcactaagacgatcaaatacaaaaggctccatgagtgatgggtcctattccccagactactcccttgcagcagtggacctgaagagtttcaagaacaacctggtggacatcattcagcagaacaaagagaggtggaaagagttagctgcacaaggtagtgttgtttatgaggccttactgccatctctctctgtcttcacttctcctctaagagtttggattacttcttctagatttcttcttctatag

SEQ ID NO: 152105 - DNA, 2116 bp, Artificial Sequence
  derived and/or modified sequence
accacttttaagtatcttacaggagaacagactgaaaaaatgtggcagcgcctgaaaggaatagccatatgtgagtggaaagatcttgaattgttcctgctcttcttgacagaagaaaataaaaactaagatgcttggtgaagcagctggaaagaggtgatgttaacgtcgtcgacttaaagaagaatattgaatatgcggcatctgtgctggaagcagtttatatcgatgaaacaagaagacttctggatactgaagatgagctcagtgacattcagactgactcagtcccatctgaagtccgggactggttggcttctacctttacacggaaaatggggatgacaaaaaagaaacctgaggaaaaaccaaaatttcggagcattgtgcatgctgttcaagctggaatttttgtggaaagaatgtaccgaaaaacatatcatatggttggtttggcatatccagcagctgtcatcgtaacattaaaggatgttgataaatggtctttcgatgtatttgccctaaatgaagcaagtggagagcatagtctgaagtttatgatttatgaactgtttaccagatatgatcttatcaaccgtttcaagattcctgtttcttgcctaatcacctttgcagaagctttagaagttggttacagcaagtacaaaaatccatatcacaatttgattcatgcagctgatgtcactcaaactgtgcattacataatgcttcatacaggtatcatgcactggctcactgaactggaaattttagcaatggtctttgctgctgccattcatgattatgagcatacagggacaacaaacaactttcacattcagacaaggtcagatgttgccattttgtataatgatcgctctgtccttgagaatcaccacgtgagtgcagcttatcgacttatgcaagaagaagaaatgaatatcttgataaatttatccaaagatgactggagggatcttcggaacctagtgattgaaatggttttatctacagacatgtcaggtcacttccagcaaattaaaaatataagaaacagtttgcagcagcctgaagggattgacagagccaaaaccatgtccctgattctccacgcagcagacatcagccacccagccaaatcctggaagctgcattatcggtggaccatggccctaatggaggagtttttcctgcagggagataaagaagctgaattagggcttccattttccccactttgtgatcggaagtcaaccatggtggcccagtcacaaataggtttcatcgatttcatagtagagccaacattttctcttctgacagactcaacagagaaaattgttattcctcttatagaggaagcctcaaaagccgaaacttcttcctatgtggcaagcagctcaaccaccattgtggggttacacattgctgatgcactaagacgatcaaatacaaaaggctccatgagtgatgggtcctattccccagactactcccttgcagcagtggacctgaagagtttcaagaacaacctggtggacatcattcagcagaacaaagagaggtggaaagagttagctgcacaaggtgaatctgatcttcataagaactcagaagacttagtaaatgctgaagaaaaacatgatgagacacattcataggcccgaaacaccttaaagacttctgtcattttaaacatgagaggacaatgaaatcagcatgaaaacatcctaaattctcaactttccacaaagctatggctcttctttcaacatagaattggattgggccattttaattgactcctatacaaggaattaagaagaacataaattttgagctagtaactctggccaaataaatacactcaagtttttatcagagtttttggccagtgcttctgccatttttttccctccacaatttggccttcttcaatcaagccagataaatttttgagacaaaagtcagacagtttttaatttttcttgctttgaaccctgtcataatgactgtgcaatacatgtgcagaagatgaggtattttaaaatttacttccttgcactgtcttacacagagtgctataactataaatttttcaaggtcttaaataaaa

SEQ ID NO: 152106 - DNA, 1638 bp, Artificial Sequence
  derived and/or modified sequence
atgggttcgtcggcaacagagatagaagagctcgaaaataccaccttcaagtaccttacaggagaacagacagagaagatgtggcagaggctgaaaggcattctccgctgtctggtgaaacagctcgagcgcggagacgtgaacgtcgttgacttgaaaaaaaatatagagtacgcagcctccgtactggaggctgtgtatatagatgaaacacggcgtctacttgacaccgaggatgaactaagtgacattcagactgactccgttcccagcgaggtgcgggactggttggcttccacattcaccaggaaaatggggatgaccaagaagaagcccgaggagaagcctaagtttaggagtatcgtgcatgccgtgcaggcagggatttttgtggagcggatgtacagaaagacctaccacatggtcggactggcctaccccgcagctgtgatagtcacactgaaggacgttgacaagtggtcctttgatgtgtttgccttaaatgaggcttcaggggaacacagcctgaaatttatgatctatgagttgttcacaagatacgacctcattaatagatttaaaatcccagtgagctgcttgattacatttgccgaggctttggaagtgggctactccaaatacaaaaatccatatcataatctcatacacgccgctgatgtgacacagacagtgcactatattatgttacacaccgggatcatgcattggctgaccgagcttgagatactggccatggtgttcgcagctgctatacacgattatgagcacaccggaactacaaataactttcacatccaaaccagatcagatgtcgccatcctctataatgatcgctctgtcttagaaaatcatcacgttagcgcagcgtatcgactgatgcaggaagaggaaatgaatatcctcatcaaccttagtaaagatgattggcgagatctcaggaacttagtcatcgaaatggtcctgtcaactgatatgtcgggccactttcagcagataaagaatatcaggaactccctgcaacagccggaaggtattgatcgcgctaagactatgagtctgatcctgcacgccgctgatatctcgcatcccgcaaagagctggaagctacactatcgctggactatggctctcatggaggagttttttctgcaaggggacaaggaagccgagctaggacttcctttttctcccttatgtgacagaaaaagcactatggtggcacagagtcagataggtttcatcgacttcatcgttgaaccaaccttcagtctcctcaccgactcaaccgagaagatcgtgatccccctgatcgaggaagcaagtaaagccgagacttctagctacgtggcttcttctagcactactattgtggggctgcatatcgccgatgcactccgcaggagcaacacaaaggggtcaatgagtgacggcagctacagtcctgactactccttagccgctgtcgacctgaaaagttttaaaaataacctggtggacatcatccagcagaataaagaacgttggaaagagttggccgctcagggtgagagcgatctgcataaaaatagtgaggatctggtcaacgctgaagaaaaacacgacgaaacccacagttag

SEQ ID NO: 152107 - DNA, 1590 bp, Artificial Sequence
  derived and/or modified sequence
atggacgatcacgtgaccatccggaaaaagcatttacagcggcctatctttagactgcggtgtctcgtgaaacagctggagcgcggtgatgtcaacgtggttgatctgaaaaagaacatcgagtatgctgcgtccgtgttggaagctgtgtacatcgacgagacaaggcggcttctcgacaccgaagatgagctgagtgacattcagacagatagtgttccttccgaagtgcgcgactggttggctagcacttttacaagaaaaatggggatgacaaagaagaagccggaggagaaacccaaattccgcagtattgtgcatgcagtgcaggccggaatcttcgtcgagcggatgtatagaaagacctaccacatggtgggcctggcataccctgccgctgtgatcgtgaccctgaaagatgttgacaagtggtccttcgacgtctttgccttgaatgaagccagcggcgagcattccctgaaatttatgatctatgaacttttcaccaggtatgacctgattaataggttcaagattcccgtgagctgtctgattacattcgctgaggcactggaggtcggttattccaagtacaagaacccatatcacaatttaattcacgccgctgacgtgacacagaccgtgcactacataatgctgcatactggcataatgcactggctgacggaacttgagattctggccatggtcttcgccgcagcaatccatgactacgaacataccggcacaacaaacaatttccacattcagactagatcagatgttgctattctttacaacgatagaagcgtgctcgagaaccatcatgtctccgctgcttatagactcatgcaagaagaggaaatgaacattttgattaacctgtctaaggacgattggcgggacctccgaaatctcgtgatcgagatggtgctgagtacagacatgtcaggtcatttccagcagatcaagaatattagaaactctctgcaacagcccgaaggcattgatagagctaaaacaatgtctctaatccttcacgccgctgacatttcccatccagctaaaagctggaagctccattacagatggaccatggctctcatggaagagttcttcttgcagggggacaaggaagctgaactgggactgcccttcagccctctgtgcgaccgcaagtccacaatggtagcccaaagccagataggtttcatagactttattgtcgaaccgaccttcagcttgcttaccgattccacagagaagatcgtgatacccctgattgaggaggcttccaaggccgagacttcttcttatgtcgcatctagcagcacaacaatagttggtcttcatatcgccgacgccctgcgtcgatccaacaccaagggcagcatgtctgacggctcttactctccagattacagtttggccgctgtcgacttaaagtccttcaaaaataatcttgtggacataattcaacagaataaagaacgctggaaagaactggctgcacaaggagagtctgacctccacaagaacagcgaagatctggtaaacgccgaagaaaagcacgatgagacccactcttag

SEQ ID NO: 152108 - DNA, 1638 bp, Artificial Sequence
  derived and/or modified sequence
atggggtcctcggccaccgagatcgaggaactcgagaacacaacctttaaatatttgaccggagaacagaccgaaaaaatgtggcagcgcctaaaaggcattctgaggtgcctggtgaagcagttagagagaggggacgtcaacgtggtggacctcaaaaagaatatagagtacgccgcaagcgtgctagaagcagtgtacatcgatgaaaccaggagactcctggacaccgaagatgagctcagtgacattcaaaccgatagcgtcccaagtgaggtgcgagactggctcgccagcactttcactagaaaaatggggatgaccaagaagaaacccgaggagaaacccaagtttcggagcatcgttcacgccgtgcaagccggtatattcgtggaaaggatgtatcgtaaaacctatcacatggtcggactagcctatcccgcagctgtgatagttacactaaaggacgttgacaagtggagctttgacgtattcgcactgaatgaggcctccggagagcacagcctgaaattcatgatctatgaattgttcactaggtacgatctcattaataggtttaaaattccagtttcttgcctgatcacatttgctgaagccctggaggtgggttattccaagtacaagaacccctatcacaacctgatccatgctgccgacgtgacacagaccgtgcactacattatgttgcatacagggattatgcattggctgacagagctcgaaattctggcaatggtttttgccgcagcaatccacgactatgaacatactggtacgactaacaattttcatatccagactagatccgacgtagccatactatacaatgatcgctccgtgttggaaaatcaccacgtgtctgcggcatatcgcttgatgcaggaagaggagatgaatatcctcatcaatctctccaaggacgattggcgggaccttaggaacttggtcatcgagatggttctgtctaccgatatgagtggacactttcaacagataaaaaatatccggaactctctgcagcagccagagggtatcgacagggctaagactatgagcctcatattgcacgcagcagacatctctcaccccgcaaaaagttggaaactgcattaccggtggaccatggcgctgatggaggagttcttcttgcagggcgacaaagaggccgagttgggtctgcctttcagcccactctgcgaccgtaagtcgactatggtggcccagagtcagattgggttcattgatttcattgttgagcccacatttagcttgctcactgactctaccgaaaaaattgtaataccactaattgaggaagcgtctaaggccgaaacgtcctcatacgtggctagtagtagtaccactatcgtcggtctccatatcgccgatgcccttcgaagatctaataccaaaggcagcatgtccgatggctcgtattctcctgattattcactcgctgctgtagacttgaagtcattcaaaaacaaccttgtcgatatcatccaacagaacaaagaaaggtggaaggagctcgctgcacagggcgagtccgacctccataaaaactccgaagacttggtgaacgcggaagagaaacacgatgagacccatagttag

SEQ ID NO: 152109 - DNA, 1659 bp, Artificial Sequence
  derived and/or modified sequence
atggggtcaagcgccacggagatagaagagctggaaaatacaacctttaaatatctgactggagagcagaccgaaaaaatgtggcagagattaaaagggatactccgatgcctggttaagcaactggaaagaggggatgtaaatgttgtggatttaaagaaaaacatcgaatacgcagcaagcgttctggaagccgtgtacatagatgagacccgtcgtcttttagataccgaggacgagttatctgacattcagaccgacagtgtaccttcggaggttagagactggctggcctctactttcactcgtaaaatgggcatgactaagaagaaacccgaagaaaagcctaagtttcgctccatcgtacatgcggtgcaggccggaatatttgtggagagaatgtatcggaaaacctatcatatggtcggtctggcctaccctgcggctgtgatcgtgactctgaaggacgtggataaatggtccttcgacgtgttcgccctgaatgaggcctccggagaacactccttgaagtttatgatctacgagctgtttacgcgctatgacctcattaatagatttaaaattcctgtgagctgtctcattacctttgctgaggccctagaagtcgggtattcgaagtataagaacccctatcataatctcattcatgcagccgacgtgactcagacagtccattacatcatgctacatacgggtatcatgcattggctgacagaactcgagattctcgcaatggtgtttgcagcggcaattcacgactatgaacatactggtacaacaaataattttcatatccaaacacggtccgacgtcgctatcttgtacaacgaccggagcgtcctagagaaccatcacgtgtcagcggcttataggctgatgcaagaggaggagatgaacatattgatcaacttgagcaaggacgattggagagatctaaggaacctggtaatcgagatggtacttagtaccgatatgagcggacattttcagcagattaaaaatatcaggaatagtttacagcagcctgagggaatcgacagagctaaaactatgtcactaatcctgcatgccgcagatatctctcatcccgcaaaatcttggaagctccactatcgctggaccatggcgctgatggaggagttttttctccaaggagacaaagaggcagagttagggttgcctttttcaccattatgcgacagaaaaagtacgatggtagctcaatcccagattggatttatcgattttatcgtggaaccgaccttttccctgctcaccgactcaacagagaagatcgtaatacccctcatcgaggaggctagtaaagctgaaacttcctcgtatgttgccagcagttcaactactatagtcggactgcatattgccgacgctctgagacgatccaacactaagggttcaatgtctgacgggtcctactcccccgattattccttggcggctgtggatctcaagtcattcaagaacaacctcgtagacattatccagcaaaacaaggaacggtggaaagaactggccgcacagggctccgtcgtgtacgaagcgctgttaccttctctatctgtgttcacctcaccactccgagtttggattactagctctagatttctcctcctttag

SEQ ID NO: 152110 - DNA, 1326 bp, Artificial Sequence
  derived and/or modified sequence
atgggcatgacgaagaaaaaaccagaggagaaacctaagtttaggagcattgttcacgccgtccaagcagggatctttgtcgagcggatgtacagaaagacataccatatggtggggctggcctaccccgctgctgtgatcgtgacactgaaggatgtggataagtggtcttttgacgtgttcgccctgaacgaggcttcaggtgagcacagcctaaaatttatgatctatgagttgttcactcgctacgatctaattaataggtttaaaattccagtgtcctgtctaatcacctttgccgaggcactcgaagttggatattcgaaatataagaacccctaccacaatctgatccatgctgccgatgtgacccaaactgtgcactacatcatgcttcatactggaatcatgcattggttgaccgagttagagatactcgctatggtgtttgccgctgctatccatgactacgagcataccggaactaccaataattttcacattcagacaaggtccgacgttgctatactgtataacgatcgttccgtgctggaaaatcaccatgtaagtgccgcttaccggctcatgcaggaagaagaaatgaatatcctcattaatctgagcaaagatgactggcgggatcttcggaatctggtcattgagatggtgctctccactgatatgagtgggcattttcagcaaatcaagaacatcaggaatagcctgcagcaaccagaaggtattgacagggcaaaaactatgagcctgattcttcatgccgcagatatctcccaccctgccaagagctggaaattgcactatcgctggactatggcgctcatggaggagtttttcttacagggcgacaaagaggccgaactagggctcccattttctcctctgtgtgacaggaaaagcacgatggtggcacagtcgcagattgggtttatcgattttatcgtggaaccaactttttctctcctaacggacagtactgagaagattgtgatcccactgatcgaagaagcctctaaggctgagactagttcttatgttgcttcttcatctacaacaatcgtgggactgcatattgccgacgccctaaggcggagtaacaccaaaggctccatgagtgacggctcctactcacccgattattccctggcagcagtcgacctcaagagtttcaaaaacaacttggtggatataatccaacagaataaggagaggtggaaggagctcgcagcacagggcgagagcgatttacacaagaactctgaagacttggtgaacgcggaggaaaaacacgatgagacgcacagctag

SEQ ID NO: 152111 - DNA, 1638 bp, Artificial Sequence
  derived and/or modified sequence
atgggcagcagcgccaccgagatcgaggagctggagaacaccaccttcaagtacctgaccggcgagcagaccgagaagatgtggcagagactgaagggcatcctgagatgcctggtgaagcagctggagagaggcgacgtgaacgtggtggacctgaagaagaacatcgagtacgccgccagcgtgctggaggccgtgtacatcgacgagaccagaagactgctggacaccgaggacgagctgagcgacatccagaccgacagcgtgcccagcgaggtgagagactggctggccagcaccttcaccagaaagatgggcatgaccaagaagaagcccgaggagaagcccaagttcagaagcatcgtgcacgccgtgcaggccggcatcttcgtggagagaatgtacagaaagacctaccacatggtgggcctggcctaccccgccgccgtgatcgtgaccctgaaggacgtggacaagtggagcttcgacgtgttcgccctgaacgaggccagcggcgagcacagcctgaagttcatgatctacgagctgttcaccagatacgacctgatcaacagattcaagatccccgtgagctgcctgatcaccttcgccgaggccctggaggtgggctacagcaagtacaagaacccctaccacaacctgatccacgccgccgacgtgacccagaccgtgcactacatcatgctgcacaccggcatcatgcactggctgaccgagctggagatcctggccatggtgttcgccgccgccatccacgactacgagcacaccggcaccaccaacaacttccacatccagaccagaagcgacgtggccatcctgtacaacgacagaagcgtgctggagaaccaccacgtgagcgccgcctacagactgatgcaggaggaggagatgaacatcctgatcaacctgagcaaggacgactggagagacctgagaaacctggtgatcgagatggtgctgagcaccgacatgagcggccacttccagcagatcaagaacatcagaaacagcctgcagcagcccgagggcatcgacagagccaagaccatgagcctgatcctgcacgccgccgacatcagccaccccgccaagagctggaagctgcactacagatggaccatggccctgatggaggagttcttcctgcagggcgacaaggaggccgagctgggcctgcccttcagccccctgtgcgacagaaagagcaccatggtggcccagagccagatcggcttcatcgacttcatcgtggagcccaccttcagcctgctgaccgacagcaccgagaagatcgtgatccccctgatcgaggaggccagcaaggccgagaccagcagctacgtggccagcagcagcaccaccatcgtgggcctgcacatcgccgacgccctgagaagaagcaacaccaagggcagcatgagcgacggcagctacagccccgactacagcctggccgccgtggacctgaagagcttcaagaacaacctggtggacatcatccagcagaacaaggagagatggaaggagctggccgcccagggcgagagcgacctgcacaagaacagcgaggacctggtgaacgccgaggagaagcacgacgagacccacagctag

SEQ ID NO: 152112 - DNA, 1590 bp, Artificial Sequence
  derived and/or modified sequence
atggacgaccacgtgaccatcagaaagaagcacctgcagagacccatcttcagactgagatgcctggtgaagcagctggagagaggcgacgtgaacgtggtggacctgaagaagaacatcgagtacgccgccagcgtgctggaggccgtgtacatcgacgagaccagaagactgctggacaccgaggacgagctgagcgacatccagaccgacagcgtgcccagcgaggtgagagactggctggccagcaccttcaccagaaagatgggcatgaccaagaagaagcccgaggagaagcccaagttcagaagcatcgtgcacgccgtgcaggccggcatcttcgtggagagaatgtacagaaagacctaccacatggtgggcctggcctaccccgccgccgtgatcgtgaccctgaaggacgtggacaagtggagcttcgacgtgttcgccctgaacgaggccagcggcgagcacagcctgaagttcatgatctacgagctgttcaccagatacgacctgatcaacagattcaagatccccgtgagctgcctgatcaccttcgccgaggccctggaggtgggctacagcaagtacaagaacccctaccacaacctgatccacgccgccgacgtgacccagaccgtgcactacatcatgctgcacaccggcatcatgcactggctgaccgagctggagatcctggccatggtgttcgccgccgccatccacgactacgagcacaccggcaccaccaacaacttccacatccagaccagaagcgacgtggccatcctgtacaacgacagaagcgtgctggagaaccaccacgtgagcgccgcctacagactgatgcaggaggaggagatgaacatcctgatcaacctgagcaaggacgactggagagacctgagaaacctggtgatcgagatggtgctgagcaccgacatgagcggccacttccagcagatcaagaacatcagaaacagcctgcagcagcccgagggcatcgacagagccaagaccatgagcctgatcctgcacgccgccgacatcagccaccccgccaagagctggaagctgcactacagatggaccatggccctgatggaggagttcttcctgcagggcgacaaggaggccgagctgggcctgcccttcagccccctgtgcgacagaaagagcaccatggtggcccagagccagatcggcttcatcgacttcatcgtggagcccaccttcagcctgctgaccgacagcaccgagaagatcgtgatccccctgatcgaggaggccagcaaggccgagaccagcagctacgtggccagcagcagcaccaccatcgtgggcctgcacatcgccgacgccctgagaagaagcaacaccaagggcagcatgagcgacggcagctacagccccgactacagcctggccgccgtggacctgaagagcttcaagaacaacctggtggacatcatccagcagaacaaggagagatggaaggagctggccgcccagggcgagagcgacctgcacaagaacagcgaggacctggtgaacgccgaggagaagcacgacgagacccacagctag

SEQ ID NO: 152113 - DNA, 1659 bp, Artificial Sequence
  derived and/or modified sequence
atgggcagcagcgccaccgagatcgaggagctggagaacaccaccttcaagtacctgaccggcgagcagaccgagaagatgtggcagagactgaagggcatcctgagatgcctggtgaagcagctggagagaggcgacgtgaacgtggtggacctgaagaagaacatcgagtacgccgccagcgtgctggaggccgtgtacatcgacgagaccagaagactgctggacaccgaggacgagctgagcgacatccagaccgacagcgtgcccagcgaggtgagagactggctggccagcaccttcaccagaaagatgggcatgaccaagaagaagcccgaggagaagcccaagttcagaagcatcgtgcacgccgtgcaggccggcatcttcgtggagagaatgtacagaaagacctaccacatggtgggcctggcctaccccgccgccgtgatcgtgaccctgaaggacgtggacaagtggagcttcgacgtgttcgccctgaacgaggccagcggcgagcacagcctgaagttcatgatctacgagctgttcaccagatacgacctgatcaacagattcaagatccccgtgagctgcctgatcaccttcgccgaggccctggaggtgggctacagcaagtacaagaacccctaccacaacctgatccacgccgccgacgtgacccagaccgtgcactacatcatgctgcacaccggcatcatgcactggctgaccgagctggagatcctggccatggtgttcgccgccgccatccacgactacgagcacaccggcaccaccaacaacttccacatccagaccagaagcgacgtggccatcctgtacaacgacagaagcgtgctggagaaccaccacgtgagcgccgcctacagactgatgcaggaggaggagatgaacatcctgatcaacctgagcaaggacgactggagagacctgagaaacctggtgatcgagatggtgctgagcaccgacatgagcggccacttccagcagatcaagaacatcagaaacagcctgcagcagcccgagggcatcgacagagccaagaccatgagcctgatcctgcacgccgccgacatcagccaccccgccaagagctggaagctgcactacagatggaccatggccctgatggaggagttcttcctgcagggcgacaaggaggccgagctgggcctgcccttcagccccctgtgcgacagaaagagcaccatggtggcccagagccagatcggcttcatcgacttcatcgtggagcccaccttcagcctgctgaccgacagcaccgagaagatcgtgatccccctgatcgaggaggccagcaaggccgagaccagcagctacgtggccagcagcagcaccaccatcgtgggcctgcacatcgccgacgccctgagaagaagcaacaccaagggcagcatgagcgacggcagctacagccccgactacagcctggccgccgtggacctgaagagcttcaagaacaacctggtggacatcatccagcagaacaaggagagatggaaggagctggccgcccagggcagcgtggtgtacgaggccctgctgcccagcctgagcgtgttcaccagccccctgagagtgtggatcaccagcagcagattcctgctgctgtag

SEQ ID NO: 152114 - DNA, 1326 bp, Artificial Sequence
  derived and/or modified sequence
atgggcatgaccaagaagaagcccgaggagaagcccaagttcagaagcatcgtgcacgccgtgcaggccggcatcttcgtggagagaatgtacagaaagacctaccacatggtgggcctggcctaccccgccgccgtgatcgtgaccctgaaggacgtggacaagtggagcttcgacgtgttcgccctgaacgaggccagcggcgagcacagcctgaagttcatgatctacgagctgttcaccagatacgacctgatcaacagattcaagatccccgtgagctgcctgatcaccttcgccgaggccctggaggtgggctacagcaagtacaagaacccctaccacaacctgatccacgccgccgacgtgacccagaccgtgcactacatcatgctgcacaccggcatcatgcactggctgaccgagctggagatcctggccatggtgttcgccgccgccatccacgactacgagcacaccggcaccaccaacaacttccacatccagaccagaagcgacgtggccatcctgtacaacgacagaagcgtgctggagaaccaccacgtgagcgccgcctacagactgatgcaggaggaggagatgaacatcctgatcaacctgagcaaggacgactggagagacctgagaaacctggtgatcgagatggtgctgagcaccgacatgagcggccacttccagcagatcaagaacatcagaaacagcctgcagcagcccgagggcatcgacagagccaagaccatgagcctgatcctgcacgccgccgacatcagccaccccgccaagagctggaagctgcactacagatggaccatggccctgatggaggagttcttcctgcagggcgacaaggaggccgagctgggcctgcccttcagccccctgtgcgacagaaagagcaccatggtggcccagagccagatcggcttcatcgacttcatcgtggagcccaccttcagcctgctgaccgacagcaccgagaagatcgtgatccccctgatcgaggaggccagcaaggccgagaccagcagctacgtggccagcagcagcaccaccatcgtgggcctgcacatcgccgacgccctgagaagaagcaacaccaagggcagcatgagcgacggcagctacagccccgactacagcctggccgccgtggacctgaagagcttcaagaacaacctggtggacatcatccagcagaacaaggagagatggaaggagctggccgcccagggcgagagcgacctgcacaagaacagcgaggacctggtgaacgccgaggagaagcacgacgagacccacagctag

SEQ ID NO: 152115 - protein, 634 aa, Artificial Sequence
  derived and/or modified sequence
MESPTKEIEEFESNSLKYLQPEQIEKIWLRLRGLRKYKKTSQRLRSLVKQLERGEASVVDLKKNLEYAATVLESVYIDETRRLLDTEDELSDIQSDAVPSEVRDWLASTFTRQMGMMLRRSDEKPRFKSIVHAVQAGIFVERMYRRTSNMVGLSYPPAVIEALKDVDKWSFDVFSLNEASGDHALKFIFYELLTRYDLISRFKIPISALVSFVEALEVGYSKHKNPYHNLMHAADVTQTVHYLLYKTGVANWLTELEIFAIIFSAAIHDYEHTGTTNNFHIQTRSDPAILYNDRSVLENHHLSAAYRLLQDDEEMNILINLSKDDWREFRTLVIEMVMATDMSCHFQQIKAMKTALQQPEAIEKPKALSLMLHTADISHPAKAWDLHHRWTMSLLEEFFRQGDREAELGLPFSPLCDRKSTMVAQSQVGFIDFIVEPTFTVLTDMTEKIVSPLIDETSQTGGTGQRRSSLNSISSSDAKRSGVKTSGSEGSAPINNSVISVDYKSFKATWTEVVHINRERWRAKVPKEEKAKKEAEEKARLAAEEQQKEMEAKSQAEEGASGKAEKKTSGETKNQVNGTRANKSDNPRGKNSKAEKSSGEQQQNGDFKDGKNKTDKKDHSNIGNDSKKTDDSQE

SEQ ID NO: 152116 - protein, 46 aa, Artificial Sequence
  derived and/or modified sequence
MESPTKEIEEFESNSLKYLQPEQIEKIWLRLRGLRKYKKTSQRLRS

SEQ ID NO: 152117 - DNA, 1905 bp, Artificial Sequence
  derived and/or modified sequence
atggaatctcccacgaaggaaattgaggaatttgaatccaactccctcaagtacctgcaacccgaacaaattgaaaagatatggctgagacttagggggctgcgcaagtacaagaagacatcccagaggctgcgcagtttggtgaagcagctggaaaggggtgaggcctctgttgtggacttaaaaaagaacctggagtacgcggccactgtccttgagtccgtatacatcgatgagacaaggagacttcttgataccgaagatgaattaagtgacatccagtctgatgccgtcccatccgaagtcagggactggctggcgagtaccttcactcgacagatggggatgatgttacgtagatccgatgaaaagccccgcttcaaaagcattgtgcatgcggtgcaggctgggatttttgttgagcgcatgtatcggagaacaagcaatatggttggtctttcctatccaccggccgtaattgaggctctaaaagatgtggacaaatggtccttcgatgtcttttccctgaacgaggctagcggcgatcacgccttaaagttcatcttttatgaactgctgacaaggtacgacctcattagcagattcaaaatcccgatttcagccctcgtgtcgtttgtggaagccctcgaggttggctatagcaaacacaagaatccataccacaaccttatgcatgcagccgatgtcacacagacggtgcattacctgctgtacaagacaggcgtcgcaaactggctgacagagctggaaatatttgctatcatattctccgcggcgattcatgattacgaacacacggggactacaaataatttccatatacaaacccggtctgaccccgctatcctgtataacgatcgctcggtgctggagaaccaccacctgtccgccgcatacaggctactacaggacgatgaggaaatgaacatcctgatcaacctcagtaaagacgactggagagagtttagaacactcgtaatcgaaatggtgatggcaacagacatgtcctgccactttcagcagattaaagccatgaaaactgcgcttcagcagccggaggcaatcgaaaaacccaaagcactgtcgctcatgctgcacacagctgacatctcccaccccgcaaaggcctgggatctccaccaccgctggactatgagcttgttagaggaatttttccggcagggagacagggaggccgagctggggctgcctttttcaccgctgtgcgataggaagagcactatggtggcccagtctcaagtcgggttcatcgactttattgttgaacccacctttaccgttctgacagatatgacggaaaagattgtatcaccactcatagatgagacatcgcagactggcggcacaggacagcgaaggtcttcgcttaattcaatctccagcagtgatgccaaacgaagtggagtcaaaacctctggttcagagggttctgcccctattaataattccgtcatatctgtggactacaagagcttcaaggcaacatggacagaggtggtccacataaatagagaacggtggcgggcgaaggttcctaaagaagaaaaggcaaagaaggaggccgaggagaaggcccgactcgccgccgaagaacagcagaaggaaatggaggctaaatcacaggcggaggaaggtgccagtggaaaagcagaaaaaaagacctcaggggagacgaaaaaccaggtgaatggaactagagccaacaagtccgacaaccccagaggaaagaattcgaaagcagagaagtctagtggcgagcaacagcagaatggcgatttcaaggacggaaaaaacaagaccgacaaaaaggaccacagtaatatcgggaacgattctaaaaaaacagatgactcacaggaatag

SEQ ID NO: 152118 - DNA, 1905 bp, Artificial Sequence
  derived and/or modified sequence
atggagtccccaacaaaagagatagaggaatttgagtctaactctctgaagtatctccaaccggagcagatcgagaagatctggctcaggctgcgtggtctcagaaaatacaaaaaaaccagccagcgactgagatctctggtcaaacagcttgagcgcggagaagcgtccgtggtggacctgaaaaagaaccttgagtatgcggcaaccgtgctcgagagcgtgtatatcgatgagacacggcgtttactggacactgaggatgagttgtccgacatccagagcgatgccgtgccttctgaggtccgcgattggctcgccagtacattcacacgacagatgggcatgatgcttcgtagatcagatgagaaacctcggtttaagtcgattgtacacgctgtgcaggcaggcatttttgtcgaacgaatgtatagaaggaccagcaatatggtcggcctgtcttaccccccagcagtgattgaggcgcttaaggatgtggataaatggtctttcgatgtcttttcacttaatgaggcttccggggaccatgccctgaaattcattttctatgaattgcttacccggtatgaccttatttcacggtttaaaataccgatttccgccctggtcagttttgttgaggcccttgaggtcgggtattccaaacataaaaacccttaccacaacctaatgcatgccgcagatgtgacccaaaccgtgcactatttactgtataagaccggcgttgccaactggttgaccgaactagagatctttgcgataatctttagcgccgctatccatgactatgagcatactgggacgactaataacttccacattcagactcggagtgacccagccatcttgtacaacgatcggtccgtgctcgagaatcaccacctgagcgctgcatatagattactgcaggatgacgaggaaatgaacatactcatcaacctatcaaaggatgattggagggaattcaggaccctggtgatcgagatggtgatggccacagatatgtcgtgtcacttccaacaaatcaaagcgatgaaaaccgccctgcagcagcccgaagctatagagaagccgaaagctttgtccctcatgctgcacaccgccgatatctctcatcctgcaaaggcatgggacctgcaccaccgttggaccatgtcgctcctagaggaattcttcaggcagggggaccgggaggcagagttggggctgcctttctccccgctttgtgaccggaaatcaactatggtggcccagagtcaggttggctttatcgacttcattgtagagcccacatttacagtactgaccgacatgaccgaaaagattgtcagccctctgatcgatgagacttcccagaccggtggcacaggccagcggagatcctcgctgaactctattagtagctcagatgccaagcggtcaggggtcaagacgtccggaagtgaaggaagcgcccccataaacaactctgttatatctgtggattataagtcttttaaagctacgtggaccgaagtggtgcatatcaatcgtgagagatggagggctaaagttcccaaggaggagaaagcaaagaaagaggccgaggaaaaggcccgcctggctgccgaagaacaacagaaggagatggaggctaaaagtcaagccgaggagggtgcctccggcaaagcagaaaagaaaactagtggggaaacgaagaaccaggtgaatggaacccgcgccaacaaaagcgataaccctaggggtaaaaacagcaaggcagagaagtctagtggggaacaacagcagaacggagattttaaggacggaaagaataaaactgacaaaaaagatcattcaaacattggcaacgactccaagaagaccgacgatagtcaagagtag

SEQ ID NO: 152119 - DNA, 141 bp, Artificial Sequence
  derived and/or modified sequence
atggaatcccctacaaaagagatagaggagttcgagtcaaattcgctcaaatacctgcagccagagcagatcgaaaagatctggctgcgtctcagaggactgagaaagtataaaaagacgtctcagcgcctcaggtcatag

SEQ ID NO: 152120 - DNA, 1905 bp, Artificial Sequence
  derived and/or modified sequence
atggagagccccaccaaggagattgaggagtttgagagcaacagcctgaagtacctgcagcctgagcagatcgagaagatctggctgcggctgcggggcctgaggaagtacaagaagaccagccagaggctgcggagcctggtgaagcagctggagcggggggaggcctctgtggtggacctgaagaagaacctggagtatgctgccaccgtgctggagagcgtgtacattgatgagacccggcggctgctggacacagaagatgagctgagtgacatccagagtgatgctgtgcccagcgaggtgcgggactggctggccagcaccttcacccggcagatgggcatgatgctgcggcggagtgatgagaagccccgcttcaagagcatcgtgcatgctgtgcaggccggcatctttgtggagaggatgtacagaaggaccagcaacatggtgggcctgagctaccccccagctgtgattgaggccctgaaggatgtggacaagtggagctttgatgtgttcagcctgaatgaggccagcggggaccacgccctgaagttcatcttctatgagctgctgaccaggtatgacctgatcagccgcttcaagatccccatcagcgccctggtgtcctttgtggaggccctggaggtgggctacagcaagcacaagaacccctaccacaacctgatgcatgctgctgatgtgacccagacagtgcactacctgctgtacaagacaggagtggccaactggctgacagagctggagatctttgccatcatcttctctgctgccatccatgactatgagcacacaggcaccaccaacaacttccacatccagaccaggagtgaccctgccatcctgtacaatgacagatctgtgctggagaaccaccacctgtctgctgcctaccgcctgctgcaggatgatgaggagatgaacatcctgatcaacctgagcaaggatgactggagggagttccgcaccctggtgattgagatggtgatggccacagacatgagctgccacttccagcagatcaaggccatgaagacagccctgcagcagcctgaggccatcgagaagcccaaggccctgagcctgatgctgcacacagctgacatcagccacccagccaaggcctgggacctgcaccaccgctggaccatgagcctgctggaggagttcttccggcagggcgaccgggaggccgagctgggcctgcccttcagccccctgtgtgacaggaagagcaccatggtggcccagagccaggtgggcttcatcgacttcatcgtggagcccaccttcaccgtgctgacagacatgacagagaagatcgtgagccccctgattgatgagaccagccagacaggaggcaccggccagaggaggagcagcctgaacagcatcagcagcagtgatgccaagaggtctggagtgaagaccagcggcagcgagggcagcgcccccatcaacaacagcgtcatctctgtggactacaagagcttcaaggccacctggacagaggtggtgcacatcaaccgggagcgctggagggccaaggtgcccaaggaggagaaggccaagaaggaggccgaggagaaggcccggctggccgctgaggagcagcagaaggagatggaggccaagagccaggccgaggagggcgccagcggcaaggccgagaagaagaccagcggggagaccaagaaccaggtgaatggcacccgggccaacaagagtgacaacccccggggcaagaacagcaaggccgagaagagcagcggggagcagcagcagaatggagacttcaaggatggcaagaacaagacagacaagaaggaccacagcaacattggaaatgacagcaagaagacagatgacagccaggagtag

SEQ ID NO: 152121 - DNA, 141 bp, Artificial Sequence
  derived and/or modified sequence
atggagagccccaccaaggagattgaggagtttgagagcaacagcctgaagtacctgcagcctgagcagatcgagaagatctggctgcggctgcggggcctgaggaagtacaagaagaccagccagaggctgcggagctag

SEQ ID NO: 152122 - DNA, 1905 bp, Artificial Sequence
  derived and/or modified sequence
atggagagccccaccaaggagatcgaggagttcgagagcaacagcctgaagtacctgcagcccgaacaaattgagaagatctggcttagactgcgcggcctgcggaagtataaaaagacatcgcagagactgcgcagcctcgtgaaacaacttgagcggggggaggcttctgtggtggacctcaaaaagaacctcgagtacgccgctacggttctggaatctgtttacatcgacgagacaagacggctgctggatactgaggacgagctctctgatatacagtcggacgccgtcccctctgaggtgagggattggctcgctagcacatttacgagacagatgggcatgatgctgagacggtctgacgaaaagccgagatttaaatccatagtgcacgccgttcaggcaggcatattcgtcgagcggatgtacagacggacctcgaacatggtcgggctgtcttacccacccgccgtgatcgaggctctcaaggacgtggacaaatggtccttcgatgtgttttccctcaacgaagccagcggagaccacgccctgaagttcatcttttatgagctcctcacgcgctacgacctcattagcagattcaagatcccaatttccgccttagtatcattcgtggaagctctcgaggttggctactcaaagcataagaatccttatcacaatctcatgcacgctgctgatgtcacacagacagtccactaccttctgtataaaacaggcgtggctaactggctcacggagctggaaattttcgctattattttttcagccgctatacacgactacgagcacactgggacgactaataatttccacattcagacccgaagcgacccagccattctgtataatgaccgtagcgtgctcgagaaccaccatttgtccgctgcctaccggctgttgcaggacgatgaggagatgaacattctcataaacctcagtaaggatgattggcgtgagtttaggactctggtgatagaaatggtgatggctacggatatgtcatgtcacttccagcagatcaaagccatgaaaacagcactacagcagcctgaagcgatcgagaagccaaaggctctgagtctgatgctgcatactgccgacattagccatcccgcgaaagcgtgggacctgcatcaccggtggacaatgtcccttctggaagaattctttaggcagggcgatcgcgaggcagagcttggattgccattctctcccctttgcgatcggaagtcgaccatggtggctcagagccaagttgggttcatcgatttcatcgtggagcctacattcaccgtcctcacagatatgaccgagaaaatagtgtccccactgattgacgagaccagtcagaccggtggcacaggccaacgaaggtcctctctgaactctataagttccagcgacgcaaagcggtccggcgtgaaaacaagcggaagcgagggatcagcgcctatcaacaactctgtgatcagtgtcgactacaaatccttcaaagctacttggactgaagtggtacatattaaccgcgagcgctggagggccaaagtccccaaggaggagaaagcgaagaaggaggcagaggagaaagcccgcctggccgcagaagagcaacagaaggaaatggaggcaaaaagtcaggccgaagagggagctagcggtaaggctgagaagaagacaagtggcgaaaccaagaaccaggtgaatgggaccagggctaataaatctgacaacccaaggggcaagaactctaaagccgaaaaaagtagcggggagcagcagcagaatggagatttcaaggatggcaagaataagacggataaaaaggatcattcaaatatcgggaatgatagcaagaagacggatgactcccaggaatag

SEQ ID NO: 152123 - DNA, 1905 bp, Artificial Sequence
  derived and/or modified sequence
atggagagccccaccaaggagatcgaggagttcgagagcaacagccttaagtacctacagccagaacaaattgaaaagatatggctgcgactgcggggccttcgcaaatacaagaaaacaagccagaggctccgttccctggtgaaacagttagaacggggggaggctagtgtggtcgatctgaagaagaaccttgagtacgcggccaccgtcctggaatccgtctacatcgacgagaccagacgattgcttgacacagaagacgaattgagcgacatccagtctgacgctgtgccgtcagaagtgcgggattggttggcttccacctttacacgtcagatgggtatgatgctccggaggagcgatgaaaaaccccggtttaagagcatcgtccacgccgtgcaggccgggatttttgtggaaaggatgtacaggaggacatcaaatatggtgggcctcagttatccccctgctgttattgaagcactgaaagatgtggataaatggtctttcgacgtgttctcgctaaatgaagcttctggcgatcatgccctcaagtttattttctatgaactgcttaccaggtatgaccttatctctaggtttaaaatcccgatctccgctttggtgtccttcgtggaggccttggaggttgggtacagcaagcataagaacccctaccataatctgatgcacgccgcggatgtaacccagactgtacattatctgttgtacaaaacgggggtggccaattggctgaccgagctggaaatctttgcaataattttcagcgccgctatccacgattacgagcataccgggactacaaataattttcacatccagactcgaagcgaccctgcaatcctgtacaatgaccgcagcgttctggaaaatcaccacctttctgctgcttataggttattacaggacgacgaagaaatgaacattctcataaatctgtctaaggatgactggcgcgaatttagaacacttgtgattgagatggttatggccacggatatgtcctgccactttcagcagataaaggccatgaagactgcactgcagcagccagaggcgattgaaaagcccaaggccttgagtcttatgctccacacagccgatatttcccacccagccaaagcctgggatttgcaccacaggtggaccatgagcctgttggaggagtttttccggcagggagaccgtgaagcagagctcgggttacctttctctcctctgtgtgaccggaagtcgacaatggtggcccagtctcaggtcggctttatcgatttcattgtggaacctacctttacagtactcaccgatatgaccgaaaaaatcgtctctccactcattgatgaaacttcccaaaccggcgggaccggtcaacgccgttctagcctgaacagtatcagtagctcagacgcaaagaggagcggggtaaagaccagcggctccgaaggctccgcgccgatcaataacagtgttatctctgtggactacaaaagctttaaggctacctggacagaagtagtacacattaacagggagaggtggagagcaaaggtccccaaggaggagaaggcgaagaaagaggccgaagaaaaagcccgcctcgcagcagaggagcagcaaaaggagatggaagcaaagagtcaagcagaagaaggggctagcggcaaggcggaaaagaaaacctcgggtgagacgaaaaaccaggttaatggaacccgggcaaacaagtctgacaatccccgcggcaaaaattcaaaggcggagaagagttctggagagcagcagcagaacggcgattttaaggacggaaagaacaaaacagacaagaaggatcattcgaatataggaaacgattcgaaaaagaccgacgatagccaggaatag

SEQ ID NO: 152124 - DNA, 141 bp, Artificial Sequence
  derived and/or modified sequence
atggagagccccaccaaggagatcgaggagttcgagagcaacagcctaaaatatctccagccagagcagattgaaaagatctggttgcgcctgaggggtctccggaaatacaagaagaccagccaaaggctccgctcgtag

SEQ ID NO: 152125 - DNA, 2420 bp, Artificial Sequence
  derived and/or modified sequence
cggctcccgctttgctcagccgccgcttttctctcccttctcactttctctcctccccacccagccctccttttcacctccaaaccctttagctgcgcgctgatcgcttctgtggctttgtttgggggtagggggagaatacgaatagacccgaggtgctttctcttggagctggagtccaatcccaatccctatctctatccctatccctgtgcttatccctgggcattagcccgggaccatggctggttcccgcagctgcctccggagcgcacctggggccatggtttgccgcgatcggagtccgctctaagtcggagtctgggggcgcagaagggggagcgcgccgagaaagtgccgggcaaacgcgcgccgcgcctggctgggcatcgcgagctgggcgaggagacggggaggggacagcccaaactatctcagcttcaccgccagtggtcacctacctgcagctatggagtcgccaaccaaggagattgaagaatttgagagcaactctctgaaatacctgcaaccggaacagatcgagaaaatctggcttcggctccgcgggctgaggaaatataagaaaacgtcccagagattacggtctttggtcaaacaattagagagaggggaagcttcagtggtagatcttaagaagaatttggaatatgcagccacagtgcttgaatctgtgtatattgatgaaacaaggagactcctggatacagaggatgagctcagtgacattcagtcagatgctgtgccttctgaggtccgagactggctggcctccaccttcacgcggcagatggggatgatgctcaggaggagcgacgagaagccccggttcaagagcatcgttcacgcagtgcaggctgggatatttgtggagagaatgtatagacggacatcaaacatggttggactgagctatccaccagctgttattgaggcattaaaggatgtggacaagtggtcctttgacgtcttttccctcaatgaggccagtggggatcatgcactgaaatttattttctatgaactactcacacgttatgatctgatcagccgtttcaagatccccatttctgcacttgtctcatttgtggaggccctggaagtgggatacagcaagcacaaaaatccttaccataacttaatgcacgctgccgatgttacacagacagtgcattacctcctctataagacaggagtggcgaactggctgacggagctggagatctttgctataatcttctcagctgccatccatgactacgagcataccggaaccaccaacaatttccacattcagactcggtctgatccagctattctgtataatgacagatctgtactggagaatcaccatttaagtgcagcttatcgccttctgcaagatgacgaggaaatgaatattttgattaacctctcaaaggatgactggagggagtttcgaaccttggtaattgaaatggtgatggccacagatatgtcttgtcacttccaacaaatcaaagcaatgaagactgctctgcagcagccagaagccattgaaaagccaaaagccttatcccttatgctgcatacagcagatattagccatccagcaaaagcatgggacctccatcatcgctggacaatgtcactcctggaggagttcttcagacagggtgacagagaagcagagctggggctgcctttttctcctctgtgtgaccgaaagtccactatggttgctcagtcacaagtaggtttcattgatttcatcgtggaacccaccttcactgtgcttacggacatgaccgagaagattgtgagtccattaatcgatgaaacctctcaaactggtgggacaggacagaggcgttcgagtttgaatagcatcagctcgtcagatgccaagcgatcaggtgtcaagacctctggttcagagggaagtgccccgatcaacaattctgtcatctccgttgactataagagctttaaagctacttggacggaagtggtgcacatcaatcgggagagatggagggccaaggtacccaaagaggagaaggccaagaaggaagcagaggaaaaggctcgcctggccgcagaggagcagcaaaaggaaatggaagccaaaagccaggctgaagaaggcgcatctggcaaagctgagaaaaagacgtctggagaaactaagaatcaagtcaatggaacacgggcaaacaaaagtgacaaccctcgtgggaaaaactccaaagccgagaagtcatcaggagaacagcaacagaatggtgacttcaaagatggtaaaaataagacagacaagaaggatcactctaacatcggaaatgattcaaagaaaacagatgattcacaagagtaaaaaagacctcatagacaataaaagaggctgccagtgtcttgcatca

SEQ ID NO: 152126 - DNA, 8852 bp, Artificial Sequence
  derived and/or modified sequence
gtggtgtgtggttcccttcgtccccatcagtcgcttcaatatttcaaaatggatccggttctgtggcgggtgcgagagtgaggctgtgggggacctccaggcccaacctccgcgaagcctcgcggcttctgcgtgccctggccccgggaggataaggatttcccttccctcctacttgcgcgcggagccgagctcttgttgagctatggagtcgccaaccaaggagattgaagaatttgagagcaactctctgaaatacctgcaaccggaacagatcgagaaaatctggcttcggctccgcgggctgaggaaatataagaaaacgtcccagagattacggtctttggtcaaacaattagagagaggggaagcttcagtggtagatcttaagaagaatttggaatatgcagccacagtgcttgaatctgtgtatattgatgaaacaaggagactcctggatacagaggatgagctcagtgacattcagtcagatgctgtgccttctgaggtccgagactggctggcctccaccttcacgcggcagatggggatgatgctcaggaggagcgacgagaagccccggttcaagagcatcgttcacgcagtgcaggctgggatatttgtggagagaatgtatagacggacatcaaacatggttggactgagctatccaccagctgttattgaggcattaaaggatgtggacaagtggtcctttgacgtcttttccctcaatgaggccagtggggatcatgcactgaaatttattttctatgaactactcacacgttatgatctgatcagccgtttcaagatccccatttctgcacttgtctcatttgtggaggccctggaagtgggatacagcaagcacaaaaatccttaccataacttaatgcacgctgccgatgttacacagacagtgcattacctcctctataagacaggagtggcgaactggctgacggagctggagatctttgctataatcttctcagctgccatccatgactacgagcataccggaaccaccaacaatttccacattcagactcggtctgatccagctattctgtataatgacagatctgtactggagaatcaccatttaagtgcagcttatcgccttctgcaagatgacgaggaaatgaatattttgattaacctctcaaaggatgactggagggagtttcgaaccttggtaattgaaatggtgatggccacagatatgtcttgtcacttccaacaaatcaaagcaatgaagactgctctgcagcagccagaagccattgaaaagccaaaagccttatcccttatgctgcatacagcagatattagccatccagcaaaagcatgggacctccatcatcgctggacaatgtcactcctggaggagttcttcagacagggtgacagagaagcagagctggggctgcctttttctcctctgtgtgaccgaaagtccactatggttgctcagtcacaagtaggtttcattgatttcatcgtggaacccaccttcactgtgcttacggacatgaccgagaagattgtgagtccattaatcgatgaaacctctcaaactggtgggacaggacagaggcgttcgagtttgaatagcatcagctcgtcagatgccaagcgatcaggtgtcaagacctctggttcagagggaagtgccccgatcaacaattctgtcatctccgttgactataagagctttaaagctacttggacggaagtggtgcacatcaatcgggagagatggagggccaaggtacccaaagaggagaaggccaagaaggaagcagaggaaaaggctcgcctggccgcagaggagcagcaaaaggaaatggaagccaaaagccaggctgaagaaggcgcatctggcaaagctgagaaaaagacgtctggagaaactaagaatcaagtcaatggaacacgggcaaacaaaagtgacaaccctcgtgggaaaaactccaaagccgagaagtcatcaggagaacagcaacagaatggtgacttcaaagatggtaaaaataagacagacaagaaggatcactctaacatcggaaatgattcaaagaaaacagatgattcacaagagtaaaaaagacctcatagacaataaaagaggctgccagtgtcttgcatcattctagctgagcttcttcattctccttcttctccttcttccacaaagacccatatctggagaaggtgtacaactttcaaacacaagccccccaccccctgacccttggccttccctcacaccatctccttccaggggatgaatctttgggggttggtttgaggtcttagaactctgggggatattcccctgagcaaaacaaacaacgtgagatttttactcaaacagaaacaaaacatgaaggggcatcctcaaaatcctttgctaatgacctggctttcaaggcatctgtctggcctgatgagaatggacatcctggatatgctgggagaggcctgaaaaaagccacacacacagtaattgccattttatgactgtcaatgccgttactttaaatgttgtcatttttgcactggctactgatgatacagccatgctgacattcatcaccgcaaagatgatgattccagtctctggttcctttcctgagtcaggaacatttgttttctccaatttcctttcagacttaaaattgttcttatgctttttttcccacttctgtaatacagaattctgtttgttttctaaaaaagattattctataggaatctttatttgatggctaatttattttctctgtgcattcattagtataaacctgaatgttcagctggtgactgtactgttgagtgggaacccattgtttccactggtagcattgataactaagtggttactgaaatttttaccactggctggacatcttcttttggatatctgtggttttatttcatcactcttctttttattcagtaaagtgctaagggaattagtatcagggagatatggcagataattctttgcattttagtgagtttttaaaaatacaagatagaagtggattaatagcacgaataaaaaataagaatagtagatgtagcatggaaagagaataacattgcagcccccttgagaccaaattacaggtgggatctaagggagtgcaagtaaagtgggattttatgagtctaaatgatgtgatttagataaaagtgattcttaaaatgtggttattggtcacacaggaatctctgagtccttcccaagagtgaagcacatgaatatgctgatgatgaagtggggattagtaatagaaagagagctaggcaataggtttaagtgtattccccactacagatttaatttctacatgaaaaagcacgagaacagatatttaaacgtccttttattactaaggtgaaatattggcattttttcaggcagaaagaaagagactgtatgtggtcttcctggacctttgccttgccaaaatgttccccaacagaaagatctgaagaactttgtagtatcgaatgcacaacagcatgctgatatttgaacagatttcttctgtcagctttacattttgccttggagaaacacttagatttttctgttgtgctccctgtgttcataacaatgacctcaccacataatgtggccagaaattcaaatgacttcaggggcctagcaggtcaagtaaatgaataaagcaagccatgtaatatcacagtcattgtggtaaatggcaattcatagtgggcctttgtatcagcaagacaggaaggagcaatggggactgtgagaaattggagagggtgggtgctgtcaaaacagggtagttggtaggcagcaactgaatttgagctgtgtggggatgggggtcctagatacctaggatttgatataagctctctccaaatttttacatattgacaactaactcaaaaacttacaaacactgtgctaatcaaatgaaacatgcctgtgagctgcattcaatccatggggcattggtttgcaagctatgttcttagaggtggtatgattttgtattgaaattaaatataaccaagagtatgtcaatttttgaccttggaacctggaccttttacctcatttatattctgtatttttgtatgtggggctttttggccagtcaaaatagaaagtctacagcttccattttataatctaacaagcaacaagaaacaacatttgaaaaagaaacaggaatatagccattttttctagcaccaataaaaatggaaatgtttttcatttgctttaagtcattaatcagctgaaaaagaatagaaagagaatttcattccataaagaacttcacctaaaactctcagtgaagcaaaacaaaactccatgtaactcactcttagctttaaatctttaaaaagtgtttcgaagggatattgagtaaaaatgcagttatctattaaaaatacaaaatgctatattatatgatgctatgaattgatactggagctgataaaacattaaagtaattattccaaatcagtgctgactgcaaaagcaatatttccaaagctctagcttattttctgcggtcttttaattcccttgaaatagctttcttcaagttgagcagcaatttgggacaaacattattctattgcacagattatggcatcttactctggtttacacacacagagcaagggcttacacacctgaattaagaattaactagcatgtggggacagcaatagggatagtcctaccacagacgaaaccatgcgctctacacgtccctggataaaatgtgacaagttagcccttgaatttgggtccccatgtcaccaaatagctctatatttaagttgtgttaatgtggtacgtttcagtggcataatgacccattcttatcgaggcctttgttccatattttatttgtgccaatctttcttaggttatgagccctaatagtttatggcagcagacaagagactcatttctaacccattaaattcaaatggactttcttccactgtccatttcatttttggagctgttataaactaccgaaaacatttgacaggatcccattgtggatctgatacacttaaacagtaaaatgatatctaaacatctgaaagccaaagaataacctagtgcacgtgttcattcatttgtagaatttaagccattgtattatattttccacttggaaccatgcctttagatacaaaagtgtaaagtaaaaagcaacattatcatgggatgtgagacggtaatccaaaagttgaagaccaatttttgttatccatattttggaagtatggatactgtttattttaatatcacttctctcatgggtcacttttccttagataggtaggtaggtagatagatagatagatagatgatagatagatagatagatagatagatagatagatagatagatagatagatagatagatagataatataatatattttcttctttcttaacctatgagcagagactttgatgatggaaattactttgtaacattccccatggagcctaggaaaaacaatagaaaaaaagcatgaaatctttttctcatagtgaaatagagaagattctaagattggaaatctgtgtatgtggtgttctatcccaaataaagagaatttagggaattcaggcaacaatttttttcctaattggaaactttgttctgatcctgagatgcccacacaccccacaggagacgcagtgctggcccaccacagtgtttggaacacggtcagcattcaggaaacacattcaaaatcgtctaactgaattccactatccacttgtgaatgcaaacaaaattcaaatttccctgaaaatttattcaacttctatatgccaagcacactgctaaaggcttatcttctaagtatatgcaggcataccctactcacacaaatagcttattaccagagataggaaattgcaggtaatttgggagaaattgtcatagccaaatttatggaaaaaataaaataaaaacttctctatggcctcttgatttaagaaaaaaacagaacaatacaaaaaaaaaaaagcactaaaacaggatttatctgagaatgtctttccaaaagggaagatgacaccaatctatataaaacgtcagtggatttactgagaatccgagtggaaacttttaaaaccttaaacagactctcctacagcaaatagattctctatgtgcagcatgaggaatcactgcatagttctgctccaccaataatatgattggtacagcaccaaaccatggcaaagttagatgttaaagaacataatgttgcaataatgatgttatattggatcttatgcatgaacaaatggaaagtaataatttatcaactgtgatccatgattaaaggcctcattatcactaagaaaatgaacttaatgaaaaaaattataatgagcaatgacaatattcctataaaacctccctctgggtatcaagagacatattacctgccaaggccagattttactttttaaggtttcctctctctcaccaaagacactagtgggcacagaggtgacactagagttagaatgttaccagagtcatttgcattagacagtttatctgatcatgaacatgttcccagggagattagaaaaatgggaagcaggcctctaaagatcctccttggacatttgtaaaaaggctggctgcttctccaggaatgtctgaattaagcaagaattgtgccactgaaatagcttcttgtttttatattaaacaaggaacgattgtgcagtggatgacctggactgaaagatgtatgatggtcaagtttaaacatattaattcctgattgttttcttaaatacccaccctagtcattttttggaaaatattgccagacatatttgacatgaattcatgtttattctggcttctgttcccaagcagaagtggattaaccctggcaatggctggcttcactaactgtacttgcacccagcctgggctgccatctgctcagccaggagaagcagggagtggggtgtgggccctttaagttcgctcagggcacactcattcagtctcccctgaggagaccttgtccccctttgtggggtgaatgctggctgttgcaggccagaggcagtgccaactggagactcatcctctcagctttggtcagcttcagccacgtattcttcatgagtgctggcttctgaacctgcaggatcatttctcagtcagtttatggtgcagggtaattcatttaaaataaagcccattaaaaccccatggctatagaatgggttttaaatagattgtcctggagacacatcattgtatagtctttgcttccctctcatgacctatcttggagtagaatttgtgtactactgtccttgtctttgagtgggtatatgtgtgatggtacagaaatacagtcacatattatattaatatatatagatggataggaaaaacctacagccataggtattgtccaataactgattctagaggtagaactatagagtatacatttccttttttcttgctttgatgatatttttatacaattttatatgctataaaattttcaaaaatatatttgctattttcatttgtagagcttggttaggtttttatcagctcttgtgcccactgtacaaccagattcccctcatctaatttaaatgtcttccctttttcaaactctcctttatgttttcctttttttttcctcccatttttctacccttcacaaattccttcttttgcttctgtccaggtaacccattctgcttgcagtatcattttagcacgtacaaacacaaaataatgggaaaaataaaagcaccttgttccatgcaattcgtatgggaaagttttgggtgtcaaaggtcgctggggatagatggggaggcagaaatagcttgggaaaaggaagcaggaaaaaaggaaatctttatgggaaatcaattacccaaagcaaggtgagtcacctagaggtgaatatgatgttgttattgtcctcccttagtgtacagcacagtttttgctctcacagggtttttctctttaggatgcgtagcaccctatgcattaaatacatagcatcctaaagacaccctactcaccttgagtctgtaggctctttcctgatgagggcactggccatatatgaatggaaaactcaactcatctcctcagctttagatgttgctgctgttcagctggatttgtgagaaatatctggattactatcaagaacatttagcaagactcaaaagagagaggcaagcagaaccaaaacccaaacctcaaccaatgactagctgaataaacaattctttggaggaataaggaaggtatttctggatgtattctgagaatgctcttccaaaagggaagatggtaataatggacttgttttgatttcatggttgtgatagaatgtacttccatgatgtgaaatacacttctggcagataaaatgcaggttgtaatttgcatttgtacatcacagggtaaaagaatggccatccattctgaggaagagtgttctgttctctaagatgctgcttaaccaatgttatccaaatgccatagcatcatatctccaaatacaagattaaatcataaggattcatgtaaaacagagtatactgagctgttctcagaaaaattaatgatgtgtttattgtaaatctttattgcacagatgagcctgacagtccttcaatgtataattttcccccagcatctagtaatgcataagtacttgtatgttcttctgattaccaaataaaaacaatgagttaacctcttaattggaattggaaaaatgaaaa

SEQ ID NO: 152127 - DNA, 605 bp, Artificial Sequence
  derived and/or modified sequence
aagaaaacatcaagagtttttgagtgtggtgtgtggttcccttcgtccccatcagtcgcttcaatatttcaaaatggatccggttctgtggcgggtgcgagagtgaggctgtgggggacctccaggcccaacctccgcgaagcctcgcggcttctgcgtgccctggccccgggaggataaggatttcccttccctcctacttgcgcgcggagccgagctcttgttgagcccgggaccatggctggttcccgcagctgcctccggagcgcacctggggccatggtttgccgcgatcggagtccgctctaagtcggagtctgggggcgcagaagggggagcgcgccgagaaagtgccgggcaaacgcgcgccgcgcctggctgggcatcgcgagctgggcgaggagacggggaggggacagcccaaactatctcagcttcaccgccagtggtcacctacctgcagctatggagtcgccaaccaaggagattgaagaatttgagagcaactctctgaaatacctgcaaccggaacagatcgagaaaatctggcttcggctccgcgggctgaggaaatataagaaaacgtcccagagattacggtcttt

SEQ ID NO: 152128 - DNA, 1905 bp, Artificial Sequence
  derived and/or modified sequence
atggaaagccctaccaaagagatcgaagaattcgaaagtaacagtctcaagtaccttcagccagagcagattgagaagatctggctccggctgaggggccttcgaaagtataagaaaacctcacagcgcctgagatctctggtgaagcagttggaaaggggggaggcctcggtggtggatctgaagaagaatttggagtatgctgccacagtgctggagtccgtatatatcgatgagacacggcgattactggatactgaggatgagctatccgatattcagtccgatgccgtgccaagcgaggtacgcgactggctagcatctacattcaccagacagatgggcatgatgctccgaaggtccgacgagaagcccaggttcaagtctatcgtacatgccgtccaagctgggatcttcgtggaacggatgtatcgcaggactagcaacatggtgggattgagctatccacccgcagtaatcgaggcactgaaggatgtcgataaatggtcctttgatgtcttttcactgaacgaggccagtggcgaccatgctctcaagttcattttttatgaattactcacgcgctatgacctgatcagccggttcaagattccgatttcagctcttgtaagtttcgtggaggccctggaggttgggtacagcaaacacaaaaacccatatcataacctgatgcacgctgccgacgtcacacaaactgtgcattacttgctgtacaaaacaggtgttgcaaactggcttactgagctggaaatcttcgccatcatcttttctgctgctattcatgactatgagcataccggaacaaccaataacttccacatccagacccggagcgaccctgcaatcctgtataacgatagatctgttctggaaaaccaccacctctcagccgcatacaggttgctgcaggatgacgaggagatgaacatcctcataaatctctcaaaggacgactggagggagttccgcactctggtgatcgagatggtgatggccaccgacatgtcttgccactttcaacagataaaagctatgaaaacagctctccagcagcccgaagccattgaaaaacctaaagcactgtccttgatgctgcataccgccgatattagccatcccgctaaagcctgggatctccaccatcggtggacaatgagcctgctggaagagttctttcgacagggagatcgggaagcagaacttggtctacccttcagccctctctgtgaccggaagagcaccatggtggcgcaatcacaggtcggttttatcgattttattgtcgaacctacttttacagtgctcaccgacatgacagaaaagatcgtcagcccattgattgacgagacatcacagacaggagggacgggtcagagacggagttcacttaattccataagctccagcgacgccaagcgatcgggggtaaaaacgtctggcagcgagggatctgccccaataaacaattcggtcatttccgtagactataagagttttaaggccacatggaccgaggtggtacatattaaccgggagagatggcgggcaaaagtccccaaagaggaaaaggcaaagaaggaagcagaagagaaggccagattagccgctgaggaacaacagaaggagatggaggccaagtcccaggccgaagagggtgcatcaggcaaggccgaaaaaaagacctctggtgaaaccaagaaccaggtcaacggcactcgtgcgaataagtctgacaaccccaggggtaaaaattctaaggccgagaagtcatccggcgaacaacagcagaacggtgattttaaagatgggaaaaacaaaactgataaaaaggatcactcaaatataggaaatgacagcaaaaaaacagacgactcccaggagtag

SEQ ID NO: 152129 - DNA, 1905 bp, Artificial Sequence
  derived and/or modified sequence
atggaatctcccaccaaagaaatcgaagagttcgaaagcaattcactgaagtacctgcagcctgagcagattgaaaagatatggctgcggctgcgaggcctgcgcaaatataagaagacctcgcaacgattgcgttctctcgtgaagcagctggagaggggtgaggcttccgtcgtggatcttaaaaaaaacctggagtatgctgccacagtgcttgagtccgtctatatagatgaaactcggaggctactggacacagaggacgagctcagcgacattcaatccgacgccgtgcctagcgaggtccgggactggctggcatccacattcacaaggcagatgggcatgatgttgcggcgatccgacgagaagccacggttcaaatccatcgtccatgctgtgcaggcaggaatttttgtggagcggatgtacagaaggacaagcaacatggtgggcctaagctaccctcctgccgtgattgaagccctgaaggatgttgataaatggtcatttgatgtctttagtcttaatgaagcttctggagatcatgcccttaaattcatcttttatgaattgcttacacggtatgacctgatttcccggtttaagataccgatatcagcactggtgtcttttgtggaggcactcgaggtgggttactcgaagcataagaacccctatcacaatctgatgcatgccgctgatgttacacagactgtccattacctgctgtataaaacgggtgtggctaattggctcaccgagttggaaatcttcgctatcatctttagcgccgcaatacatgactacgaacatactggaacgaccaataattttcacatccagacgaggagcgacccagccattctgtacaatgaccggtccgtgctggagaatcaccatttaagcgctgcataccggctgttacaagatgatgaagaaatgaatatcctaattaatctaagcaaggacgattggagagagttccgcaccctggtgatagaaatggtcatggccaccgacatgtcatgccattttcagcaaataaaggctatgaagacagccctacagcagcctgaagcaattgaaaagccaaaagcactctcgctgatgcttcacaccgctgatatctctcacccggcaaaagcctgggacctccaccaccgctggacaatgtcactcctcgaagagtttttccgtcagggtgacagagaagctgaactggggctgcccttttcgccactgtgcgaccgaaagtcgaccatggtagcccagtctcaggtgggatttatcgattttattgtggaacccactttcacagtgctgacagacatgaccgagaagatcgtgtccccattaattgacgaaacatcccagactggcggaaccggccagcgtcgttccagcctgaatagcatctcttcctcagatgcaaagaggagcggtgttaaaacaagcggatctgagggctcagcccctatcaataacagcgttatttcagtggattacaaaagctttaaggcgacatggaccgaggtggtgcacatcaacagggaacgctggcgcgctaaggtgccaaaagaagaaaaagccaagaaagaggcagaggaaaaagccaggctggctgcagaggaacagcagaaggaaatggaggccaaatcgcaggctgaagaaggggctagtggcaaggcggagaagaagacttcgggcgagacgaagaaccaggttaacgggacccgggctaacaagtctgataatcctcgtggaaaaaactccaaggccgagaagagctccggtgaacaacagcagaacggagatttcaaggatggtaaaaacaagactgacaagaaagatcattcaaacattggtaacgactcaaagaagaccgatgacagccaggaatag

SEQ ID NO: 152130 - DNA, 141 bp, Artificial Sequence
  derived and/or modified sequence
atggagtccccgacaaaagaaatcgaggaatttgaatctaattccctgaagtacctgcagccagagcaaatagaaaagatctggctgcggctccgaggactgcgaaagtacaagaagacgagccagcggttacgcagttag

SEQ ID NO: 152131 - DNA, 1905 bp, Artificial Sequence
  derived and/or modified sequence
atggagagccccaccaaggagatcgaggagttcgagagcaacagcctgaagtacctgcagcccgagcagatcgagaagatctggctgagactgagaggcctgagaaagtacaagaagaccagccagagactgagaagcctggtgaagcagctggagagaggcgaggccagcgtggtggacctgaagaagaacctggagtacgccgccaccgtgctggagagcgtgtacatcgacgagaccagaagactgctggacaccgaggacgagctgagcgacatccagagcgacgccgtgcccagcgaggtgagagactggctggccagcaccttcaccagacagatgggcatgatgctgagaagaagcgacgagaagcccagattcaagagcatcgtgcacgccgtgcaggccggcatcttcgtggagagaatgtacagaagaaccagcaacatggtgggcctgagctacccccccgccgtgatcgaggccctgaaggacgtggacaagtggagcttcgacgtgttcagcctgaacgaggccagcggcgaccacgccctgaagttcatcttctacgagctgctgaccagatacgacctgatcagcagattcaagatccccatcagcgccctggtgagcttcgtggaggccctggaggtgggctacagcaagcacaagaacccctaccacaacctgatgcacgccgccgacgtgacccagaccgtgcactacctgctgtacaagaccggcgtggccaactggctgaccgagctggagatcttcgccatcatcttcagcgccgccatccacgactacgagcacaccggcaccaccaacaacttccacatccagaccagaagcgaccccgccatcctgtacaacgacagaagcgtgctggagaaccaccacctgagcgccgcctacagactgctgcaggacgacgaggagatgaacatcctgatcaacctgagcaaggacgactggagagagttcagaaccctggtgatcgagatggtgatggccaccgacatgagctgccacttccagcagatcaaggccatgaagaccgccctgcagcagcccgaggccatcgagaagcccaaggccctgagcctgatgctgcacaccgccgacatcagccaccccgccaaggcctgggacctgcaccacagatggaccatgagcctgctggaggagttcttcagacagggcgacagagaggccgagctgggcctgcccttcagccccctgtgcgacagaaagagcaccatggtggcccagagccaggtgggcttcatcgacttcatcgtggagcccaccttcaccgtgctgaccgacatgaccgagaagatcgtgagccccctgatcgacgagaccagccagaccggcggcaccggccagagaagaagcagcctgaacagcatcagcagcagcgacgccaagagaagcggcgtgaagaccagcggcagcgagggcagcgcccccatcaacaacagcgtgatcagcgtggactacaagagcttcaaggccacctggaccgaggtggtgcacatcaacagagagagatggagagccaaggtgcccaaggaggagaaggccaagaaggaggccgaggagaaggccagactggccgccgaggagcagcagaaggagatggaggccaagagccaggccgaggagggcgccagcggcaaggccgagaagaagaccagcggcgagaccaagaaccaggtgaacggcaccagagccaacaagagcgacaaccccagaggcaagaacagcaaggccgagaagagcagcggcgagcagcagcagaacggcgacttcaaggacggcaagaacaagaccgacaagaaggaccacagcaacatcggcaacgacagcaagaagaccgacgacagccaggagtag

SEQ ID NO: 152132 - DNA, 141 bp, Artificial Sequence
  derived and/or modified sequence
atggagagccccaccaaggagatcgaggagttcgagagcaacagcctgaagtacctgcagcccgagcagatcgagaagatctggctgagactgagaggcctgagaaagtacaagaagaccagccagagactgagaagctag

SEQ ID NO: 152133 - protein, 875 aa, Artificial Sequence [sequence omitted]

SEQ ID NO: 152134 - protein, 663 aa, Artificial Sequence
  derived and/or modified sequence
MESTLTLATEQPVKKNTLKKYKIACIVLLALLVIMSLGLGLGLGLRKLEKQGSCRKKCFDASFRGLENCRCDVACKDRGDCCWDFEDTCVESTRIWMCNKFRCGETRLEASLCSCSDDCLQRKDCCADYKSVCQGETSWLEENCDTAQQSQCPEGFDLPPVILFSMDGFRAEYLYTWDTLMPNINKLKTCGIHSKYMRAMYPTKTFPNHYTIVTGLYPESHGIIDNNMYDVNLNKNFSLSSKEQNNPAWWHGQPMWLTAMYQGLKAATYFWPGSEVAINGSFPSIYMPYNGSVPFEERISTLLKWLDLPKAERPRFYTMYFEEPDSSGHAGGPVSARVIKALQVVDHAFGMLMEGLKQRNLHNCVNIILLADHGMDQTYCNKMEYMTDYFPRINFFYMYEGPAPRIRAHNIPHDFFSFNSEEIVRNLSCRKPDQHFKPYLTPDLPKRLHYAKNVRIDKVHLFVDQQWLAVRSKSNTNCGGGNHGYNNEFRSMEAIFLAHGPSFKEKTEVEPFENIEVYNLMCDLLRIQPAPNNGTHGSLNHLLKVPFYEPSHAEEVSKFSVCGFANPLPTESLDCFCPHLQNSTQLEQVNQMLNLTQEEITATVKVNLPFGRPRVLQKNVDHCLLYHREYVSGFGKAMRMPMWSSYTVPQLPAIEHQIANMML

SEQ ID NO: 152135 - protein, 254 aa, Artificial Sequence
  derived and/or modified sequence
MSLGLGLGLGLRKLEKQGSCRKKCFDASFRGLENCRCDVACKDRGDCCWDFEDTCVESTRIWMCNKFRCGETRLEASLCSCSDDCLQRKDCCADYKSVCQGETSWLEENCDTAQQSQCPEGFDLPPVILFSMDGFRAEYLYTWDTLMPNINKLKTCGIHSKYMRAMYPTKTFPNHYTIVTGLYPESHGIIDNNMYDVNLNKNFSLSSKEQNNPAWWHGQPVCSILHVATEVTSISQCDRRTLFSLSGASSMSPI

SEQ ID NO: 152136 - protein, 257 aa, Artificial Sequence
  derived and/or modified sequence
MSLGLGLGLGLRKLEKQGSCRKKCFDASFRGLENCRCDVACKDRGDCCWDFEDTCVESTRIWMCNKFRCGETRLEASLCSCSDDCLQRKDCCADYKSVCQGETSWLEENCDTAQQSQCPEGFDLPPVILFSMDGFRAEYLYTWDTLMPNINKLKTCGIHSKYMRAMYPTKTFPNHYTIVTGLYPESHGIIDNNMYDVNLNKNFSLSSKEQNNPAWWHGQPMWLTAMYQGLKAATYFWPGSEVAINGSFPSIYMPYNG

SEQ ID NO: 152137 - DNA, 2628 bp, Artificial Sequence
  derived and/or modified sequence
atggagtcaaccctcacgctggctacagaacagcccgtgaaaaaaaacaccctgaagaagtataagattgcctgcatagtgttgctggcattgctcgtgatcatgtccttgggactggggttgggactcggcctgaggaagctggagaagcagggatcctgtagaaagaagtgcttcgacgcgagtttccgtggactggaaaattgtaggtgcgatgtggcctgtaaggatagaggtgattgctgctgggatttcgaagacacatgcgtggagtccacaagaatctggatgtgtaacaagtttagatgcggcgagactcgtctggaggcctccctatgttcttgtagcgacgactgcttgcaacggaaggattgctgcgccgactacaaaagcgtctgccagggcgaaacgtcctggttagaagagaattgcgacacagctcagcagagtcagtgtcccgaggggttcgaccttccacccgtgatcctgtttagtatggatggttttcgtgcagagtatttatatacatgggatactttgatgccaaacatcaacaaattaaagacgtgcggcatccatagcaagtatatgcgggctatgtaccccacaaaaacgtttccaaaccattacacaatcgtcacaggtctttatccagagagccacggcatcattgacaacaatatgtatgacgtaaatcttaacaaaaatttctctctttcatcaaaagagcagaataaccctgcatggtggcacggacagcccatgtggctgactgccatgtaccagggtctgaaagctgctacgtatttttggcccggcagcgaagtggccataaatgggtccttcccctctatatacatgccgtacaatggcagcgtcccttttgaggagaggatctcaaccctgcttaagtggctggatctgccgaaggctgagcgcccaaggttttatacaatgtactttgaagagccagactcaagtggccatgcaggcggtcccgtgagtgctagggtgatcaaagccctgcaggtagtcgatcacgcctttggcatgctgatggaagggctcaagcagaggaacctccacaattgtgttaacatcatcctccttgctgaccatggaatggatcagacttactgcaacaagatggagtacatgactgactacttcccgcggatcaacttcttctacatgtatgagggcccggctcccaggattcgcgcccacaacatcccacacgactttttttctttcaacagcgaggagatcgtgcggaaccttagctgtagaaagccagaccagcacttcaagccatacctgacacccgacctgcctaagcgcctgcattatgccaagaacgtgcgaattgacaaagttcacctgttcgtcgaccagcagtggctcgcagtcaggagtaagtctaatactaattgtggaggcggaaatcatggttataataacgagtttaggagtatggaggccatcttcctcgcgcacggccctagctttaaggaaaaaacggaagtcgagcccttcgaaaatattgaagtgtacaacctgatgtgcgatcttctacgcatccagccagcacccaacaacggcactcatggctcactcaaccatcttcttaaagtgccgttctatgaaccgagccacgctgaggaagtgtccaagttctcagtgtgtgggtttgcaaaccctctcccaaccgagtcccttgattgcttttgtcctcacttgcaaaactctacgcaactcgaacaggttaaccaaatgctgaatcttacacaggaggaaatcacggcaactgtgaaagtcaatctgcccttcggtcggccgcgcgtgctacagaagaacgtagaccactgcctgctttatcatcgcgagtacgtgagcggcttcgggaaagccatgcggatgccgatgtggtcatcctacacagtgccgcagttaggtgacaccagtccgttgcctcccacggtcccagactgtctgagggcagacgtgagagtgccccccagtgaatcccagaaatgtagcttttacctggcagataagaatatcacacatggttttctctacccccctgcaagcaacagaaccagcgatagtcagtacgatgcactcataacaagtaatctagtccctatgtacgaagaatttagaaagatgtgggattattttcatagtgttttgctgatcaaacatgcgaccgaaagaaacggtgttaatgtcgtgtccgggcctatcttcgattataactacgatggacacttcgacgcacccgacgaaatcaccaaacatctggccaacacagacgtgcctattcctacgcactacttcgtggtactcacatcctgtaaaaataagtcccatacacctgaaaactgtccaggctggctggacgtactgccctttatcattccacacaggcctacaaatgtggagtcttgtccagaagggaagccagaggcactttgggtagaggagaggttcaccgcacacatagctcgggttcgggatgtcgaattactgactggcctggacttctaccaggacaaggtgcagcctgtgtccgagatacttcagcttaagacctacctgcccaccttcgaaacgacaatatag

SEQ ID NO: 152138 - DNA, 1992 bp, Artificial Sequence
  derived and/or modified sequence
atggaatcaaccctcactttggctaccgagcagcccgtgaagaagaacacactgaagaagtacaaaattgcctgtatagtcctgcttgcgcttctggttattatgagtctgggactggggttgggactcgggctacgtaaactcgaaaagcaaggttcttgccggaagaagtgtttcgatgcttccttccgcgggctggaaaactgcaggtgtgacgtggcgtgcaaagacagaggggattgctgctgggattttgaggacacctgtgtcgagagtacacgaatctggatgtgcaataagtttagatgtggagagaccaggctggaggcatcgctctgttcttgctcagatgattgcctgcaacgaaaggactgttgcgcagattataagagtgtgtgtcagggggagacatcatggctagaagagaattgcgacaccgcgcagcaaagccagtgtcccgagggcttcgatctgccacccgtcattttgttcagcatggatggcttccgagctgaatatctctatacttgggatacccttatgcctaatataaacaagctaaagacatgtgggattcacagcaagtacatgagagctatgtatcccacaaaaacgtttccgaaccactacacgattgtgaccgggctttatcccgaatcccacggcataatcgataacaacatgtacgatgtgaacctcaataagaattttagcctgtcttcaaaggagcagaacaatcctgcctggtggcacggccagcccatgtggctgaccgctatgtatcagggattgaaggccgccacatacttctggcccggctcagaagttgcgatcaatggctcattcccctcaatttatatgccatacaatgggtccgtgccatttgaggagcgcatatcaaccctgctgaagtggcttgatctgccgaaggccgaacgtcccagattttatactatgtatttcgaggaaccagactcttccgggcatgctggcggccctgtatcggcacgcgtgattaaggccctccaggtggtagatcacgcgtttgggatgctgatggagggcctgaagcagcggaacctgcacaactgcgtgaatatcatactgctggctgatcacggaatggatcagacctactgtaataaaatggagtacatgacagattactttccacggattaatttcttttacatgtacgagggccccgcccccaggattagggcgcacaacatcccacacgattttttctctttcaattccgaggaaatcgtcaggaatctttcatgcagaaaacccgatcagcactttaagccctacctgacccccgatctaccaaagaggctgcactacgccaaaaatgtaaggattgacaaggtgcatttgtttgtggatcagcagtggctagccgtgcgaagcaagagcaatactaattgcggcggaggaaaccatggctacaacaatgagtttcgcagcatggaggccatctttcttgcccacggacctagcttcaaagaaaaaacagaagtcgagccatttgagaacatcgaagtgtacaatctgatgtgcgacctgctgaggatccagccagccccaaacaatggaacccatggatccctgaatcacctcctgaaagtacctttctacgagcctagtcacgccgaagaagtgtctaaattttcagtctgtggttttgcaaatccgctgcccaccgagtcgttggactgcttttgcccccacctgcagaactccacccaactggaacaggtgaatcagatgcttaatctgacccaggaagagattacagccactgtgaaggtgaacctgccctttgggagaccaagagtgctgcaaaaaaatgttgatcactgcctattatatcacagggaatacgtctcagggtttgggaaggccatgcggatgcctatgtggtctagttacaccgtgccacagcttccagccattgagcatcagattgcaaatatgatgttgtag

SEQ ID NO: 152139 - DNA, 2628 bp, Artificial Sequence
  derived and/or modified sequence
atggagagcacactcacactcgcaaccgagcagccagtgaaaaagaacactctaaagaagtataagattgcttgcatcgttctcttggccttactcgtcatcatgagcttaggactaggcctcgggttgggactgagaaagctcgaaaagcagggatcttgtaggaagaaatgcttcgacgcttctttccgcggacttgagaactgccgctgtgacgtagcatgcaaagatcggggggattgctgctgggacttcgaggatacttgcgtggaaagcacgaggatctggatgtgtaacaaattcagatgtggggaaactcgcctcgaggcctccctctgttcctgttccgatgactgtctgcagcgtaaggattgttgcgctgactacaaatcagtgtgccagggcgagacaagctggctcgaagaaaattgcgacactgcgcagcaaagccaatgtccagagggtttcgatctcccaccagttatcttattcagtatggatggatttcgggccgagtatctctacacatgggatacgttaatgccaaatattaataagctgaagacctgcgggattcacagcaagtatatgcgagccatgtatcctacgaaaacttttccaaaccactatacaatcgtgacagggctttatcccgaatctcatggaataatcgataacaacatgtatgatgttaacctgaataagaacttttccctcagctcgaaggagcaaaacaaccccgcatggtggcacggacaacccatgtggttgactgctatgtatcagggcctgaaagcagccacttatttttggccaggatcagaggtggccattaacggctctttcccgagcatctacatgccgtacaacgggagcgtgcccttcgaagaacgaatcagtacgctgctgaaatggcttgacctcccaaaggctgaaagaccccggttttataccatgtacttcgaagaacctgacagcagcgggcatgcaggcggacccgtcagcgcgcgggttattaaagctctccaggtagtggaccacgctttcggcatgcttatggaggggttgaaacaacggaacctgcacaactgtgtcaatattattctgctggctgatcacggaatggaccagacttactgtaataagatggagtatatgacagactactttccacgtatcaacttcttttatatgtacgagggccctgcaccccgcatcagagcacataacatcccccacgattttttcagtttcaattcggaagaaatcgtgcgcaatctttcatgtcgcaagcccgatcagcattttaagccctacctgactcctgacctgccgaagagattacactatgcaaaaaatgtgcgcattgacaaggtgcacctttttgtggaccagcaatggctggccgtgagaagtaagagtaatacgaattgtggtggaggcaaccatggttacaataatgagtttcgatctatggaggcaattttcctggcacatggcccatcctttaaggagaaaacagaggtggagccattcgagaatattgaagtgtataatctgatgtgcgacctcctgaggattcagcccgccccaaataatggtactcacggaagtcttaatcacctgctcaaggttcccttttatgagccaagtcacgctgaggaggtttcaaagtttagtgtgtgcggttttgcaaatcctcttcctacagaatccctggattgtttctgcccccacctgcagaattcaacgcagctagagcaggtaaatcagatgctgaacctgacccaggaggagattacagccactgtaaaagttaacctgccctttgggagacctcgggtgctgcaaaagaatgtggatcactgcctgctgtaccacagagagtacgtgagcgggttcggtaaggccatgcggatgccaatgtggtcatcgtacacagtgccacagttgggagatacttctccccttccgcccaccgtcccagattgtctcagagccgacgtacgggtgcccccctccgaaagtcagaaatgctcattttatctcgctgataaaaacattacccacggatttctgtatccccctgcctcgaaccggacaagtgactcgcaatatgacgctcttattacctccaacctcgtgccgatgtacgaagagttccggaaaatgtgggattatttccattccgtcttactcataaaacacgcaaccgaacggaatggcgttaacgttgtgagcggacccatttttgactataattacgatggccacttcgacgcacctgacgagattaccaagcatctggcaaatactgatgtgcccatccctacccattactttgttgttttaacatcctgcaagaataagtcacatacaccggagaattgtccagggtggttagacgtgctcccttttattatcccacaccgccccaccaacgtcgagtcttgtcctgaaggaaagcctgaagcactgtgggttgaggagagattcactgcacacatcgcaagagttagagacgtggaattgttgactggcctcgatttctatcaggacaaggtgcaacccgtctcggagatcctgcaactcaagacttatctgcccaccttcgaaactacaatatag

SEQ ID NO: 152140 - DNA, 765 bp, Artificial Sequence
  derived and/or modified sequence
atgtcactgggcctgggactgggcttaggcctccgcaagttggaaaaacaggggagctgcaggaagaagtgtttcgacgctagtttccgagggttggaaaactgtaggtgcgatgttgcttgtaaggatcgaggagactgttgctgggattttgaagatacgtgcgtggagagcacccggatttggatgtgtaacaaatttaggtgcggggagacaaggctggaggcctccctgtgtagctgctctgatgattgcttgcagaggaaggattgttgcgcggattacaaatccgtctgtcagggtgagacgtcatggctggaggagaactgcgacaccgctcagcagtcccagtgtcccgagggattcgacctgccccccgtgattctcttttccatggacggcttcagagcggaatacctatacacatgggacacacttatgccaaacattaacaagctgaaaacatgcggcattcattctaaatatatgcgcgccatgtaccctaccaaaacatttcctaaccactatacaatagtaactggcctgtacccagagtcccacggtatcatcgataataatatgtacgatgtgaacctcaataagaatttcagcctgtcatctaaggagcagaataaccccgcatggtggcacgggcagccggtgtgcagcatcctgcatgtcgccacagaagtcacttcgatttctcagtgcgatcgacgcacattgttcagtctgtcgggcgccagctccatgagtccaatctag

SEQ ID NO: 152141 - DNA, 774 bp, Artificial Sequence
  derived and/or modified sequence
atgtctctagggttgggattgggtctaggcctgagaaagcttgagaagcagggcagctgccggaaaaagtgttttgatgcctctttcagggggttagaaaattgccgctgtgacgtagcctgtaaagatagaggcgattgttgttgggattttgaggatacctgcgttgaatctacgcggatatggatgtgtaataagtttcggtgtggagagacacgcctcgaagcgagcctgtgttcctgtagtgatgattgcttgcaaaggaaagattgctgcgccgactacaaatcagtgtgccagggcgaaacctcgtggcttgaggagaattgcgacacagcgcagcagagccagtgtcccgagggctttgacctccccccggtgatactgtttagtatggacggttttagagctgaatacctgtacacatgggacacattaatgccaaacatcaataagctgaagacctgtggtatccatagcaagtatatgcgtgcgatgtatccaaccaagacattcccgaaccactataccatagtaaccggcttgtaccccgaatcccacggaatcatcgacaataacatgtatgatgtgaaccttaataagaacttcagcttgtccagcaaggagcagaataatccggcctggtggcatggacaaccgatgtggttgaccgcaatgtatcagggcttgaaggctgccacttacttttggcccggtagtgaggtcgccattaacggatcctttcctagcatttacatgccgtacaacggctag

SEQ ID NO: 152142 - DNA, 2628 bp, Artificial Sequence
  derived and/or modified sequence
atggagagcaccctgaccctggccacagagcagcctgtgaagaagaacaccctgaagaagtacaagatcgcctgcatcgtgctgctggccctgctggtgatcatgagcctgggcctgggcctgggcctgggcctgaggaagctggagaagcagggcagctgcaggaagaagtgctttgatgccagcttccggggcctggagaactgccgctgtgatgtggcctgcaaggacagaggagactgctgctgggactttgaggacacctgtgtggagagcacccgcatctggatgtgcaacaagttccgctgtggggagacccggctggaggccagcctgtgcagctgcagtgatgactgcctgcagaggaaggactgctgtgccgactacaagtctgtgtgccagggcgagacctcctggctggaggagaactgtgacacagcccagcagagccagtgcccagagggctttgacctgccccctgtgatcctcttctccatggatggcttccgggcagagtacctgtacacctgggacaccctgatgcccaacatcaacaagctgaagacctgtggcatccacagcaagtacatgagggccatgtaccccaccaagaccttccccaaccactacaccatcgtgacaggcctgtacccagagagccacggcatcatcgacaacaacatgtatgatgtgaacctgaacaagaacttcagcctgagcagcaaggagcagaacaacccagcctggtggcacggccagcccatgtggctgacagccatgtaccagggcctgaaggccgccacctacttctggccaggcagcgaggtggccatcaatggcagcttccccagcatctacatgccctacaacggctctgtgccctttgaggagcgcatcagcaccctgctgaagtggctggacctgcccaaggccgagcggccccgcttctacaccatgtactttgaggagccagacagcagcggccacgccggcggccctgtgtctgcccgggtcatcaaggccctgcaggtggtggaccacgccttcggcatgctgatggagggcctgaagcagaggaacctgcacaactgtgtgaacatcatcctgctggccgaccacggcatggaccagacctactgcaacaagatggagtacatgacagactacttcccccgcatcaacttcttctacatgtatgagggccctgccccccgcatccgggcccacaacatcccccatgacttcttctccttcaacagcgaggagatcgtgaggaacctgagctgcaggaagccagaccagcacttcaagccctacctgaccccagacctgcccaagaggctgcactacgccaagaatgtgagaattgacaaggtgcacctgtttgtggaccagcagtggctggccgtgcgcagcaagagcaacaccaactgtggcggcggcaaccacggctacaacaatgagttccgctccatggaggccatcttcctggcccacggccccagcttcaaggagaagacagaggtggagccctttgaaaatattgaggtgtacaacctgatgtgtgacctgctgcgcatccagcctgcccccaacaacggcacccacggcagcctgaaccacctgctgaaggtgcccttctatgagcccagccatgctgaggaggtgtccaagttctctgtgtgtggctttgccaaccccctgcccacagagagcctggactgcttctgcccccacctgcagaacagcacccagctggagcaggtgaaccagatgctgaacctgacccaggaggagatcacagccaccgtgaaggtgaacctgcccttcggccggccccgggtgctgcagaagaatgtggaccactgcctgctgtaccaccgggagtatgtgtctggctttgggaaggccatgaggatgcccatgtggagcagctacacagtgccccagctgggggacaccagccccctgccccccaccgtgcctgactgcctgcgggcagatgtgcgggtgccccccagcgagagccagaagtgcagcttctacctggccgacaagaacatcacccacggcttcctgtaccccccagccagcaacagaacaagtgacagccagtatgatgccctgatcaccagcaacctggtgcccatgtatgaggagttcaggaagatgtgggactacttccacagcgtgctgctgatcaagcacgccacagaaagaaatggagtgaatgtggtgtctggccccatctttgactacaactatgatggccactttgatgccccagatgagatcaccaagcacctggccaacacagatgtgcccatccccacccactactttgtggtgctgaccagctgcaagaacaagagccacaccccagagaactgccccggctggctggatgtgctgcccttcatcatcccccaccggcccaccaacgtggagagctgcccagagggcaagccagaggccctgtgggtggaggagcgcttcaccgcccacatcgcccgggtgagagatgtggagctgctgaccggcctggacttctaccaggacaaggtgcagcctgtgtctgagatcctgcagctgaagacctacctgcccacctttgagaccaccatctag

SEQ ID NO: 152143 - DNA, 1992 bp, Artificial Sequence
  derived and/or modified sequence
atggagagcaccctgaccctggccacagagcagcctgtgaagaagaacaccctgaagaagtacaagatcgcctgcatcgtgctgctggccctgctggtgatcatgagcctgggcctgggcctgggcctgggcctgaggaagctggagaagcagggcagctgcaggaagaagtgctttgatgccagcttccggggcctggagaactgccgctgtgatgtggcctgcaaggacagaggagactgctgctgggactttgaggacacctgtgtggagagcacccgcatctggatgtgcaacaagttccgctgtggggagacccggctggaggccagcctgtgcagctgcagtgatgactgcctgcagaggaaggactgctgtgccgactacaagtctgtgtgccagggcgagacctcctggctggaggagaactgtgacacagcccagcagagccagtgcccagagggctttgacctgccccctgtgatcctcttctccatggatggcttccgggcagagtacctgtacacctgggacaccctgatgcccaacatcaacaagctgaagacctgtggcatccacagcaagtacatgagggccatgtaccccaccaagaccttccccaaccactacaccatcgtgacaggcctgtacccagagagccacggcatcatcgacaacaacatgtatgatgtgaacctgaacaagaacttcagcctgagcagcaaggagcagaacaacccagcctggtggcacggccagcccatgtggctgacagccatgtaccagggcctgaaggccgccacctacttctggccaggcagcgaggtggccatcaatggcagcttccccagcatctacatgccctacaacggctctgtgccctttgaggagcgcatcagcaccctgctgaagtggctggacctgcccaaggccgagcggccccgcttctacaccatgtactttgaggagccagacagcagcggccacgccggcggccctgtgtctgcccgggtcatcaaggccctgcaggtggtggaccacgccttcggcatgctgatggagggcctgaagcagaggaacctgcacaactgtgtgaacatcatcctgctggccgaccacggcatggaccagacctactgcaacaagatggagtacatgacagactacttcccccgcatcaacttcttctacatgtatgagggccctgccccccgcatccgggcccacaacatcccccatgacttcttctccttcaacagcgaggagatcgtgaggaacctgagctgcaggaagccagaccagcacttcaagccctacctgaccccagacctgcccaagaggctgcactacgccaagaatgtgagaattgacaaggtgcacctgtttgtggaccagcagtggctggccgtgcgcagcaagagcaacaccaactgtggcggcggcaaccacggctacaacaatgagttccgctccatggaggccatcttcctggcccacggccccagcttcaaggagaagacagaggtggagccctttgaaaatattgaggtgtacaacctgatgtgtgacctgctgcgcatccagcctgcccccaacaacggcacccacggcagcctgaaccacctgctgaaggtgcccttctatgagcccagccatgctgaggaggtgtccaagttctctgtgtgtggctttgccaaccccctgcccacagagagcctggactgcttctgcccccacctgcagaacagcacccagctggagcaggtgaaccagatgctgaacctgacccaggaggagatcacagccaccgtgaaggtgaacctgcccttcggccggccccgggtgctgcagaagaatgtggaccactgcctgctgtaccaccgggagtatgtgtctggctttgggaaggccatgaggatgcccatgtggagcagctacacagtgccccagctgcctgccatcgagcaccagatcgccaacatgatgctgtag

SEQ ID NO: 152144 - DNA, 765 bp, Artificial Sequence
  derived and/or modified sequence
atgagcctgggcctgggcctgggcctgggcctgaggaagctggagaagcagggcagctgcaggaagaagtgctttgatgccagcttccggggcctggagaactgccgctgtgatgtggcctgcaaggacagaggagactgctgctgggactttgaggacacctgtgtggagagcacccgcatctggatgtgcaacaagttccgctgtggggagacccggctggaggccagcctgtgcagctgcagtgatgactgcctgcagaggaaggactgctgtgccgactacaagtctgtgtgccagggcgagacctcctggctggaggagaactgtgacacagcccagcagagccagtgcccagagggctttgacctgccccctgtgatcctcttctccatggatggcttccgggcagagtacctgtacacctgggacaccctgatgcccaacatcaacaagctgaagacctgtggcatccacagcaagtacatgagggccatgtaccccaccaagaccttccccaaccactacaccatcgtgacaggcctgtacccagagagccacggcatcatcgacaacaacatgtatgatgtgaacctgaacaagaacttcagcctgagcagcaaggagcagaacaacccagcctggtggcacggccagcctgtgtgcagcatcctgcacgtggccacagaggtgaccagcatcagccagtgtgacaggaggaccctcttcagcctgagcggggccagctccatgagccccatctag

SEQ ID NO: 152145 - DNA, 774 bp, Artificial Sequence
  derived and/or modified sequence
atgagcctgggcctgggcctgggcctgggcctgaggaagctggagaagcagggcagctgcaggaagaagtgctttgatgccagcttccggggcctggagaactgccgctgtgatgtggcctgcaaggacagaggagactgctgctgggactttgaggacacctgtgtggagagcacccgcatctggatgtgcaacaagttccgctgtggggagacccggctggaggccagcctgtgcagctgcagtgatgactgcctgcagaggaaggactgctgtgccgactacaagtctgtgtgccagggcgagacctcctggctggaggagaactgtgacacagcccagcagagccagtgcccagagggctttgacctgccccctgtgatcctcttctccatggatggcttccgggcagagtacctgtacacctgggacaccctgatgcccaacatcaacaagctgaagacctgtggcatccacagcaagtacatgagggccatgtaccccaccaagaccttccccaaccactacaccatcgtgacaggcctgtacccagagagccacggcatcatcgacaacaacatgtatgatgtgaacctgaacaagaacttcagcctgagcagcaaggagcagaacaacccagcctggtggcacggccagcccatgtggctgacagccatgtaccagggcctgaaggccgccacctacttctggccaggcagcgaggtggccatcaatggcagcttccccagcatctacatgccctacaacggctag

SEQ ID NO: 152146 - DNA, 2628 bp, Artificial Sequence
  derived and/or modified sequence
atggagagcaccctgaccctggccaccgagcagcccgtgaagaagaacactttgaagaaatacaagatagcttgtatcgtgctcctggccctacttgtgattatgagcttgggcctcgggttagggttggggctgcgcaagctcgagaaacagggatcttgcaggaagaagtgttttgatgcttcctttaggggtctcgaaaactgtagatgtgacgtggcctgtaaggataggggcgactgttgctgggattttgaggatacttgtgtggagtccacccgcatctggatgtgcaacaaatttagatgcggggaaacaagactggaagcaagcttgtgctcgtgtagcgacgattgcctacaacgtaaagactgttgcgcggattacaaatcggtttgtcagggcgaaaccagctggctggaagagaactgcgataccgcacagcaaagccaatgtcctgaaggtttcgaccttcctcctgtcattctcttttccatggatggtttccgggctgagtatttatatacgtgggacactctaatgccgaacatcaataaactgaagacatgtggtattcattcaaaatacatgcgcgccatgtatcccaccaagacttttcccaaccactatacgattgtgaccggcctgtatccggaaagtcatggaatcatcgacaacaacatgtatgatgtgaacctgaacaagaacttttccttgtcatctaaggagcagaacaacccagcctggtggcacggtcagcccatgtggctgacagctatgtaccaggggttgaaggccgctacatacttctggccaggatctgaggtggcaattaacgggtcctttcctagcatctatatgccctacaacggatcggtcccctttgaggaacgaatctccaccctgctaaaatggctggatttacctaaggccgaaaggccaaggttttacaccatgtatttcgaagagccagacagttccggccatgccggagggcctgtttcagcgagagtgatcaaggcactgcaggttgtcgaccatgcattcgggatgctgatggaaggactaaagcagaggaacctccacaattgcgtcaatatcatactcctcgcagaccacggaatggatcaaacctactgtaacaagatggaatacatgaccgattattttcccagaataaacttcttctatatgtacgagggacctgcaccccggatacgcgcgcataatatcccccatgattttttctcattcaacagcgaggagatagtgcgtaatttgagctgcaggaagcctgaccaacactttaagccatatttgacaccagatttacctaagagactgcactacgccaaaaatgttagaatcgacaaggtccatttgttcgtggaccagcaatggctcgctgtacgctctaagtctaacacaaattgcggagggggcaaccacggctataataacgagttcaggagcatggaggctatctttctggctcatggtccatcattcaaggaaaagacagaggtagagccattcgaaaacatcgaagtgtataacctaatgtgtgacctactccgcattcagcccgcccccaacaacgggactcacggctccttgaatcatctacttaaagtgccattttatgagccttcccatgcagaggaggtgagcaaattcagcgtctgtggattcgccaatccacttccaactgagagtctcgactgtttttgtccacatctacaaaattccacccagctggagcaggtcaatcagatgcttaaccttacccaggaggagattactgccactgtgaaagtcaatctgcccttcggcagaccaagagttctgcaaaaaaatgtggatcactgtctcctgtatcacagagaatacgtcagtggctttgggaaggcaatgcggatgcccatgtggtctagttatacggtgccacagttaggagatacatcacccctgccccccaccgtccccgactgcctcagagctgatgtgcgcgtgcccccatccgaatctcaaaaatgcagcttctacctggccgataagaacatcactcacggattcctgtaccctcctgcgtccaaccgcacatccgactcccagtatgacgccttgataacatctaatctcgtacctatgtacgaagaatttagaaagatgtgggattatttccacagtgtgctcctgatcaagcatgccactgagcgaaacggagtgaacgtggtgtccggacctatctttgactacaactatgacggccacttcgatgcccctgacgaaatcaccaagcatctggctaatacagatgtccccattcctacgcattattttgtggtcctcacctcttgtaagaacaagagtcacactcccgaaaattgccctggctggttggacgtgctgccctttatcattcctcaccggccaacaaatgtggaatcctgccctgagggtaaaccagaggccctatgggtggaggaaaggtttacagcacacatcgcgcgcgtaagagatgttgagctgctcacagggctggacttctatcaggacaaggtccagcctgtctcggaaatcctgcagctcaagacatacctcccaaccttcgaaacaactatttag

SEQ ID NO: 152147 - DNA, 1992 bp, Artificial Sequence
  derived and/or modified sequence
atggagagcaccctgaccctggccaccgagcagcccgtgaagaagaatacactgaaaaagtacaagatcgcatgcattgtgttgcttgcactgctggtcattatgtcactgggactcggcctgggcctgggcttgaggaagctggagaaacaagggagttgccggaagaagtgctttgatgcttcgttccggggcctcgaaaattgtaggtgcgacgtggcatgcaaagacaggggagactgctgttgggactttgaagacacatgcgtcgagtccactagaatctggatgtgcaataagtttcggtgtggggagaccaggttggaggctagcttgtgcagttgtagcgatgactgtctgcaacgaaaagactgctgcgccgactataagagcgtctgtcagggtgaaacttcgtggctcgaagagaactgcgatactgcacaacagtcgcagtgtcccgagggcttcgacctcccacctgttatcctcttttctatggacggctttcgtgcagagtatctgtatacctgggacaccctgatgcctaatatcaacaaactgaagacttgtggcatccactccaaatacatgcgagctatgtatccaacaaagacttttcccaaccattacaccatagtaacaggtctttacccggagagccacggcattatcgacaataacatgtatgacgtgaacctcaataagaacttttccctctcctccaaggagcagaacaacccagcctggtggcacggacaacccatgtggctcaccgcaatgtaccagggcctgaaggccgctacatacttttggcccggcagcgaggtggcgatcaacggttcatttccctccatttatatgccatataatggcagcgtgccattcgaggagagaatttctaccctactgaagtggttagacctgcccaaagccgaacgccctaggttctacaccatgtattttgaagaacccgatagctcgggccacgcgggaggccccgtgtctgcccgagtgatcaaagctttgcaagtagtagaccatgcctttgggatgttgatggagggtttgaagcagcggaatctgcataactgtgttaatatcatccttctcgctgaccacgggatggatcagacctattgcaataagatggagtatatgaccgattacttccccaggatcaattttttttatatgtacgaagggcctgcaccgagaatcagggcacacaatatccctcatgacttcttcagcttcaactccgaggagatagtgagaaacttgtcatgcagaaaacctgaccagcacttcaagccttatctcacccctgacctcccaaagagactgcattatgccaagaatgtaagaatcgacaaagttcacttgtttgtggaccagcagtggcttgccgtgcgctccaagtccaacacgaattgtggcgggggcaaccatggctataacaatgagtttcgtagcatggaagcaatttttctggcacacggtccatcttttaaggaaaagacggaagtggagccattcgagaatatcgaggtgtataatctcatgtgtgatctgctgagaatccagcccgcccctaataacggcactcatggctccctgaatcacctcttaaaagtgcccttctatgagccaagccacgccgaagaggtctcgaaattctccgtctgcggatttgctaatccgctccctacagagtccttagactgtttctgtcctcacctccagaatagcacccagctggagcaggtgaaccaaatgttgaacttgacccaagaggaaataaccgcgactgtaaaggttaacctaccattcggaagaccccgtgtgcttcagaaaaatgtggaccattgcctactgtaccaccgggaatatgtgtctggatttgggaaggctatgcgcatgcccatgtggagctcgtacacagtgccgcagcttcccgccatagaacatcagattgccaacatgatgctgtag

SEQ ID NO: 152148 - DNA, 2628 bp, Artificial Sequence
  derived and/or modified sequence
atggagagcaccctgaccctggccaccgagcagcccgtgaagaagaacacgctgaaaaagtataagattgcttgtatcgtcctgctcgccctgcttgtcattatgtccctcgggctgggcctaggtctgggcctcaggaaattggagaaacaagggtcatgtcgtaaaaagtgttttgatgcaagtttccgcggattggagaactgccggtgtgacgttgcgtgcaaggacaggggtgactgctgctgggactttgaggacacctgcgttgaatcaactcggatttggatgtgtaacaagtttagatgtggggagacccgcctcgaggccagtctttgcagctgtagcgacgattgcctgcagcgaaaggactgctgcgccgattataagagcgtgtgccagggcgagacctcctggttggaagagaactgtgatactgcgcaacagtcacagtgtccggagggatttgacctacccccagtgattctatttagcatggacggcttccgcgcggagtacctgtacacatgggatacattaatgcccaatattaataaactgaaaacctgtggaatccattccaaatacatgcgcgccatgtatcctacgaaaacgttccccaatcactacactattgtcactggattgtaccccgaatcccatgggattatcgataataacatgtacgatgtgaacctaaataaaaactttagtctgtctagtaaagagcagaataacccagcctggtggcatggacagccaatgtggctgacagccatgtaccaaggccttaaggccgctacatacttctggccgggaagtgaagttgctattaacggctcctttccgtctatttatatgccttataacggctcagtccccttcgaggaaaggatttcaacgttgctaaaatggttggatttgcccaaggccgaaaggccgcgcttttataccatgtattttgaggagcctgactcttctgggcatgcaggaggacctgtttccgcccgagtcatcaaagctttacaggtggtggatcatgcttttggcatgctcatggagggcctcaaacagcggaacttgcacaactgcgttaacattatcctccttgccgaccatggcatggatcagacctactgcaacaagatggagtacatgactgactactttccccgcatcaactttttctacatgtacgaaggcccagcaccaaggatccgtgcccacaatatcccccacgactttttctctttcaatagcgaggagattgtgaggaacctgtcttgccgtaaacccgatcagcacttcaaaccttacctcactcctgacttgcctaagcgtctgcactatgcaaagaatgtgaggattgacaaggttcatctgttcgtcgatcaacagtggctggcagtgaggtctaaatccaacactaactgtggggggggcaaccatggttataataatgagttccggtctatggaggctatctttctcgcacatggccccagcttcaaagagaagacggaggtcgaacccttcgagaacattgaggtatacaacttaatgtgcgacctcttgcgtatccagcccgcacctaataacgggacccacggttctctcaaccacctcctgaaggtgccattctatgagcccagtcacgccgaggaggttagtaagttttcagtctgtggcttcgcgaaccccctgcccactgagagcttggactgtttttgcccgcaccttcagaactccacccagttggagcaggtgaatcagatgctcaacctgacacaggaagagattaccgctactgtgaaagtaaacctgccattcggtcgtcctcgtgtgctgcagaaaaatgtcgaccattgcttgctttaccatcgggagtacgtgtccggatttggtaaggccatgcggatgcccatgtggtcaagttacacagttccacagttgggagacacctcacctctcccaccaacagttcctgactgtctgcgcgccgacgtgcgagtcccgccctccgagtcccagaagtgcagcttttacttggctgataaaaacataacccatggctttctgtatcctcccgctagcaacagaacctctgactcacaatatgacgccctgatcacaagcaatttggtgcctatgtatgaggagttcagaaagatgtgggattattttcacagcgtactcctgattaaacacgctaccgagaggaatggcgtgaatgtcgtgtccggacccattttcgattataattatgacggacactttgacgctccagatgagattactaagcacttagccaataccgatgtgccgattcccacccattacttcgtggtgttaacctcctgtaaaaacaaaagccatacgccggagaattgtcccggatggctggatgttctgccctttattatcccccaccgcccgacgaatgtagagtcctgtccggaggggaaaccggaggccttgtgggtcgaggagaggtttactgctcacatcgcccgcgtgagggacgtggagctgttgacagggctggacttctatcaggacaaggtccagcctgtttcagagatcctgcagcttaagacctatctgccaacttttgaaactaccatatag

SEQ ID NO: 152149 - DNA, 765 bp, Artificial Sequence
  derived and/or modified sequence
atgagcctgggcctgggcctgggcctgggcctgcggaagctggagaaacagggctcgtgcagaaagaaatgcttcgacgcttccttcaggggtcttgagaattgcaggtgtgatgtcgcctgcaaagataggggtgattgctgttgggacttcgaagacacatgtgtcgagagcacccggatctggatgtgtaacaaattccggtgcggagagacacgcctggaagcttccctctgttcctgctcagatgactgcctccagaggaaggattgctgcgccgattacaagtcagtgtgtcagggtgaaacatcatggctggaagaaaactgcgatactgctcagcagagccaatgcccagagggtttcgatcttccccccgtcattctattttccatggacggattcagggcagaatacctctacacctgggatacgctcatgccaaacatcaacaagctcaagacctgcggcatccacagcaagtacatgagggctatgtacccaactaagacctttcctaaccattacaccattgttaccggcctgtatcctgagagccatgggattatcgataacaatatgtatgacgtgaacctaaataaaaatttttcactgtcttccaaggagcagaataaccccgcatggtggcacgggcaacccgtatgtagcatcctgcatgtggctaccgaggtgacctcaatcagtcagtgtgaccggcgtacattgtttagcctcagcggagcctcctccatgagccccatctag

SEQ ID NO: 152150 - DNA, 774 bp, Artificial Sequence
  derived and/or modified sequence
atgagcctgggcctgggcctgggcctgggcctgcggaagctggagaagcaggggtcatgccgcaaaaaatgctttgatgcttcgtttcgcggcctggagaattgtagatgcgatgtcgcatgtaaagacaggggtgactgctgttgggattttgaagacacatgcgtggagagtactagaatttggatgtgcaataaatttcgctgcggagagacccgcctcgaagcatctctctgcagttgttccgatgactgcctgcagcgcaaggattgctgcgcagactataagtcggtgtgtcaaggagagacatcttggctggaagaaaactgcgatactgcccagcagtctcagtgtccagaaggctttgatctgccacccgtgatattgttttccatggatggtttcagggcagagtacttatatacttgggatactctgatgcccaacattaacaagctaaagacatgcgggattcactcaaaatacatgcgggccatgtatccgaccaagacatttcccaatcactacacaatagttacaggactatatccagaatcccacggaattatcgataacaacatgtacgacgttaatctgaataaaaacttctccctatcaagcaaggaacaaaataatcccgcctggtggcacgggcagcctatgtggctcaccgctatgtaccaggggctgaaggcagccacatacttctggccaggtagcgaggtagccattaacggaagtttccctagcatctacatgccatacaacgggtag

SEQ ID NO: 152151 - DNA, 2628 bp, Artificial Sequence
  derived and/or modified sequence
atggagagcactctgactcttgctacagagcagcccgtgaaaaagaacaccttaaagaagtacaagatcgcatgcattgtacttctcgccctcctcgtcataatgtctctgggactggggctgggcctggggctccgaaagctggaaaagcaggggtcttgcagaaaaaagtgcttcgacgccagttttcgcggtctcgagaactgccgatgtgacgtggcttgtaaagataggggggattgttgctgggactttgaggatacatgcgtagagagtacaagaatttggatgtgtaataagttcagatgcggtgagacccggttagaagcctctttgtgcagctgctctgatgattgtctgcagcggaaagactgctgtgctgattacaagtctgtatgccagggagagacctcttggttagaggaaaattgcgatactgcgcaacagtctcagtgcccagaagggtttgacttgccaccggtcattctgttttcaatggatggattccgcgcagaatatctgtatacatgggacaccttgatgcctaacattaataagctgaagacctgtggcattcattcgaagtacatgcgagccatgtaccccactaagacatttcccaatcactacaccatcgtgaccggattgtatccagagtcacacggaattatcgacaataacatgtacgatgtaaatcttaacaaaaactttagcctgtcttccaaagagcagaataaccctgcctggtggcacggacagccgatgtggctgaccgctatgtatcagggactcaaagcagccacatatttctggcccggttctgaggtagccattaatgggagcttcccatctatctacatgccatacaatggtagcgtaccttttgaagagcggatctctactctacttaagtggctcgatctgcctaaagccgagcgacctcgcttttatacgatgtattttgaggagccagattcctcagggcacgctggcggtcccgtgagtgcaagggtcatcaaggctttgcaggtggtggaccacgcctttggtatgctgatggaaggcttaaagcagcggaacctgcacaattgcgtcaatatcattctgctggcagatcacggaatggatcaaacatactgtaacaagatggagtatatgaccgactacttccccagaatcaacttcttttacatgtacgaaggacctgcacctagaatccgggctcataacatcccacacgactttttttctttcaactcggaagagatcgtgcgcaatttgagttgtaggaaacccgaccaacactttaaaccctacctcacacctgatttgccaaagcggttgcattatgctaagaatgtgcgcatcgacaaggtgcatctatttgttgaccagcagtggctggcagtgaggtcaaaaagcaacactaactgtggaggtggtaaccacggttataacaatgagttccgatctatggaagctatattcttggctcacggtcctagcttcaaggagaagacagaggtggaaccattcgagaatatcgaggtctacaaccttatgtgtgacctgctgcgaattcagcctgcccctaataacggtactcacggtagcctgaatcacctgcttaaagtacccttctacgaacctagtcacgcagaggaggtgagtaagttctccgtgtgtggattcgccaatcccttgcccactgaaagtctggattgcttctgtcctcacctgcagaactcaacccagctggaacaggtgaatcagatgctgaatcttacacaagaagagatcacagcaaccgtgaaggtaaatctcccattcggccgtcccagggttttacaaaagaatgtagaccactgcctgctctaccaccgcgagtatgtgtctgggttcggcaaagcaatgaggatgcctatgtggagttcctacacagtcccccaattgggcgacacctctcccctgccacccacagttccagactgtttgcgcgcagacgtgcgggtccccccaagcgagtctcagaagtgcagtttctatcttgccgataaaaatatcacacatggttttctttacccaccggcatcgaaccgcacaagcgactcccaatatgatgcgctgatcacctccaacctagtccctatgtacgaggagttccgaaagatgtgggattacttccattcagtcttgctgataaagcatgcaacggagcgtaatggagtcaacgtggtcagtggtcccatctttgactacaactacgatggacatttcgacgcacccgatgaaatcacaaagcacttagccaataccgacgtccccatcccaacccactactttgttgtgctgaccagctgcaaaaacaagagccacacacctgaaaactgtccaggctggctggatgttctgccctttatcattccgcaccgacctaccaacgtggagtcctgcccggaggggaagccagaagctctgtgggtcgaagagcggttcaccgctcatatcgctcgcgtccgagacgtagaactcctaactggccttgatttttaccaagataaggttcagcctgtttccgaaattttacagctgaaaacgtaccttccaaccttcgagaccaccatctag

SEQ ID NO: 152152 - DNA, 1992 bp, Artificial Sequence
  derived and/or modified sequence
atggagagcaccctgactctggccaccgagcagcccgtgaaaaaaaacacattgaaaaaatacaagattgcctgcatcgtcctgttagccttactcgtcatcatgtccctaggactgggcctgggcctggggctgcgaaagctagagaagcagggttcctgcagaaagaagtgttttgatgcctcatttaggggtctcgagaactgccggtgcgacgtggcttgcaaggacaggggcgattgctgctgggactttgaagacacatgcgtcgagtcaacacggatttggatgtgcaacaagtttcgctgcggagagacgaggcttgaagctagtctgtgctcatgctccgacgattgtctccagagaaaagactgttgtgctgactataagtctgtatgccagggggagacaagctggttggaagagaattgcgacaccgctcagcagtcacagtgccccgagggattcgacctgccgccagttatactgttcagtatggacggctttagggcagagtacctatacacttgggacactctgatgcctaatatcaacaagcttaagacctgtggcatccacagcaagtacatgcgggctatgtatccgacaaagacattccccaatcattatacaattgtaacaggtctgtaccctgagtcccatggaatcatcgacaataacatgtacgacgtgaacctgaacaagaattttagcctttcctccaaagagcaaaacaatccagcatggtggcatgggcagccaatgtggcttaccgcaatgtaccagggcctgaaagctgccacatatttctggccaggctcggaagtcgcgattaacgggtcattcccctcaatctatatgccctacaacggatctgttccttttgaagaaaggatttccactttactgaagtggctggatctaccaaaggccgaacggccaagattttacaccatgtacttcgaggaacctgattccagcggacacgccggtggcccagtgtccgccagggtaatcaaagcgctgcaggtggtagaccacgcctttggcatgttaatggagggcctaaagcagcgaaatctacacaattgcgtgaatatcattcttctggcagaccacggcatggatcaaacctattgtaacaaaatggagtatatgacagattattttccaaggatcaatttcttctacatgtatgaggggccagctcccaggatacgtgcacacaatatcccccacgacttcttcagtttcaactcagaagaaattgtcaggaacctgtcatgcaggaaaccagaccagcattttaagccatatctgacccccgatctgccaaagcggcttcactatgctaaaaatgtaagaattgataaagtgcaccttttcgtcgaccagcagtggctcgccgtgcgatctaaatctaatacaaactgcggcggtggaaatcacggttacaacaacgagttcagatccatggaggctatcttccttgctcatgggccttccttcaaagaaaaaaccgaggtggagccattcgaaaacattgaggtatacaacctgatgtgcgacctcctaagaatccaaccggctcctaataacggcacgcacggttctctgaatcatcttctgaaggttccattttatgaacctagccatgccgaggaggtgagtaaattctcagtgtgcggcttcgctaacccgcttcccaccgaatctttagactgcttctgcccacacctacagaattctacccagttggagcaggtgaatcaaatgctcaacctgactcaggaagagatcacagccaccgtcaaggtcaatttgccctttggacgcccaagggtgctgcaaaagaatgtggaccactgccttctgtaccacagggagtatgtgagtggtttcggcaaggctatgaggatgccaatgtggagtagctacaccgttccgcaactgccagccatcgagcaccagatagcaaacatgatgttgtag

SEQ ID NO: 152153 - DNA, 2628 bp, Artificial Sequence
  derived and/or modified sequence
atggagagtaccctcactctggctaccgaacagcctgtgaagaagaatacactgaagaaatataagatagcatgtatagtccttttggccttgctcgtgattatgagtttagggctcggactgggcttggggctgcgtaagcttgaaaagcaaggctcgtgtaggaaaaagtgctttgatgcctctttcagaggattggaaaattgtaggtgcgatgtagcgtgcaaagaccggggtgactgttgctgggatttcgaggacacatgtgtggagagtactcgaatatggatgtgcaacaagttcaggtgcggcgaaacaaggctggaggccagtctgtgctcttgttccgatgactgcctgcaacgcaaggattgttgcgcagattacaagtctgtctgccagggtgaaacaagctggctcgaggagaactgtgatacagctcagcagtcgcaatgccctgaaggtttcgatctgcctccggtaatccttttttcaatggatggatttcgagccgagtatctgtacacctgggacaccctgatgcctaatatcaataaactgaaaacctgtggcatccatagcaaatatatgcgagccatgtaccccacaaagaccttccccaaccactacactatcgtgacagggctctatccagaaagccatgggatcatcgacaataatatgtacgatgttaatctgaataagaacttttccttgtcatctaaagaacagaacaatccggcatggtggcacggtcagccaatgtggctgactgccatgtatcagggcttgaaggcggcaacctacttttggccaggaagcgaagtagccatcaatggcagtttccccagcatctacatgccttacaatgggagcgtaccttttgaggagcgcatatccacactgttgaagtggctcgatttgcctaaagccgaacggcctagattctataccatgtactttgaggaacctgactcctcaggacacgctggcggtcctgttagcgccagggtcattaaggctctccaggtcgtggaccatgccttcggcatgctcatggagggcctgaaacagagaaacctacacaattgcgtgaatattatcttgctcgccgaccatgggatggaccaaacatattgcaacaagatggagtacatgaccgattattttccgaggatcaactttttttacatgtacgaagggcctgccccaagaattagagcccataacatacctcatgactttttctctttcaatagcgaagaaatcgtccggaacttgagttgcaggaaacctgatcagcacttcaaaccctaccttacacccgatcttcctaaaagactgcattacgctaaaaatgtgagaatcgacaaagtccacctgttcgttgaccaacagtggctggctgtgaggtctaagagcaacacgaattgcggcggaggtaatcacggttacaacaatgagtttcgctctatggaagccatattcctggctcatgggccatcatttaaggaaaagacagaggttgagccctttgagaacattgaggtttacaacctcatgtgcgatctgctgagaattcagcccgctccgaacaacggaactcatggatccctcaatcatctgctcaaggtgcctttctatgagcctagccacgcagaggaggttagtaagttttccgtatgtggcttcgctaaccctctccctaccgagtccctggactgcttttgccctcacctccagaactccacacagctggagcaggtcaatcagatgctgaacttaactcaggaggaaataaccgcaacagtgaaggtcaacctgcccttcggtcggcctcgggtcctgcagaaaaacgtcgatcactgcttgctgtatcaccgggaatacgtcagcggttttggaaaggctatgcggatgcccatgtggtcttcgtatactgtcccacagttgggtgatacttcacccctgccacccaccgtgccagactgtcttcgcgctgatgttcgcgtgcctccatcggaatcgcaaaaatgttctttttatctggctgacaagaacattactcatggtttcctgtacccacccgcttcgaaccgcaccagcgactctcagtatgatgccctgataacgagcaatcttgtgccaatgtatgaagagtttaggaaaatgtgggactacttccacagtgttttactgattaaacatgcgacggagcgaaacggcgtgaacgtggttagcggcccaattttcgattacaactacgatggccacttcgacgcccctgacgaaatcactaagcatctggctaacactgatgtaccgattccaacccactatttcgtggtgcttacatcttgtaaaaataagagccacacacctgagaactgcccaggttggctggacgttttgcccttcatcattccccaccgtccgacaaacgtggagagttgtccagaggggaagccggaagctttgtgggtggaggaacggttcaccgcacatattgcaagagtcagagatgtggaacttcttacaggattagacttttaccaggacaaggtacaaccagtctcagagatcctgcagttgaagacttaccttcctacctttgagactactatatag

SEQ ID NO: 152154 - DNA, 765 bp, Artificial Sequence
  derived and/or modified sequence
atgtctcttggtctaggcctgggcttaggacttcgaaagctggagaagcaggggtcttgtagaaagaagtgtttcgacgcctcatttaggggcctcgagaactgtcgatgtgatgttgcttgcaaagataggggtgactgctgttgggatttcgaagacacatgcgtggagtcaacccggatctggatgtgtaataagttcaggtgcggagagacaagattagaggcctcattatgttcctgttccgatgattgtttgcaacgcaaagactgctgcgcagattataagtcggtttgccaaggcgaaacatcctggttggaggagaattgtgataccgctcagcagtctcagtgtccggagggttttgacttaccacctgtcattttattctcaatggatgggtttagggccgagtacctatacacttgggacacccttatgcccaatataaacaagctgaagacgtgcgggatccattctaagtacatgagggcaatgtatccgaccaagacatttcctaaccattatactatcgttaccggtctgtatcccgagtcacacggcataattgacaataacatgtacgatgttaaccttaacaaaaacttttcattaagctccaaagaacagaataaccctgcctggtggcatggacagcccgtgtgcagtattctgcatgtagcaaccgaggtgacatccatatcacagtgcgacagacggaccttattctccttatcaggggcttcaagtatgtcacctatttag

SEQ ID NO: 152155 - DNA, 774 bp, Artificial Sequence
  derived and/or modified sequence
atgagccttggcctgggcctcggtctcggcttacggaaactagagaagcaggggagttgtagaaagaaatgttttgacgcgagttttcgtggcctcgagaactgtagatgtgacgtagcctgtaaggacagaggagattgctgctgggacttcgaggacacctgcgtggagtccacccgaatttggatgtgtaataagttcaggtgtggtgaaacccgccttgaagcatctctgtgcagctgcagcgatgactgtctgcagcggaaagattgttgcgctgattataagtccgtgtgccagggtgagacaagttggctggaagaaaactgcgataccgcccaacagagccagtgtccagaaggattcgatctaccgccagtgattctgttctctatggacgggtttagagccgaatacctttacacctgggatactttgatgcccaatatcaacaagctgaagacatgtggcattcacagtaaatatatgcgggctatgtacccaactaagacctttccaaaccactataccatcgtaaccgggctgtatcccgaaagtcacggtatcattgacaacaatatgtatgatgtgaacttgaacaagaacttttccttgagcagcaaagagcagaataacccagcctggtggcacggacagccgatgtggctaactgcgatgtaccaaggcttgaaggccgctacatatttttggcctggatccgaagtggccattaatggcagtttcccttccatctatatgccctacaacggttag

SEQ ID NO: 152156 - DNA, 2628 bp, Artificial Sequence
  derived and/or modified sequence
atggagagcaccctgaccctggccaccgagcagcccgtgaagaagaacaccctgaagaagtacaagatcgcctgcatcgtgctgctggccctgctggtgatcatgagcctgggcctgggcctgggcctgggcctgagaaagctggagaagcagggcagctgcagaaagaagtgcttcgacgccagcttcagaggcctggagaactgcagatgcgacgtggcctgcaaggacagaggcgactgctgctgggacttcgaggacacctgcgtggagagcaccagaatctggatgtgcaacaagttcagatgcggcgagaccagactggaggccagcctgtgcagctgcagcgacgactgcctgcagagaaaggactgctgcgccgactacaagagcgtgtgccagggcgagaccagctggctggaggagaactgcgacaccgcccagcagagccagtgccccgagggcttcgacctgccccccgtgatcctgttcagcatggacggcttcagagccgagtacctgtacacctgggacaccctgatgcccaacatcaacaagctgaagacctgcggcatccacagcaagtacatgagagccatgtaccccaccaagaccttccccaaccactacaccatcgtgaccggcctgtaccccgagagccacggcatcatcgacaacaacatgtacgacgtgaacctgaacaagaacttcagcctgagcagcaaggagcagaacaaccccgcctggtggcacggccagcccatgtggctgaccgccatgtaccagggcctgaaggccgccacctacttctggcccggcagcgaggtggccatcaacggcagcttccccagcatctacatgccctacaacggcagcgtgcccttcgaggagagaatcagcaccctgctgaagtggctggacctgcccaaggccgagagacccagattctacaccatgtacttcgaggagcccgacagcagcggccacgccggcggccccgtgagcgccagagtgatcaaggccctgcaggtggtggaccacgccttcggcatgctgatggagggcctgaagcagagaaacctgcacaactgcgtgaacatcatcctgctggccgaccacggcatggaccagacctactgcaacaagatggagtacatgaccgactacttccccagaatcaacttcttctacatgtacgagggccccgcccccagaatcagagcccacaacatcccccacgacttcttcagcttcaacagcgaggagatcgtgagaaacctgagctgcagaaagcccgaccagcacttcaagccctacctgacccccgacctgcccaagagactgcactacgccaagaacgtgagaatcgacaaggtgcacctgttcgtggaccagcagtggctggccgtgagaagcaagagcaacaccaactgcggcggcggcaaccacggctacaacaacgagttcagaagcatggaggccatcttcctggcccacggccccagcttcaaggagaagaccgaggtggagcccttcgagaacatcgaggtgtacaacctgatgtgcgacctgctgagaatccagcccgcccccaacaacggcacccacggcagcctgaaccacctgctgaaggtgcccttctacgagcccagccacgccgaggaggtgagcaagttcagcgtgtgcggcttcgccaaccccctgcccaccgagagcctggactgcttctgcccccacctgcagaacagcacccagctggagcaggtgaaccagatgctgaacctgacccaggaggagatcaccgccaccgtgaaggtgaacctgcccttcggcagacccagagtgctgcagaagaacgtggaccactgcctgctgtaccacagagagtacgtgagcggcttcggcaaggccatgagaatgcccatgtggagcagctacaccgtgccccagctgggcgacaccagccccctgccccccaccgtgcccgactgcctgagagccgacgtgagagtgccccccagcgagagccagaagtgcagcttctacctggccgacaagaacatcacccacggcttcctgtacccccccgccagcaacagaaccagcgacagccagtacgacgccctgatcaccagcaacctggtgcccatgtacgaggagttcagaaagatgtgggactacttccacagcgtgctgctgatcaagcacgccaccgagagaaacggcgtgaacgtggtgagcggccccatcttcgactacaactacgacggccacttcgacgcccccgacgagatcaccaagcacctggccaacaccgacgtgcccatccccacccactacttcgtggtgctgaccagctgcaagaacaagagccacacccccgagaactgccccggctggctggacgtgctgcccttcatcatcccccacagacccaccaacgtggagagctgccccgagggcaagcccgaggccctgtgggtggaggagagattcaccgcccacatcgccagagtgagagacgtggagctgctgaccggcctggacttctaccaggacaaggtgcagcccgtgagcgagatcctgcagctgaagacctacctgcccaccttcgagaccaccatctag

SEQ ID NO: 152157 - DNA, 1992 bp, Artificial Sequence
  derived and/or modified sequence
atggagagcaccctgaccctggccaccgagcagcccgtgaagaagaacaccctgaagaagtacaagatcgcctgcatcgtgctgctggccctgctggtgatcatgagcctgggcctgggcctgggcctgggcctgagaaagctggagaagcagggcagctgcagaaagaagtgcttcgacgccagcttcagaggcctggagaactgcagatgcgacgtggcctgcaaggacagaggcgactgctgctgggacttcgaggacacctgcgtggagagcaccagaatctggatgtgcaacaagttcagatgcggcgagaccagactggaggccagcctgtgcagctgcagcgacgactgcctgcagagaaaggactgctgcgccgactacaagagcgtgtgccagggcgagaccagctggctggaggagaactgcgacaccgcccagcagagccagtgccccgagggcttcgacctgccccccgtgatcctgttcagcatggacggcttcagagccgagtacctgtacacctgggacaccctgatgcccaacatcaacaagctgaagacctgcggcatccacagcaagtacatgagagccatgtaccccaccaagaccttccccaaccactacaccatcgtgaccggcctgtaccccgagagccacggcatcatcgacaacaacatgtacgacgtgaacctgaacaagaacttcagcctgagcagcaaggagcagaacaaccccgcctggtggcacggccagcccatgtggctgaccgccatgtaccagggcctgaaggccgccacctacttctggcccggcagcgaggtggccatcaacggcagcttccccagcatctacatgccctacaacggcagcgtgcccttcgaggagagaatcagcaccctgctgaagtggctggacctgcccaaggccgagagacccagattctacaccatgtacttcgaggagcccgacagcagcggccacgccggcggccccgtgagcgccagagtgatcaaggccctgcaggtggtggaccacgccttcggcatgctgatggagggcctgaagcagagaaacctgcacaactgcgtgaacatcatcctgctggccgaccacggcatggaccagacctactgcaacaagatggagtacatgaccgactacttccccagaatcaacttcttctacatgtacgagggccccgcccccagaatcagagcccacaacatcccccacgacttcttcagcttcaacagcgaggagatcgtgagaaacctgagctgcagaaagcccgaccagcacttcaagccctacctgacccccgacctgcccaagagactgcactacgccaagaacgtgagaatcgacaaggtgcacctgttcgtggaccagcagtggctggccgtgagaagcaagagcaacaccaactgcggcggcggcaaccacggctacaacaacgagttcagaagcatggaggccatcttcctggcccacggccccagcttcaaggagaagaccgaggtggagcccttcgagaacatcgaggtgtacaacctgatgtgcgacctgctgagaatccagcccgcccccaacaacggcacccacggcagcctgaaccacctgctgaaggtgcccttctacgagcccagccacgccgaggaggtgagcaagttcagcgtgtgcggcttcgccaaccccctgcccaccgagagcctggactgcttctgcccccacctgcagaacagcacccagctggagcaggtgaaccagatgctgaacctgacccaggaggagatcaccgccaccgtgaaggtgaacctgcccttcggcagacccagagtgctgcagaagaacgtggaccactgcctgctgtaccacagagagtacgtgagcggcttcggcaaggccatgagaatgcccatgtggagcagctacaccgtgccccagctgcccgccatcgagcaccagatcgccaacatgatgctgtag

SEQ ID NO: 152158 - DNA, 765 bp, Artificial Sequence
  derived and/or modified sequence
atgagcctgggcctgggcctgggcctgggcctgagaaagctggagaagcagggcagctgcagaaagaagtgcttcgacgccagcttcagaggcctggagaactgcagatgcgacgtggcctgcaaggacagaggcgactgctgctgggacttcgaggacacctgcgtggagagcaccagaatctggatgtgcaacaagttcagatgcggcgagaccagactggaggccagcctgtgcagctgcagcgacgactgcctgcagagaaaggactgctgcgccgactacaagagcgtgtgccagggcgagaccagctggctggaggagaactgcgacaccgcccagcagagccagtgccccgagggcttcgacctgccccccgtgatcctgttcagcatggacggcttcagagccgagtacctgtacacctgggacaccctgatgcccaacatcaacaagctgaagacctgcggcatccacagcaagtacatgagagccatgtaccccaccaagaccttccccaaccactacaccatcgtgaccggcctgtaccccgagagccacggcatcatcgacaacaacatgtacgacgtgaacctgaacaagaacttcagcctgagcagcaaggagcagaacaaccccgcctggtggcacggccagcccgtgtgcagcatcctgcacgtggccaccgaggtgaccagcatcagccagtgcgacagaagaaccctgttcagcctgagcggcgccagcagcatgagccccatctag

SEQ ID NO: 152159 - DNA, 774 bp, Artificial Sequence
  derived and/or modified sequence
atgagcctgggcctgggcctgggcctgggcctgagaaagctggagaagcagggcagctgcagaaagaagtgcttcgacgccagcttcagaggcctggagaactgcagatgcgacgtggcctgcaaggacagaggcgactgctgctgggacttcgaggacacctgcgtggagagcaccagaatctggatgtgcaacaagttcagatgcggcgagaccagactggaggccagcctgtgcagctgcagcgacgactgcctgcagagaaaggactgctgcgccgactacaagagcgtgtgccagggcgagaccagctggctggaggagaactgcgacaccgcccagcagagccagtgccccgagggcttcgacctgccccccgtgatcctgttcagcatggacggcttcagagccgagtacctgtacacctgggacaccctgatgcccaacatcaacaagctgaagacctgcggcatccacagcaagtacatgagagccatgtaccccaccaagaccttccccaaccactacaccatcgtgaccggcctgtaccccgagagccacggcatcatcgacaacaacatgtacgacgtgaacctgaacaagaacttcagcctgagcagcaaggagcagaacaaccccgcctggtggcacggccagcccatgtggctgaccgccatgtaccagggcctgaaggccgccacctacttctggcccggcagcgaggtggccatcaacggcagcttccccagcatctacatgccctacaacggctag

SEQ ID NO: 152160 - DNA, 3154 bp, Artificial Sequence
  derived and/or modified sequence
atacagtttctctttgccagactagactaaagaaggagcactaatttattctgataaaacaggtctatgcagctaccaggacaatggaatctacgttgactttagcaacggaacaacctgttaagaagaacactcttaagaaatataaaatagcttgcattgttcttcttgctttgctggtgatcatgtcacttggattaggcctggggcttggactcaggaaactggaaaagcaaggcagctgcaggaagaagtgctttgatgcatcatttagaggactggagaactgccggtgtgatgtggcatgtaaagaccgaggtgattgctgctgggattttgaagacacctgtgtggaatcaactcgaatatggatgtgcaataaatttcgttgtggagagaccagattagaggccagcctttgctcttgttcagatgactgtttgcagaggaaagattgctgtgctgactataagagtgtttgccaaggagaaacctcatggctggaagaaaactgtgacacagcccagcagtctcagtgcccagaagggtttgacctgccaccagttatcttgttttctatggatggatttagagctgaatatttatacacatgggatactttaatgccaaatatcaataaactgaaaacatgtggaattcattcaaaatacatgagagctatgtatcctaccaaaaccttcccaaatcattacaccattgtcacgggcttgtatccagagtcacatggcatcattgacaataatatgtatgatgtaaatctcaacaagaatttttcactttcttcaaaggaacaaaataatccagcctggtggcatgggcaaccaatgtggctgacagcaatgtatcaaggtttaaaagccgctacctacttttggcccggatcagaagtggctataaatggctcctttccttccatatacatgccttacaacggaagtgtcccatttgaagagaggatttctacactgttaaaatggctggacctgcccaaagctgaaagacccaggttttataccatgtattttgaagaacctgattcctctggacatgcaggtggaccagtcagtgccagagtaattaaagccttacaggtagtagatcatgcttttgggatgttgatggaaggcctgaagcagcggaatttgcacaactgtgtcaatatcatccttctggctgaccatggaatggaccagacttattgtaacaagatggaatacatgactgattattttcccagaataaacttcttctacatgtacgaagggcctgccccccgcatccgagctcataatatacctcatgacttttttagttttaattctgaggaaattgttagaaacctcagttgccgaaaacctgatcagcatttcaagccctatttgactcctgatttgccaaagcgactgcactatgccaagaacgtcagaatcgacaaagttcatctctttgtggatcaacagtggctggctgttaggagtaaatcaaatacaaattgtggaggaggcaaccatggttataacaatgagtttaggagcatggaggctatctttctggcacatggacccagttttaaagagaagactgaagttgaaccatttgaaaatattgaagtctataacctaatgtgtgatcttctacgcattcaaccagcaccaaacaatggaacccatggtagtttaaaccatcttctgaaggtgcctttttatgagccatcccatgcagaggaggtgtcaaagttttctgtttgtggctttgctaatccattgcccacagagtctcttgactgtttctgccctcacctacaaaatagtactcagctggaacaagtgaatcagatgctaaatctcacccaagaagaaataacagcaacagtgaaagtaaatttgccatttgggaggcctagggtactgcagaagaacgtggaccactgtctcctttaccacagggaatatgtcagtggatttggaaaagctatgaggatgcccatgtggagttcatacacagtcccccagttgggagacacatcgcctctgcctcccactgtcccagactgtctgcgggctgatgtcagggttcctccttctgagagccaaaaatgttccttctatttagcagacaagaatatcacccacggcttcctctatcctcctgccagcaatagaacatcagatagccaatatgatgctttaattactagcaatttggtacctatgtatgaagaattcagaaaaatgtgggactacttccacagtgttcttcttataaaacatgccacagaaagaaatggagtaaatgtggttagtggaccaatatttgattataattatgatggccattttgatgctccagatgaaattaccaaacatttagccaacactgatgttcccatcccaacacactactttgtggtgctgaccagttgtaaaaacaagagccacacaccggaaaactgccctgggtggctggatgtcctaccctttatcatccctcaccgacctaccaacgtggagagctgtcctgaaggtaaaccagaagctctttgggttgaagaaagatttacagctcacattgcccgggtccgtgatgtagaacttctcactgggcttgacttctatcaggataaagtgcagcctgtctctgaaattttgcaactaaagacatatttaccaacatttgaaaccactatttaacttaataatgtctacttaatatataatttactgtataaagtaattttggcaaaatataagtgatttttttctggagaattgtaaaataaagttttctatttttccttaagtcccctaaaagccataatttttattattcctttttctcttttttcaattctatgaatatgtattattttaaagttatatttttcacacagagatgatgctatattacaccttcccttttttgttggtttcttaaactctaatctcatgacagattataccttccttattacttgttttatcttactcagaatctttgaatatatttttctgcccagaattatctaaacaaaagggagaacaaaagaagtatgtctcacttgggaactgaatcaactctaaatcagttttgtcacaaaactttttgtatttgactggcaatgctgattaaaatt

SEQ ID NO: 152161 - DNA, 2492 bp, Artificial Sequence
  derived and/or modified sequence
atggaatctacgttgactttagcaacggaacaacctgttaagaagaacactcttaagaaatataaaatagcttgcattgttcttcttgctttgctggtgatcatgtcacttggattaggcctggggcttggactcaggaaactggaaaagcaaggcagctgcaggaagaagtgctttgatgcatcatttagaggactggagaactgccggtgtgatgtggcatgtaaagaccgaggtgattgctgctgggattttgaagacacctgtgtggaatcaactcgaatatggatgtgcaataaatttcgttgtggagagaccagattagaggccagcctttgctcttgttcagatgactgtttgcagaggaaagattgctgtgctgactataagagtgtttgccaaggagaaacctcatggctggaagaaaactgtgacacagcccagcagtctcagtgcccagaagggtttgacctgccaccagttatcttgttttctatggatggatttagagctgaatatttatacacatgggatactttaatgccaaatatcaataaactgaaaacatgtggaattcattcaaaatacatgagagctatgtatcctaccaaaaccttcccaaatcattacaccattgtcacgggcttgtatccagagtcacatggcatcattgacaataatatgtatgatgtaaatctcaacaagaatttttcactttcttcaaaggaacaaaataatccagcctggtggcatgggcaaccaatgtggctgacagcaatgtatcaaggtttaaaagccgctacctacttttggcccggatcagaagtggctataaatggctcctttccttccatatacatgccttacaacggaagtgtcccatttgaagagaggatttctacactgttaaaatggctggacctgcccaaagctgaaagacccaggttttataccatgtattttgaagaacctgattcctctggacatgcaggtggaccagtcagtgccagagtaattaaagccttacaggtagtagatcatgcttttgggatgttgatggaaggcctgaagcagcggaatttgcacaactgtgtcaatatcatccttctggctgaccatggaatggaccagacttattgtaacaagatggaatacatgactgattattttcccagaataaacttcttctacatgtacgaagggcctgccccccgcatccgagctcataatatacctcatgacttttttagttttaattctgaggaaattgttagaaacctcagttgccgaaaacctgatcagcatttcaagccctatttgactcctgatttgccaaagcgactgcactatgccaagaacgtcagaatcgacaaagttcatctctttgtggatcaacagtggctggctgttaggagtaaatcaaatacaaattgtggaggaggcaaccatggttataacaatgagtttaggagcatggaggctatctttctggcacatggacccagttttaaagagaagactgaagttgaaccatttgaaaatattgaagtctataacctaatgtgtgatcttctacgcattcaaccagcaccaaacaatggaacccatggtagtttaaaccatcttctgaaggtgcctttttatgagccatcccatgcagaggaggtgtcaaagttttctgtttgtggctttgctaatccattgcccacagagtctcttgactgtttctgccctcacctacaaaatagtactcagctggaacaagtgaatcagatgctaaatctcacccaagaagaaataacagcaacagtgaaagtaaatttgccatttgggaggcctagggtactgcagaagaacgtggaccactgtctcctttaccacagggaatatgtcagtggatttggaaaagctatgaggatgcccatgtggagttcatacacagtcccccagttgccagcaatagaacatcagatagccaatatgatgctttaattactagcaatttggtacctatgtatgaagaattcagaaaaatgtgggactacttccacagtgttcttcttataaaacatgccacagaaagaaatggagtaaatgtggttagtggaccaatatttgattataattatgatggccattttgatgctccagatgaaattaccaaacatttagccaacactgatgttcccatcccaacacactactttgtggtgctgaccagttgtaaaaacaagagccacacaccggaaaactgccctgggtggctggatgtcctaccctttatcatccctcaccgacctaccaacgtggagagctgtcctgaaggtaaaccagaagctctttgggttgaagaaagatttacagctcacattgcccgggtccgtgatgtagaacttctcactgggcttgacttctatcaggataaagtgcagcctgtctctgaaattttgcaactaaagacatatttaccaacatttgaaaccactatttaa

SEQ ID NO: 152162 - DNA, 3413 bp, Artificial Sequence
  derived and/or modified sequence
gagaaatgaaaagtttggaacccagaagctgcagcctgcggaaaatgctggagccgcagccgacaccaagttgatgtctgtgagcagctgaccttctggacctccatcagcggcctgcagccaggagctgaagccacagagacggtgtcttctcagctatgataacctcagtgcaaatattgcccaatcactgaagagctgtgatcttcctaaacagttaaaagtcaggcacagctatgtaactcatacagtttctctttgccagactagactaaagaaggagcactaatttattctgataaaacaggtctatgcagctaccaggacaatggaatctacgttgactttagcaacggaacaacctgttaagaagaacactcttaagaaatataaaatagcttgcattgttcttcttgctttgctggtgatcatgtcacttggattaggcctggggcttggactcaggaaactggaaaagcaaggcagctgcaggaagaagtgctttgatgcatcatttagaggactggagaactgccggtgtgatgtggcatgtaaagaccgaggtgattgctgctgggattttgaagacacctgtgtggaatcaactcgaatatggatgtgcaataaatttcgttgtggagagaccagattagaggccagcctttgctcttgttcagatgactgtttgcagaggaaagattgctgtgctgactataagagtgtttgccaaggagaaacctcatggctggaagaaaactgtgacacagcccagcagtctcagtgcccagaagggtttgacctgccaccagttatcttgttttctatggatggatttagagctgaatatttatacacatgggatactttaatgccaaatatcaataaactgaaaacatgtggaattcattcaaaatacatgagagctatgtatcctaccaaaaccttcccaaatcattacaccattgtcacgggcttgtatccagagtcacatggcatcattgacaataatatgtatgatgtaaatctcaacaagaatttttcactttcttcaaaggaacaaaataatccagcctggtggcatgggcaaccaatgtggctgacagcaatgtatcaaggtttaaaagccgctacctacttttggcccggatcagaagtggctataaatggctcctttccttccatatacatgccttacaacggaagtgtcccatttgaagagaggatttctacactgttaaaatggctggacctgcccaaagctgaaagacccaggttttataccatgtattttgaagaacctgattcctctggacatgcaggtggaccagtcagtgccagagtaattaaagccttacaggtagtagatcatgcttttgggatgttgatggaaggcctgaagcagcggaatttgcacaactgtgtcaatatcatccttctggctgaccatggaatggaccagacttattgtaacaagatggaatacatgactgattattttcccagaataaacttcttctacatgtacgaagggcctgccccccgcatccgagctcataatatacctcatgacttttttagttttaattctgaggaaattgttagaaacctcagttgccgaaaacctgatcagcatttcaagccctatttgactcctgatttgccaaagcgactgcactatgccaagaacgtcagaatcgacaaagttcatctctttgtggatcaacagtggctggctgttaggagtaaatcaaatacaaattgtggaggaggcaaccatggttataacaatgagtttaggagcatggaggctatctttctggcacatggacccagttttaaagagaagactgaagttgaaccatttgaaaatattgaagtctataacctaatgtgtgatcttctacgcattcaaccagcaccaaacaatggaacccatggtagtttaaaccatcttctgaaggtgcctttttatgagccatcccatgcagaggaggtgtcaaagttttctgtttgtggctttgctaatccattgcccacagagtctcttgactgtttctgccctcacctacaaaatagtactcagctggaacaagtgaatcagatgctaaatctcacccaagaagaaataacagcaacagtgaaagtaaatttgccatttgggaggcctagggtactgcagaagaacgtggaccactgtctcctttaccacagggaatatgtcagtggatttggaaaagctatgaggatgcccatgtggagttcatacacagtcccccagttgggagacacatcgcctctgcctcccactgtcccagactgtctgcgggctgatgtcagggttcctccttctgagagccaaaaatgttccttctatttagcagacaagaatatcacccacggcttcctctatcctcctgccagcaatagaacatcagatagccaatatgatgctttaattactagcaatttggtacctatgtatgaagaattcagaaaaatgtgggactacttccacagtgttcttcttataaaacatgccacagaaagaaatggagtaaatgtggttagtggaccaatatttgattataattatgatggccattttgatgctccagatgaaattaccaaacatttagccaacactgatgttcccatcccaacacactactttgtggtgctgaccagttgtaaaaacaagagccacacaccggaaaactgccctgggtggctggatgtcctaccctttatcatccctcaccgacctaccaacgtggagagctgtcctgaaggtaaaccagaagctctttgggttgaagaaagatttacagctcacattgcccgggtccgtgatgtagaacttctcactgggcttgacttctatcaggataaagtgcagcctgtctctgaaattttgcaactaaagacatatttaccaacatttgaaaccactatttaacttaataatgtctacttaatatataatttactgtataaagtaattttggcaaaatataagtgatttttttctggagaattgtaaaataaagttttctatttttccttaagtcccctaaaagccataatttttattattcctttttctcttttttcaattctatgaatatgtattattttaaagttatatttttcacacagagatgatgctatattacaccttcccttttttgttggtttcttaaactctaatctcatgacagattataccttccttattacttgttttatcttactcagaatctttgaatatatttttctgcccagaattatctaaacaaaagggagaacaaaagaagtatgtctcacttgggaactgaatcaactctaaatcagttttgtcacaaaactttttgtatttgactggcaatgctgattaaaattaaaaatgcacagaa

SEQ ID NO: 152163 - DNA, 1400 bp, Artificial Sequence
  derived and/or modified sequence
atacagtttctctttgccagactagactaaagaaggagcactaatttattctgataaaacaggtctatgcagctaccaggacaatggaatctacgttgactttagcaacggaacaacctgttaagaagaacactcttaagaaatataaaatagcttgcattggtctctctcctttgggatctcacctcaccacaacctctgtttcccaggctcaagtgatcctcctgcctcagcctcctgagtagcttggaccacaggcacatgccacaaggctcagctaagtttttgttcttcttgctttgctggtgatcatgtcacttggattaggcctggggcttggactcaggaaactggaaaagcaaggcagctgcaggaagaagtgctttgatgcatcatttagaggactggagaactgccggtgtgatgtggcatgtaaagaccgaggtgattgctgctgggattttgaagacacctgtgtggaatcaactcgaatatggatgtgcaataaatttcgttgtggagagaccagattagaggccagcctttgctcttgttcagatgactgtttgcagaggaaagattgctgtgctgactataagagtgtttgccaaggagaaacctcatggctggaagaaaactgtgacacagcccagcagtctcagtgcccagaagggtttgacctgccaccagttatcttgttttctatggatggatttagagctgaatatttatacacatgggatactttaatgccaaatatcaataaactgaaaacatgtggaattcattcaaaatacatgagagctatgtatcctaccaaaaccttcccaaatcattacaccattgtcacgggcttgtatccagagtcacatggcatcattgacaataatatgtatgatgtaaatctcaacaagaatttttcactttcttcaaaggaacaaaataatccagcctggtggcatgggcaaccagtatgtagcattctacacgtcgcaactgaagtaacctccatttctcagtgtgacaggaggacactcttctcactcagtggagcaagttctatgtcacccatctagtttctaagggctgagggtgcaaagatgtggctgacagcaatgtatcaaggtttaaaagccgctacctacttttggcccggatcagaagtggctataaatggctcctttccttccatatacatgccttacaacggaagtgtcccatttgaagagaggatttctacactgttaaaatggctggacctgcccaaagctgaaagacccaggttttataccatgtattttgaagaacctgattcctctggacatgcaggtggaccagtcagtgccagagtaattaaagccttacaggtagtagatcatgcttttgggatgttgatggaa

SEQ ID NO: 152164 - DNA, 1430 bp, Artificial Sequence
  derived and/or modified sequence
atacagtttctctttgccagactagactaaagaaggagcactaatttattctgataaaacaggtctatgcagctaccaggacaatggaatctacgttgactttagcaacggaacaacctgttaagaagaacactcttaagaaatataaaatagcttgcattagactgggtttcaccatgttgcccaggctggtctcaaactcctggatcaagtgatctacctgcctcggcctcccaaagtgctgggactacaggcatgaaccactgcacctggcctctagtgttttcctcagccaagaattccaagttcttcttgctttgctggtgatcatgtcacttggattaggcctggggcttggactcaggaaactggaaaagcaaggcagctgcaggaagaagtgctttgatgcatcatttagaggactggagaactgccggtgtgatgtggcatgtaaagaccgaggtgattgctgctgggattttgaagacacctgtgtggaatcaactcgaatatggatgtgcaataaatttcgttgtggagagaccagattagaggccagcctttgctcttgttcagatgactgtttgcagaggaaagattgctgtgctgactataagagtgtttgccaaggagaaacctcatggctggaagaaaactgtgacacagcccagcagtctcagtgcccagaagggtttgacctgccaccagttatcttgttttctatggatggatttagagctgaatatttatacacatgggatactttaatgccaaatatcaataaactgaaaacatgtggaattcattcaaaatacatgagagctatgtatcctaccaaaaccttcccaaatcattacaccattgtcacgggcttgtatccagagtcacatggcatcattgacaataatatgtatgatgtaaatctcaacaagaatttttcactttcttcaaaggaacaaaataatccagcctggtggcatgggcaaccaatgtggctgacagcaatgtatcaaggtttaaaagccgctacctacttttggcccggatcagaagtggctataaatggctcctttccttccatatacatgccttacaacgggtagtgaagcactttcagatattctcccagctaggcagaaatgatcaagatgttttctgtcttaatcttggtggcaattctattaatccagttgtttaagccaaaaatcttgggaatcaccattgattcctttcctttatgtcactcaagcagtctctcagtaaatgcttttggctgtaattaaaaatctatgtagcctgagaactttttattacctctagcattaccactctggttcgagctgtcatctcttgcctgtattaactgcagttgcctctttactcatctctgcttcttatcctttataatctagtctcatcccacccaccag

SEQ ID NO: 152165 - protein, 140 aa, Artificial Sequence
  derived and/or modified sequence
MAGWNAYIDNLMADGTCQDAAIVGYKDSPSVWAAVPGKTFVNITPAEVGVLVGKDRSSFYVNGLTLGGQKCSVIRDSLLQDGEFSMDLRTKSTGGAPTFNVTVTKTDKTLVLLMGKEGVHGGLINKKCYEMASHLRRSQY

SEQ ID NO: 152166 - DNA, 1291 bp, Artificial Sequence
  derived and/or modified sequence
ctcccggccccggcgcaggcgcaggcgcgggcacacgcgccgccgcccgccggtccttcccttcggcggaggtgggggaaggaggagtcatcccgtttaaccctgggctccccgaactctccttaatttgctaaatttgcagcttgctaattcctcctgctttctccttccttccttcttctggctcactccctgccccgataccaaagtctggtttatattcagtgcaaattggagcaaaccctacccttcacctctctcccgccaccccccatccttctgcattgctttccatcgaactctgcaaattttgcaatagggggagggatttttaaaattgcatttgcaaagttcggtgtctgggctggcgagtgggggagggagggaatggggagtaggccccgcccctaccgtcctttgcaaataaaaatctagcggggcggggggggggaggagcaggaagtggcggtgcgagggctgctgcacagcgagcggagccgcggtccggacggcagcgcgtgccccgagctctccgcctccccccgcccgccagccgaggcagctcgagcccagtccgcggccccagcagcagcgccgagagcagccccagtagcagcgccatggccgggtggaacgcctacatcgacaacctcatggcggacgggacctgtcaggacgcggccatcgtgggctacaaggactcgccctccgtctgggccgccgtccccgggaaaacgttcgtcaacatcacgccagctgaggtgggtgtcctggttggcaaagaccggtcaagtttttacgtgaatgggctgacacttgggggccagaaatgttcggtgatccgggactcactgctgcaggatggggaatttagcatggatcttcgtaccaagagcaccggtggggcccccaccttcaatgtcactgtcaccaagactgacaagacgctagtcctgctgatgggcaaagaaggtgtccacggtggtttgatcaacaagaaatgttatgaaatggcctcccaccttcggcgttcccagtactgacctcgtctgtcccttccccttcaccgctccccacagctttgcacccctttcctccccatacacacacaaaccattttattttttgggccattaccccataccccttattgctgccaaaaccacatgggctgggggccagggctggatggacagacacctccccctacccatatccctcccgtgtgtggttggaaaacttttgttttttggggttttttttttctgaataaaaaagattctactaacaa

SEQ ID NO: 152167 - DNA, 423 bp, Artificial Sequence
  derived and/or modified sequence
atggcaggatggaatgcctacattgataacctgatggcagatggtacctgtcaagatgccgccatcgttggatataaagattccccaagcgtatgggccgcagtgcctggtaagacctttgtgaatatcacccctgcggaagttggggtcctggtgggtaaagaccgctcttccttctacgttaacgggcttaccctgggtggccaaaagtgctctgtgatccgagactcgctcctccaggatggggaattcagtatggacctgcggacaaagagcaccggcggcgcgcctacctttaacgtgacagtgactaaaacagataagactttggtcctcctgatgggaaaggaaggggtgcacgggggcttaattaacaagaagtgttatgagatggcatctcaccttcgccgatcccagtactag

SEQ ID NO: 152168 - DNA, 423 bp, Artificial Sequence
  derived and/or modified sequence
atggccggctggaatgcctacatcgacaacctgatggctgatggcacctgccaggatgctgccatcgtgggctacaaggacagccccagcgtgtgggccgctgtgcctgggaagacctttgtgaacatcaccccagctgaggtgggcgtgctggtgggcaaggacaggagcagcttctacgtgaatggcctgaccctgggcggccagaagtgcagcgtcatccgggacagcctgctgcaggatggagagttctccatggacctgcggaccaagagcactggaggagcccccaccttcaacgtgacagtgaccaagacagacaagaccctggtgctgctgatgggcaaggagggcgtgcacggcggcctcatcaacaagaagtgctatgagatggccagccacctgcggcgcagccagtactag

SEQ ID NO: 152169 - DNA, 423 bp, Artificial Sequence
  derived and/or modified sequence
atggccggctggaacgcctacatcgacaacctgatggccgacggcacgtgtcaggatgctgctattgtggggtataaggactcaccatcagtttgggctgctgtcccagggaaaacattcgttaatattacccctgctgaagtgggggtgctggtaggtaaggatcggtcttcattttacgtgaatggcctaacactgggcgggcagaaatgctcagtgatccgcgactcgctcctgcaggacggggagtttagtatggacctgcgtacaaaatccacagggggcgccccaacctttaatgtaactgtcaccaaaacagacaagactctggtactgctgatgggaaaggagggtgttcatggcggcctaatcaataaaaagtgctacgaaatggcaagtcatctgcgcaggagccaatattag

SEQ ID NO: 152170 - DNA, 423 bp, Artificial Sequence
  derived and/or modified sequence
atggcaggatggaacgcgtatatcgacaacctcatggctgacggaacgtgtcaagatgcagcaatcgtcgggtacaaagattccccatcagtctgggcggcagtacccggtaaaacgttcgtgaatatcacccccgcagaagttggagtcctggttggcaaagatcggagctcgttctacgtgaacggcttaactctagggggacaaaagtgctccgtcattcgtgacagtctcttgcaggatggggaatttagcatggatctgcgcaccaagagcactggcggtgcacctaccttcaatgtcaccgtgactaagaccgataagaccctcgttcttctgatgggtaaagagggtgtgcacggcggactcatcaacaagaagtgttacgaaatggctagtcacttaaggcgcagccagtactag

SEQ ID NO: 152171 - DNA, 423 bp, Artificial Sequence
  derived and/or modified sequence
atggccggctggaacgcctacatcgacaacctgatggccgacggcacctgccaggacgccgccatcgtgggctacaaggacagccccagcgtgtgggccgccgtgcccggcaagaccttcgtgaacatcacccccgccgaggtgggcgtgctggtgggcaaggacagaagcagcttctacgtgaacggcctgaccctgggcggccagaagtgcagcgtgatcagagacagcctgctgcaggacggcgagttcagcatggacctgagaaccaagagcaccggcggcgcccccaccttcaacgtgaccgtgaccaagaccgacaagaccctggtgctgctgatgggcaaggagggcgtgcacggcggcctgatcaacaagaagtgctacgagatggccagccacctgagaagaagccagtactag

SEQ ID NO: 152172 - protein, 377 aa, Artificial Sequence
  derived and/or modified sequence
MAATEDERLAGSGEGERLDFLRDRHVRFFQRCLQVLPERYSSLETSRLTIAFFALSGLDMLDSLDVVNKDDIIEWIYSLQVLPTEDRSNLNRCGFRGSSYLGIPFNPSKAPGTAHPYDSGHIAMTYTGLSCLVILGDDLSRVNKEACLAGLRALQLEDGSFCAVPEGSENDMRFVYCASCICYMLNNWSGMDMKKAITYIRRSMSYDNGLAQGAGLESHGGSTFCGIASLCLMGKLEEVFSEKELNRIKRWCIMRQQNGYHGRPNKPVDTCYSFWVGATLKLLKIFQYTNFEKNRNYILSTQDRLVGGFAKWPDSHPDALHAYFGICGLSLMEESGICKVHPALNVSTRTSERLLDLHQSWKTKDSKQCSENVHIST

SEQ ID NO: 152173 - DNA, 1134 bp, Artificial Sequence
  derived and/or modified sequence
atggccgccaccgaggacgagagactggccggcagcggcgagggcgagagactggacttcctgagagacagacacgtgagattcttccagagatgcctgcaggtgctgcccgagagatacagcagcctggagaccagcagactgaccatcgccttcttcgccctgagcggcctggacatgctggacagcctggacgtggtgaacaaggacgacatcatcgagtggatctacagcctgcaggtgctgcccaccgaggacagaagcaacctgaacagatgcggcttcagaggcagcagctacctgggcatccccttcaaccccagcaaggcccccggcaccgcccacccctacgacagcggccacatcgccatgacctacaccggcctgagctgcctggtgatcctgggcgacgacctgagcagagtgaacaaggaggcctgcctggccggcctgagagccctgcagctggaggacggcagcttctgcgccgtgcccgagggcagcgagaacgacatgagattcgtgtactgcgccagctgcatctgctacatgctgaacaactggagcggcatggacatgaagaaggccatcacctacatcagaagaagcatgagctacgacaacggcctggcccagggcgccggcctggagagccacggcggcagcaccttctgcggcatcgccagcctgtgcctgatgggcaagctggaggaggtgttcagcgagaaggagctgaacagaatcaagagatggtgcatcatgagacagcagaacggctaccacggcagacccaacaagcccgtggacacctgctacagcttctgggtgggcgccaccctgaagctgctgaagatcttccagtacaccaacttcgagaagaacagaaactacatcctgagcacccaggacagactggtgggcggcttcgccaagtggcccgacagccaccccgacgccctgcacgcctacttcggcatctgcggcctgagcctgatggaggagagcggcatctgcaaggtgcaccccgccctgaacgtgagcaccagaaccagcgagagactgctggacctgcaccagagctggaagaccaaggacagcaagcagtgcagcgagaacgtgcacatcagcacctag

SEQ ID NO: 152174 - DNA, 1134 bp, Artificial Sequence
  derived and/or modified sequence
atggcggccactgaggatgagcgactggctggttccggtgaaggggagcggcttgattttctgagggacaggcatgtgaggtttttccagcgctgtctacaagtcctgcccgaaaggtactcttccttagaaactagccggctgactatcgcattctttgccctgtccggactggacatgttagacagcctcgacgtcgttaataaggacgatattatagagtggatctacagtctccaggttctccctacagaagacaggtctaatctgaaccggtgtggctttcggggctccagttacttagggatcccgttcaacccctccaaggcaccgggaaccgctcatccttatgactctggccatatagccatgacctacacaggtttaagctgcctggtgatcttgggagacgatctaagccgggtgaacaaagaagcctgcctggccggtttacgggctctgcagctggaagacgggtctttctgcgctgtccctgaaggctccgaaaacgatatgaggtttgtctattgcgcgtcttgcatctgctacatgctcaataactggtcaggtatggatatgaagaaggccatcacttacattaggcgcagcatgagttatgacaatgggcttgcacagggagcgggcctcgagtcccacggtgggagcaccttctgtgggatcgcctccctgtgccttatgggaaagttggaagaagtgttttcagaaaaagaacttaaccgcatcaaaagatggtgcattatgcgccaacagaacggttaccacggcaggcctaataaaccagttgacacatgctacagtttttgggttggagcaaccttgaaattgctgaaaatctttcaatacaccaattttgagaagaatcgtaactacatcctgtccacccaggatagactggttgggggctttgctaaatggcccgactctcatcctgacgctcttcatgcttattttggcatctgcgggctgtctttgatggaagagagcggcatctgcaaagttcatcccgctttaaacgtgtccacccggacgtctgaacgcctgcttgatttgcaccagagctggaaaaccaaggattcgaagcagtgtagtgagaacgtgcacatctctacatag

SEQ ID NO: 152175 - DNA, 1134 bp, Artificial Sequence
  derived and/or modified sequence
atggccgccacagaagatgagcggctggccggcagcggggagggggagcggctggacttcctgcgggacagacatgtgcgcttcttccagcgctgcctgcaggtgctgcctgagcgctacagcagcctggagaccagccggctgaccatcgccttctttgccctgagcggcctggacatgctggacagcctggatgtggtgaacaaggatgacatcatcgagtggatctacagcctgcaggtgctgcccacagaagatagaagcaacctgaacagatgtggcttccggggcagcagctacctgggcatccccttcaaccccagcaaggcccctggaacagcccacccctatgattctggccacatcgccatgacctacacaggcctgagctgcctggtgatcctgggagatgacctgagccgggtgaacaaggaggcctgcctggccggcctgcgggccctgcagctggaggatggcagcttctgtgctgtgcctgagggctctgaaaatgacatgagatttgtgtactgtgccagctgcatctgctacatgctgaacaactggagcggcatggacatgaagaaggccatcacctacatcagaagatccatgtcctatgacaatggcctggcccagggcgccggcctggagagccatggaggcagcaccttctgtggcatcgccagcctgtgcctgatgggcaagctggaggaggtgttttctgagaaggagctgaaccgcatcaagcgctggtgcatcatgaggcagcagaatggctaccacggccggcccaacaagcctgtggacacctgctacagcttctgggtgggcgccaccctgaagctgctgaagatcttccagtacaccaactttgagaagaacagaaactacatcctgagcacccaggaccggctggtgggcggctttgccaagtggccagacagccacccagatgccctgcacgcctacttcggcatctgtggcctgagcctgatggaggagagcggcatctgcaaggtgcacccagccctgaatgtgtccaccaggaccagcgagcggctgctggacctgcaccagagctggaagaccaaggacagcaagcagtgcagtgaaaatgtgcacatcagcacctag

SEQ ID NO: 152176 - DNA, 1134 bp, Artificial Sequence
  derived and/or modified sequence
atggccgccaccgaggacgagcggctggccggcagcggcgagggcgaacgactggatttcctgcgtgatcgacacgtccggtttttccagaggtgcctgcaggtcttgccagagcgctatagcagcttggagacatctcgtttgacaatcgcgttcttcgccctttcgggtctagacatgcttgacagcttggatgtcgtgaacaaagatgatattattgaatggatctatagtctgcaggtactgccaacggaggatcgcagcaaccttaaccggtgcggctttcgggggtcctcctacctaggtatccccttcaacccctctaaggccccaggaaccgctcatccatacgactccggtcacatagccatgacatacactggcctgtcctgcctggtgattcttggcgacgatctgtctagagttaataaggaggcgtgtctggctggcctgcgagccctgcagctggaagacggttccttctgcgctgtgcccgaagggtccgaaaatgatatgcgattcgtatattgtgcctcttgtatttgctatatgctgaataattggtcagggatggatatgaaaaaagccattacgtacattcgacggagcatgtcctacgataatggcctggcccagggcgctggcttggagagccatggtgggtcaactttttgtggcattgcatctctttgtctgatggggaagcttgaggaagtgtttagtgagaaggaactcaaccggatcaagagatggtgcattatgagacagcaaaatgggtaccacggcaggcccaacaaaccggtagacacttgttactccttttgggtgggcgcaacacttaagcttctgaaaattttccagtatacgaacttcgagaaaaatagaaattacatcctctcaacacaggaccgattggttggtggttttgctaagtggccagactctcaccccgatgccctgcatgcatacttcgggatatgcggtttgtctctaatggaggaaagtggaatttgcaaggtccaccctgctctgaacgtgagtacacgcacctccgaacgattgttggatctgcaccaaagctggaagactaaagatagtaaacagtgttcagaaaacgtgcacatatccacctag

SEQ ID NO: 152177 - DNA, 1134 bp, Artificial Sequence
  derived and/or modified sequence
atggccgctaccgaggacgagcgcctcgccggtagcggcgaaggggagcgtctcgacttcctgcgtgaccgccacgtaaggtttttccaacgctgccttcaggtcttacccgaacggtacagctccctggagactagcaggctcaccattgcgtttttcgctttgtcaggactagacatgcttgactcacttgatgtggtgaataaggacgacatcattgagtggatctattcactgcaggtgctcccgaccgaggaccgttctaatttgaaccgttgcggcttcagaggcagttcatatcttggcattcctttcaatccttcaaaagccccaggcaccgcacatccatatgactcaggccacattgccatgacatatactgggctctcgtgcctcgtcatactcggggacgacctgtcccgagttaataaagaggcgtgcttggctggactaagagcactgcagctggaagacgggtctttctgcgccgttccagagggttctgagaatgatatgcgattcgtttactgtgcttcatgtatctgctatatgctgaacaactggagcggaatggatatgaagaaggccataacctacatccgtcggagcatgagctatgataacgggttggcccaaggagccggtttggagtcgcacggcggatctaccttttgtggtatagcctcactttgcctgatgggcaagctggaagaggttttcagtgagaaggagctgaaccggatcaagagatggtgtatcatgcggcagcagaacggatatcatggcaggcccaataagcctgtggacacttgttattcgttctgggtgggagcaaccctgaagctcctgaagatatttcagtatactaatttcgagaagaatcggaactatatcctatccactcaggaccgcttggtgggaggctttgccaaatggccagattcccacccagatgcgctgcatgcatactttggtatttgcggcttgtccttgatggaagaaagcggcatttgcaaggttcaccctgcccttaacgtgtctacacgaacttcggagaggctgctggatctacatcagagctggaagaccaaagattcaaaacagtgcagcgagaatgtccatatcagtacctag

SEQ ID NO: 152178 - DNA, 2727 bp, Artificial Sequence
  derived and/or modified sequence
ggacgtcgcttccggagcagcatggcggccactgaggatgagaggctagcagggagcggtgagggagagcggctggatttcttacgggatcggcacgtgcgatttttccagcgctgcctccaggttttgccggagcgctattcttcactcgagacaagcaggttgacaattgcattttttgcactctccgggctggatatgttggattccttagatgtggtgaacaaagatgatataatagagtggatttattccctgcaggtccttcccacagaagacagatcaaatctaaatcgctgtggtttccgaggctcttcatacctgggtattccgttcaatccatcaaaggctcctggaacagctcatccttatgatagtggccacattgcaatgacctacactggcctctcatgcttagttattcttggagacgacttaagccgagtaaataaagaagcttgcttagcgggcttgagagcccttcagctggaagatgggagtttttgtgcagtacctgaaggcagtgaaaatgacatgcgatttgtgtactgtgcttcctgtatttgctatatgctcaacaactggtcaggcatggatatgaaaaaagccatcacctatattagaaggagtatgtcctatgacaatggactggcacagggagctggacttgaatctcatggaggatcaactttttgtggcattgcctcactatgtctgatgggtaaactagaagaagttttttcagaaaaagaattgaacaggataaagaggtggtgtataatgaggcaacaaaatggttatcatggaagacctaataagcctgtagacacctgttattctttttgggtgggagcaactctgaagcttctaaaaattttccaatacactaactttgagaaaaatagaaattacatcttatcaactcaagatcgccttgtagggggatttgccaagtggccagacagtcatccagatgctttgcatgcatactttgggatctgtggcctgtcactaatggaggaaagtggaatttgtaaagttcatcctgctctgaatgtaagcacacggacttctgaacgccttctagatctccatcaaagctggaaaaccaaggactctaaacaatgctcagagaatgtacatatctccacatgactgattttagattgggagggtggggggatttgtagcataactgtagctcaagtttaaaagccatgtataaccaagtgtgctctttttttaaaaggtagagtcttacaatcaaatctcctgctgatttcactttgggatatggtcttgagccagtaatctttatactgggtttcaagaaaatctttgttgaagtttgaaccacaactttgtcgtggttcttaaatgtttatactgtatttctaagaagttgtttgaggcaaattaactgtatgtgtgtaggttatctttttaaaaactcttcagtgcaaattgtatcttattataaaatggacacaaattttcaagtttacacttcatatagcattgataatcttcaggtgaacacttagtgatcatttaaaaagctcactgctgatcgtagaaaatttgctttaattaattaagtatctgggattattctttgaaaacagatgaccataattttttttaaagaagagtgacttattttgtcttattcttaagtaaagtgtgccaattaaacctgtgtggcctatataaatgaagttaataacttcatagtaagaataaataggtttaactaatgtgatagttttctaaaaggagattgtttgaagacaactattatgtaactgagggaaaagcaacttaactgtatgtgattgtgaatgagaaagttttgtgctatgtgggtcatttatctagacattgctgtggtgaataccagttatgtttgattttattctcaaatcattagttgcctttttttttttttttttttttttgctttctaggaagaaaacaatcttttttatctagaaggaaagatactttgtgttttcatttttagccatttgaagtttttaatttattgcccccagtgtgttagctgctctaatttcaaactaatacttttctaatttttttcaaattaaataagtaaaaaatacaaaaacagaaccattcaaacagattcagtggtgtaactcaatacatggtcatttttattctcatattttcaggtaagtgaaagggaaatgcgaccatttagagggtaagaaatagggttttgtttttgttcattgttttgttttaagtctatgaactagctaattataaaggaggtagtataaaaactcttcattagtaattaatttatcaataactcatatccgttacttgctcagtgacattcagaactattgcgtctagtactgaaatggggaaagaaatctcttcactaaaggagttggctttaagttagtcttggtgataataaatgttgaaatacaagtatcagtataaaaactggattactggtatcactgtttaggcattgtaatactttaaatgttatctttttttctaaatcagagggaaaaaaatgttgtgaaataacagtccttcccaagggaaacactgtgtacttggagaaatgattgatttattattggcatgcttagttttaaacctgagtttgccaactgtatgttttttaattagaaataaaataaatcttctgatggtgggggaaaaagtaagcttaataacaga

SEQ ID NO: 152179 - protein, 397 aa, Artificial Sequence
  derived and/or modified sequence
MDSLATSINQFALELSKKLAESAQGKNIFFSSWSISTSLTIVYLGAKGTTAAQMAQVLQFNRDQGVKCDPESEKKRKMEFNLSNSEEIHSDFQTLISEILKPNDDYLLKTANAIYGEKTYAFHNKYLEDMKTYFGAEPQPVNFVEASDQIRKDINSWVERQTEGKIQNLLPDDSVDSTTRMILVNALYFKGIWEHQFLVQNTTEKPFRINETTSKPVQMMFMKKKLHIFHIEKPKAVGLQLYYKSRDLSLLILLPEDINGLEQLEKAITYEKLNEWTSADMMELYEVQLHLPKFKLEDSYDLKSTLSSMGMSDAFSQSKADFSGMSSARNLFLSNVFHKAFVEINEQGTEAAAGSGSEIDIRIRVPSIEFNANHPFLFFIRHNKTNTILFYGRLCSP

SEQ ID NO: 152180 - DNA, 1194 bp, Artificial Sequence
  derived and/or modified sequence
atggactccctggccacgagtatcaatcagttcgcactggaactgagtaagaaacttgccgaatctgctcaggggaaaaacatattcttttccagctggagcatcagcacgagtctgacgattgtatacctgggagccaaaggcacaacggcggcccagatggcccaggtgctacagtttaacagagatcagggcgttaagtgtgatcccgagtccgagaagaaacgaaagatggagtttaatctttccaactcagaggagatacactcagacttccagactttaatcagcgagatcctgaaacctaacgacgattatctgctaaaaactgcgaacgcgatctacggggagaaaacctatgccttccacaacaagtacttggaggatatgaagacttattttggggcggagccccaaccagtaaactttgttgaggcatccgaccagattagaaaagatattaactcctgggtggagcgacagacagagggaaaaatccagaatcttctgcccgacgattcagttgacagcacaacgcgaatgattctggtgaacgcactgtactttaagggcatttgggagcaccagttcctggtgcaaaatactaccgagaaaccttttaggataaatgaaactacgtctaagcccgtccaaatgatgttcatgaagaaaaagctgcacatttttcacattgagaagcccaaggctgtcggcctacagctttattataaatcacgtgatcttagcctgcttattctactaccagaagatatcaacggacttgagcagcttgagaaagcgattacatacgagaagcttaacgaatggacatccgctgatatgatggagctttacgaggttcaattgcacctcccaaagttcaaactcgaagacagctatgatttaaagtcgaccctgagctctatgggcatgtcagacgctttttcccaaagcaaagctgacttttccggcatgagcagcgcacgcaacctgtttctgtccaatgtgtttcacaaagcatttgtggagatcaacgagcaggggaccgaagctgccgctggaagtggctctgaaattgatattagaattagggtcccgtcgatagaattcaatgctaatcacccttttctgtttttcatccgccacaacaaaacgaacactattttattttatggcaggctgtgctctccttag

SEQ ID NO: 152181 - DNA, 1194 bp, Artificial Sequence
  derived and/or modified sequence
atggacagcctggccaccagcatcaaccagtttgccctggagctgagcaagaagctggccgagagcgcccagggcaagaacatcttcttcagctcctggagcatcagcaccagcctgaccatcgtgtacctgggcgccaagggcaccacagctgcccagatggcccaggtgctgcagttcaacagagaccagggcgtgaagtgtgaccctgagagcgagaagaagaggaagatggagttcaacctgagcaacagcgaggagatccacagcgacttccagaccctcatcagcgagatcctgaagcccaatgatgactacctgctgaagacagccaatgccatctatggagagaagacctacgccttccacaacaagtacctggaggacatgaagacctactttggagctgagccccagcctgtgaactttgtggaggccagtgaccagatcaggaaggacatcaacagctgggtggagcggcagacagagggcaagatccagaacctgctgcctgatgacagcgtggacagcaccaccaggatgatcctggtgaatgccctgtacttcaagggcatctgggagcaccagttcctggtgcagaacaccacagagaagcccttccgcatcaatgagaccaccagcaagcctgtgcagatgatgttcatgaagaagaagctgcacatcttccacatcgagaagcccaaggctgtgggcctgcagctgtactacaagagccgggacctgagcctgctgatcctgctgcctgaggacatcaatggcctggagcagctggagaaggccatcacctatgagaagctgaatgagtggaccagcgctgacatgatggagctgtatgaggtgcagctgcacctgcccaagttcaagctggaggacagctatgacctgaagagcaccctgagctccatgggcatgtctgatgccttcagccagagcaaggctgacttcagcggcatgagcagcgccaggaacctcttcctgagcaatgtgttccacaaggcctttgtggagatcaatgagcagggcacagaagctgctgctggcagcggcagcgagattgacatccgcatccgggtgcccagcattgagttcaatgccaaccaccccttcctgttcttcatccgccacaacaagaccaacaccatcctcttctacggccgcctgtgcagcccctag

SEQ ID NO: 152182 - DNA, 1194 bp, Artificial Sequence
  derived and/or modified sequence
atggacagcctggccaccagcatcaaccagttcgccctggagctgtcgaaaaagctagccgagtcagcccagggcaaaaatatcttttttagcagctggagcataagcacttccctgacaatcgtctacctcggagccaagggaacgaccgctgcacagatggcccaagtactgcagtttaatcgtgatcaaggagttaagtgcgacccagaaagcgaaaagaaaagaaaaatggaatttaatctctctaactctgaagagatccattccgattttcagaccctcatctccgagatactgaaacctaatgacgattacctgctgaagactgccaacgcgatctacggtgaaaagacttatgcctttcataacaagtatctcgaggatatgaagacttactttggcgcagaaccacagcccgtcaacttcgtcgaagccagtgaccagatcaggaaggatatcaattcctgggttgaaaggcaaacggaaggtaaaatccaaaacctgttgccagacgatagcgtggactctactaccaggatgatcctagtgaatgccttatatttcaaaggaatctgggaacatcagttcttggtacagaatactaccgagaagccttttagaatcaatgagacgacttccaaacccgttcagatgatgttcatgaagaaaaaactccacatttttcacatagaaaagcccaaagccgtgggacttcagttatactataaatcacgcgacctgagtctcctgattctgctccccgaagacatcaatggtctggagcagttagagaaagcaatcacctatgaaaagctgaacgaatggacaagcgccgatatgatggagctgtacgaggtgcagctgcacctccctaagttcaagctggaggattcttacgatttgaagagtaccctgagctctatgggaatgtcagatgccttcagccagtccaaggcagatttctctggcatgagtagtgccaggaacctatttctgagtaacgtgttccataaggcgttcgtggagattaatgaacagggtactgaggctgctgcaggcagtgggagcgagattgatattcggattcgtgtgcccagtattgagttcaatgcaaaccaccccttcctatttttcattaggcacaataaaaccaacaccattctcttctacggccgactctgtagtccatag

SEQ ID NO: 152183 - DNA, 1194 bp, Artificial Sequence
  derived and/or modified sequence
atggattctctggccactagcatcaatcagtttgccctggaactcagcaagaaattggccgagtctgcacaagggaagaacatttttttctcaagttggtcgatctcaacttccttaaccatagtgtatctgggggctaaaggaacaactgctgcccaaatggcacaggtgctccagtttaaccgtgaccagggcgtaaaatgtgacccagagtccgagaagaaacgcaagatggaattcaacctttcaaacagcgaggaaattcattccgattttcaaaccctgatatctgaaatccttaaaccaaacgatgactacctcctgaaaacagcgaatgccatatatggggaaaagacctacgccttccacaataaatatctcgaggacatgaaaacgtattttggcgctgaacctcagcctgttaatttcgtggaagcatcagatcagattagaaaggatatcaactcctgggtggagcgtcagacggagggcaagattcagaatttgctccctgatgacagcgtggattccactacacgcatgatcttagttaatgcactctactttaaaggtatatgggagcatcagtttcttgtacagaatacaacggagaagccttttagaatcaatgaaactacctcaaagcctgtgcagatgatgttcatgaagaaaaagctgcatattttccacatagagaagcctaaggccgttgggttgcagttgtactataaatcccgggatctctccctactgatcctgctgccagaagacatcaacggcctggaacagctcgaaaaggctatcacctacgaaaagttgaatgagtggacaagtgctgatatgatggagctgtatgaggttcagttacatctgcctaaattcaaactcgaggactcatatgacctgaagagcaccctgagttctatgggtatgtctgacgcctttagtcagtccaaggccgacttctctgggatgtccagcgcccgaaacctattcttgtctaatgtctttcacaaggccttcgtggaaatcaacgagcagggcacagaggcagccgctggttccgggtctgagatagacatcaggatccgtgttcccagtatcgaattcaatgctaatcatcctttcctcttcttcatcaggcacaacaagacaaacacaatccttttctatgggcgactctgtagtccctag

SEQ ID NO: 152184 - DNA, 2122 bp, Artificial Sequence
  derived and/or modified sequence
tcttactacaggagcaaattgccaattctgctccagtgggagaaaacaaggtttcctcaatggactctctagcaacatcaatcaaccagtttgccctggagttgagcaaaaagctagctgaatctgctcagggtaaaaatatcttcttttcttcctggagcatctcaacttccttgaccatagtgtatttgggcgccaaaggtaccactgcagcccaaatggcccaggtgcttcaatttaacagagaccagggagtcaaatgtgaccctgaaagtgaaaaaaaaaggaaaatggaattcaacttgagcaactcggaagaaatacactctgatttccaaacacttatctcagaaatcctcaagcccaacgatgactacttacttaaaacagccaatgcgatatatggagagaaaacgtatgcatttcacaataaatatttagaagacatgaaaacatattttggtgcagaacctcagcctgttaactttgtggaagcttctgatcaaatcagaaaggacatcaactcttgggttgaaagacagaccgagggtaaaatccagaatctcctgcctgatgactctgtggattccacaaccaggatgattctggtgaacgccctatactttaaaggaatctgggaacatcaattcttagtgcaaaacaccacagaaaagccttttagaataaacgagactacaagcaaaccagtgcaaatgatgtttatgaagaaaaagcttcacatttttcacatagaaaagccaaaagcagtgggccttcaactctactacaaaagccgtgacctcagcctgcttatactactgccagaagacattaatgggctggaacagctggaaaaggccatcacctatgagaagctgaatgagtggaccagtgcagacatgatggagttgtatgaagtgcagctacaccttcccaagttcaagctggaagacagttatgatctcaagtcaaccctgagcagtatggggatgagtgatgccttcagccaaagcaaagctgatttctcaggaatgtcttcagcaagaaacctatttttgtccaatgttttccataaggcttttgtggaaataaatgaacaaggtactgaagctgcagctggcagtgggagtgagatagatatacgaattagagtcccatccattgaattcaatgcaaatcacccattcctcttcttcatcaggcacaataaaaccaacaccattcttttttatggaagattatgctccccctaaatcctgcatatctctcaacaaacaagaccatcttacagtgtgaaaaatgtaccatgagatggaaaagcacaattttcacaaaaatgagtttgtagtctaaacctttttcacatttgaatataagtaaatagatcttgaaataatgcattctaatgatcctgtcatatctgtacagctggagagaatgacgatttttatttttaacacgttaacattttgtctaatgtgactttcatttacatttcagaagtactatgctattcaactgaatgccttacaattcttgatcacttgcaatatccatgatacttgttatcatatatttcatatacatcattaaatgaaaaaaaatctttataaaggtgatatgatattgataaatacgaagtttctcaagaatatcgttttgatcaaaaatttagcccggcatggtggtgcacacctgtgttcccagctactcaggaggctgaggtaggaggattgcttgagcccaggaggttgagactgcagtgagccaagatcacaccagtgcactccaacctgggcaacagagcaagaccctgtctcaaaaaaatcattttggtggctcataaattatgattgtaaaactaaaccccctttttctgctatttaaaaaatacttatattgacattagcttaaaaaactagtgaaatccaaatgaaatttgaagtttagctagtagcaatctctcaatgttggtgccctagttttgacaaatgtaccgtggtcatgtaagatgttatcacttggggaaactgtactggagtatatgagaattagctgtattatctctgcacctcttctgccaatctaaaattattccaaaataaaagttttattaaaaata

SEQ ID NO: 152185 - DNA, 1194 bp, Artificial Sequence
  derived and/or modified sequence
atggacagcctggccaccagcatcaaccagttcgccctggagctgagcaagaagctggccgagagcgcccagggcaagaacatcttcttcagcagctggagcatcagcaccagcctgaccatcgtgtacctgggcgccaagggcaccaccgccgcccagatggcccaggtgctgcagttcaacagagaccagggcgtgaagtgcgaccccgagagcgagaagaagagaaagatggagttcaacctgagcaacagcgaggagatccacagcgacttccagaccctgatcagcgagatcctgaagcccaacgacgactacctgctgaagaccgccaacgccatctacggcgagaagacctacgccttccacaacaagtacctggaggacatgaagacctacttcggcgccgagccccagcccgtgaacttcgtggaggccagcgaccagatcagaaaggacatcaacagctgggtggagagacagaccgagggcaagatccagaacctgctgcccgacgacagcgtggacagcaccaccagaatgatcctggtgaacgccctgtacttcaagggcatctgggagcaccagttcctggtgcagaacaccaccgagaagcccttcagaatcaacgagaccaccagcaagcccgtgcagatgatgttcatgaagaagaagctgcacatcttccacatcgagaagcccaaggccgtgggcctgcagctgtactacaagagcagagacctgagcctgctgatcctgctgcccgaggacatcaacggcctggagcagctggagaaggccatcacctacgagaagctgaacgagtggaccagcgccgacatgatggagctgtacgaggtgcagctgcacctgcccaagttcaagctggaggacagctacgacctgaagagcaccctgagcagcatgggcatgagcgacgccttcagccagagcaaggccgacttcagcggcatgagcagcgccagaaacctgttcctgagcaacgtgttccacaaggccttcgtggagatcaacgagcagggcaccgaggccgccgccggcagcggcagcgagatcgacatcagaatcagagtgcccagcatcgagttcaacgccaaccaccccttcctgttcttcatcagacacaacaagaccaacaccatcctgttctacggcagactgtgcagcccctag

SEQ ID NO: 152186 - protein, 410 aa, Artificial Sequence
  derived and/or modified sequence
MAFLGLFSLLVLQSMATGATFPEEAIADLSVNMYNRLRATGEDENILFSPLSIALAMGMMELGAQGSTQKEIRHSMGYDSLKNGEEFSFLKEFSNMVTAKESQYVMKIANSLFVQNGFHVNEEFLQMMKKYFNAAVNHVDFSQNVAVANYINKWVENNTNNLVKDLVSPRDFDAATYLALINAVYFKGNWKSQFRPENTRTFSFTKDDESEVQIPMMYQQGEFYYGEFSDGSNEAGGIYQVLEIPYEGDEISMMLVLSRQEVPLATLEPLVKAQLVEEWANSVKKQKVEVYLPRFTVEQEIDLKDVLKALGITEIFIKDANLTGLSDNKEIFLSKAIHKSFLEVNEEGSEAAAVSGMIAISRMAVLYPQVIVDHPFFFLIRNRRTGTILFMGRVMHPETMNTSGHDFEEL

SEQ ID NO: 152187 - protein, 245 aa, Artificial Sequence
  derived and/or modified sequence
MAFLGLFSLLVLQSMATGATFPEEAIADLSVNMYNRLRATGEDENILFSPLSIALAMGMMELGAQGSTQKEIRHSMGYDSLKNGEEFSFLKEFSNMVTAKESQYVMKIANSLFVQNGFHVNEEFLQMMKKYFNAAVNHVDFSQNVAVANYINKWVENNTNNLVKDLVSPRDFDAATYLALINAVYFKGNWKSQFRPENTRTFSFTKDDESEVQIPMMYQQGEFYYGEFSDGSNEAGGIYQVLEIP

SEQ ID NO: 152188 - protein, 160 aa, Artificial Sequence
  derived and/or modified sequence
MAFLGLFSLLVLQSMATGATFPEEAIADLSVNMYNRLRATGEDENILFSPLSIALAMGMMELGAQGSTQKEIRHSMGYDSLKNGEEFSFLKEFSNMVTAKESQYVMKIANSLFVQNGFHVNEEFLQMMKKYFNAAVNHVDFSQNVAVANYINKWVENNTN

SEQ ID NO: 152189 - DNA, 1233 bp, Artificial Sequence
  derived and/or modified sequence
atggcttttttgggactgttttctctgctggtcctgcagtcaatggccacaggcgccacattccccgaagaagcaatcgctgacttatctgtgaacatgtacaacaggctccgggcaactggagaagatgagaatatactgttcagcccattgtcaatcgccctggctatgggcatgatggagctgggagcccaggggtctacgcaaaaagagattagacactctatgggctatgattcgctcaaaaatggggaggagttctcattcctgaaggaatttagcaatatggtgacagccaaggagagccagtatgttatgaaaatcgccaatagcctcttcgtacagaacgggtttcacgtgaatgaggagttcctccagatgatgaagaagtattttaacgctgccgtgaaccacgtggacttttcacagaacgtcgcagtagctaattacatcaataagtgggtagaaaataacacaaataatctggtcaaggacttggtgtcaccccgcgacttcgacgccgctacgtatctggctctgatcaatgcggtctatttcaagggcaactggaaatcccagtttcgccccgagaacacacgcacctttagttttaccaaggacgacgagagcgaagttcagatccctatgatgtaccagcagggcgagttctactatggagagttcagtgacggctccaatgaggccggaggaatctatcaggtgctggagattccatacgaaggtgatgaaatcagcatgatgttggtcttgagcagacaggaagtcccattggcaactctggagcccctggtcaaggcgcagctggtcgaagagtgggcaaattccgtaaagaagcagaaagtcgaagtgtatctgcccaggtttactgtggaacaggagatcgacctgaaggatgtactgaaagctctgggcattactgaaatctttattaaggacgctaaccttactggactctcagataacaaggagatctttctttctaaggccatacataagtcatttctagaggtgaatgaggaaggttctgaggcagctgccgtttcggggatgatagcaatttctcgcatggccgttctctatcctcaggtgattgtggaccacccattttttttccttatcagaaatagaaggacggggaccatcctatttatggggagagttatgcacccagagactatgaataccagcggacacgatttcgaggaactgtag

SEQ ID NO: 152190 - DNA, 1233 bp, Artificial Sequence
  derived and/or modified sequence
atggcattcctgggcctgttcagcttactagtgctccagagtatggctaccggagctacctttccggaggaggctattgccgatctaagcgtgaatatgtacaataggctacgggctaccggagaggacgaaaacatactattttcccccctgagtatcgccctcgcaatgggcatgatggagctgggcgcacaagggagcactcagaaagaaattcgccacagtatggggtacgatagccttaaaaacggcgaggagttcagcttccttaaagaattcagtaacatggtcaccgctaaggagtctcagtatgtaatgaagatagctaactcactgtttgtgcagaacgggtttcatgtgaacgaagagtttctgcagatgatgaagaaatacttcaacgcagctgtcaatcacgtcgacttctcacagaatgttgccgttgccaactatataaataaatgggtggaaaataatactaacaatctcgttaaggacctagtcagccccagggatttcgacgctgccacgtacttggccctcattaacgctgtgtatttcaagggcaattggaaaagtcaattccgtcctgaaaacactcgaaccttcagcttcaccaaggatgacgaatctgaggtacagatccccatgatgtaccagcaaggggagttctactatggggagtttagcgacgggagcaacgaggctgggggcatttatcaggtgctggagataccatatgagggagatgagatctcaatgatgttggttctcagccggcaggaagtgccgctggccacactggagccccttgtgaaagctcagctggtagaagagtgggctaatagcgtcaaaaagcaaaaggtggaggtgtatctgccccgctttaccgtcgaacaggaaattgatctgaaggacgtgctgaaagcgttgggcatcacggagatttttatcaaggacgcgaacctgaccggtctttccgataataaggagatatttctgtccaaggctattcacaagagtttcctggaagtcaacgaggagggtagtgaagcagccgccgtgagcggaatgatcgctatctctcgcatggccgtactctaccctcaggtcattgtagaccacccctttttttttctgattcgaaataggaggacaggcaccattctgtttatgggacgggtcatgcacccggagaccatgaacaccagcgggcatgattttgaagaactatag

SEQ ID NO: 152191 - DNA, 738 bp, Artificial Sequence
  derived and/or modified sequence
atggccttcctgggacttttttcgctgctcgtgctgcagagtatggccacaggtgcaacattccctgaggaagcaatcgcagatctgagtgtcaatatgtacaacaggcttcgagctacaggtgaggacgaaaatattttatttagtccgctctccatcgctctggcaatgggcatgatggagctgggagcccaggggtccacccagaaagaaatccggcattctatggggtatgattcgctcaaaaacggagaagaattttctttcttgaaagaattttctaacatggtcacggctaaagagtctcagtatgtgatgaagatagcaaacagtctgtttgtgcaaaatgggtttcatgtgaacgaagaattcctccagatgatgaaaaagtatttcaatgctgccgtgaaccatgtggatttctcacagaatgtcgccgtggccaattacataaacaagtgggtagaaaacaatactaacaacttagttaaagacctcgtgtcacccagagattttgacgccgctacgtacctggctttgattaatgctgtctattttaagggaaattggaaatcccaattccgccccgaaaacacaagaaccttttcttttaccaaggacgatgaatcagaggtgcaaatcccaatgatgtaccagcagggcgagttttactatggggagtttagcgacggctcgaatgaagccggggggatttatcaagtgttagagataccatag

SEQ ID NO: 152192 - DNA, 483 bp, Artificial Sequence
  derived and/or modified sequence
atggcctttctcgggctatttagtctattggtgctgcagtcaatggccaccggtgcaacatttcctgaagaggccattgcagatttaagcgttaatatgtataatcgccttcgcgctacaggggaagatgaaaatatccttttttctcccctgtcaattgccctggctatgggtatgatggagctgggggcccagggaagcacacagaaagaaattcggcatagcatggggtacgatagtctgaaaaatggcgaggaattctcctttctgaaggagtttagcaacatggtgactgccaaggagtcccagtacgtcatgaagatcgcaaactcgctctttgtacagaacgggtttcacgtgaacgaggagtttcttcagatgatgaaaaaatacttcaacgccgctgttaaccacgtagatttcagtcaaaatgtggctgtagctaactacatcaataaatgggtcgaaaacaacacaaattag

SEQ ID NO: 152193 - DNA, 1233 bp, Artificial Sequence
  derived and/or modified sequence
atggccttcctgggcctcttcagcctgctggtgctgcagagcatggccactggagccaccttccctgaggaggccatcgctgacctgtctgtgaacatgtacaaccggctgcgggccaccggggaggatgagaacatcctcttcagccccctgagcatcgccctggccatgggcatgatggagctgggcgcccagggcagcacccagaaggagatccgccacagcatgggctatgacagcctgaagaatggagaggagttctccttcctgaaggagttcagcaacatggtgacagccaaggagagccagtatgtgatgaagatcgccaacagcctgtttgtgcagaatggcttccacgtgaatgaggagttcctgcagatgatgaagaagtacttcaatgctgctgtgaaccacgtggacttcagccagaatgtggccgtggccaactacatcaacaagtgggtggagaacaacaccaacaacctggtgaaggacctggtgagcccccgggactttgatgctgccacctacctggccctgatcaatgctgtgtacttcaagggcaactggaagagccagttccggcctgagaacaccaggaccttctccttcaccaaggatgatgagagcgaggtgcagatccccatgatgtaccagcagggcgagttctactatggagagttcagtgatggcagcaatgaagctgggggcatctaccaggtgctggagatcccctatgaaggagatgagatctccatgatgctggtgctgagccggcaggaggtgcccctggccaccctggagcccctggtgaaggcccagctggtggaggagtgggccaacagcgtgaagaagcagaaggtggaggtgtacctgccccgcttcaccgtggagcaggagattgacctgaaggatgtgctgaaggccctgggcatcacagagatcttcatcaaggatgccaacctgaccggcctgagtgacaacaaggagatcttcctgagcaaggccatccacaagagcttcctggaggtgaatgaggagggcagcgaggccgctgctgtgtctggcatgattgccatcagcaggatggctgtgctgtacccccaggtgattgtggaccaccccttcttcttcctgatccggaacagaagaacaggcaccatcctcttcatgggccgggtgatgcaccctgagaccatgaacaccagcggccatgactttgaggagctgtag

SEQ ID NO: 152194 - DNA, 738 bp, Artificial Sequence
  derived and/or modified sequence
atggccttcctgggcctcttcagcctgctggtgctgcagagcatggccactggagccaccttccctgaggaggccatcgctgacctgtctgtgaacatgtacaaccggctgcgggccaccggggaggatgagaacatcctcttcagccccctgagcatcgccctggccatgggcatgatggagctgggcgcccagggcagcacccagaaggagatccgccacagcatgggctatgacagcctgaagaatggagaggagttctccttcctgaaggagttcagcaacatggtgacagccaaggagagccagtatgtgatgaagatcgccaacagcctgtttgtgcagaatggcttccacgtgaatgaggagttcctgcagatgatgaagaagtacttcaatgctgctgtgaaccacgtggacttcagccagaatgtggccgtggccaactacatcaacaagtgggtggagaacaacaccaacaacctggtgaaggacctggtgagcccccgggactttgatgctgccacctacctggccctgatcaatgctgtgtacttcaagggcaactggaagagccagttccggcctgagaacaccaggaccttctccttcaccaaggatgatgagagcgaggtgcagatccccatgatgtaccagcagggcgagttctactatggagagttcagtgatggcagcaatgaagctgggggcatctaccaggtgctggagatcccctag

SEQ ID NO: 152195 - DNA, 483 bp, Artificial Sequence
  derived and/or modified sequence
atggccttcctgggcctcttcagcctgctggtgctgcagagcatggccactggagccaccttccctgaggaggccatcgctgacctgtctgtgaacatgtacaaccggctgcgggccaccggggaggatgagaacatcctcttcagccccctgagcatcgccctggccatgggcatgatggagctgggcgcccagggcagcacccagaaggagatccgccacagcatgggctatgacagcctgaagaatggagaggagttctccttcctgaaggagttcagcaacatggtgacagccaaggagagccagtatgtgatgaagatcgccaacagcctgtttgtgcagaatggcttccacgtgaatgaggagttcctgcagatgatgaagaagtacttcaatgctgctgtgaaccacgtggacttcagccagaatgtggccgtggccaactacatcaacaagtgggtggagaacaacaccaactag

SEQ ID NO: 152196 - DNA, 1233 bp, Artificial Sequence
  derived and/or modified sequence
atggccttcctgggcctgttcagcctgctggtgctgcagagcatggctaccggtgcgacatttccagaggaggcgatcgctgatctttctgtgaacatgtacaataggctgagggcaaccggcgaagacgagaatattctgttctcgccactgtctattgcattggcaatgggcatgatggagctgggagctcaaggatcaacccagaaagagattagacattccatgggatacgactccctgaaaaatggggaagagttttcctttctgaaagagttctcgaatatggttacggccaaggagagtcagtatgtgatgaaaatcgccaactccctgtttgtccaaaacggattccacgtgaacgaagagtttttacagatgatgaagaaatacttcaacgctgccgtaaaccatgtggactttagtcaaaacgttgctgtagccaactatatcaacaagtgggttgaaaataacacgaataacttagtcaaggatctggtttcaccccgcgatttcgatgctgccacctatcttgctctcattaatgcagtctatttcaaggggaactggaagagtcagttccggcccgaaaacacccggaccttctcattcactaaagatgacgagagcgaagtgcagattcccatgatgtatcagcaaggtgaattctactatggtgagttctccgacggctccaatgaagctggaggcatatatcaagtccttgagatcccttatgaaggagatgaaatcagtatgatgctggtgctttcccgccaggaagtgccactggcaaccctcgagccattggtaaaggcccagctcgtggaggagtgggcaaacagcgtgaaaaagcaaaaggtagaagtttatcttccgcgatttacggttgagcaagaaattgacctcaaagacgtgctaaaagcactgggcatcaccgaaatattcataaaggatgcaaacctgacaggactctcagataacaaggagatttttctgagcaaagctatccataagtcatttctagaggttaatgaggaaggctccgaagcagcagctgtgtccgggatgatcgccatttcccgcatggccgtactgtacccacaagtgatagtggaccacccgtttttcttcctgattaggaaccgacgaaccggtaccatcttgtttatgggaagagtgatgcaccctgagactatgaatacgagtggccacgacttcgaggagctttag

SEQ ID NO: 152197 - DNA, 1233 bp, Artificial Sequence
  derived and/or modified sequence
atggccttcctgggcctgttcagcctgctggtgctgcagagcatggctactggagccacatttccagaggaggccatcgccgacctgtccgtcaatatgtataataggctgagagctaccggcgaagacgagaacatccttttcagccccctaagtatcgccctggcgatgggaatgatggagcttggcgcacagggtagtacacagaaggaaattaggcattccatgggctatgacagcctcaaaaacggggaagaattcagctttctcaaagagttttccaatatggtgaccgctaaggaaagccagtatgtgatgaaaatcgctaacagcctgttcgttcagaatggctttcacgtgaacgaggaattcttgcagatgatgaagaagtactttaatgccgcagtaaatcacgtcgactttagccagaatgtggcagtggccaattatattaacaagtgggtggaaaataacactaataacttggtcaaggacctggtgagtcctagggacttcgacgccgctacctacctcgcattgattaacgccgtgtattttaaaggaaactggaaaagtcagttcaggcccgaaaatacccgaactttttccttcactaaggacgacgagtccgaagttcaaattcctatgatgtatcagcagggcgaattctactatggggagttttcagatggctctaatgaagcagggggcatctatcaggttcttgagatcccctatgaaggtgatgagatcagcatgatgcttgtcctgtcacgtcaggaggttccactggcgacattggagcctcttgtcaaggctcagctggttgaagaatgggcaaattcagtgaaaaagcagaaagtggaggtgtacttacctagatttactgtggagcaagagattgaccttaaagatgtgctcaaggcactgggaatcactgaaattttcatcaaggatgcaaatctcaccggactgagcgacaataaggagatctttctcagcaaggcaatccacaagtctttcctcgaggtgaacgaggagggctccgaagccgccgcagtaagcgggatgattgctatcagtcggatggccgtcctataccctcaggtgatcgtagaccaccccttcttctttctcatacgcaataggaggaccggcactatcctgtttatgggaagagttatgcaccctgaaaccatgaacacgagcggtcatgattttgaggaattgtag

SEQ ID NO: 152198 - DNA, 738 bp, Artificial Sequence
  derived and/or modified sequence
atggccttcctgggcctgttcagcctgctggtgctgcagagcatggctactggagcaacttttccagaggaagcgatcgctgacctatcagtgaatatgtataacaggctgagagcaacaggtgaggacgaaaacattctgttctcccctctctctatcgccctcgccatgggaatgatggagctcggcgcacagggatccacacagaaggagattaggcactctatgggctacgatagccttaagaacggagaagagtttagctttctgaaagaattctccaatatggtcacagccaaggaatcacaatatgttatgaaaattgcaaatagtctgtttgtgcagaacggttttcacgtgaatgaggagtttctgcaaatgatgaagaagtatttcaatgcagccgtgaatcacgtcgacttcagtcagaacgtggcagtcgcgaactatattaataagtgggtcgagaacaataccaataatctcgttaaggatcttgtgagtccaagggactttgacgccgcaacctatctcgctttgatcaacgccgtgtactttaagggaaactggaagagccaattcagacccgaaaatacacgtaccttctccttcaccaaggacgacgaatctgaagtccagatcccaatgatgtaccagcagggtgagttttattatggggaatttagcgatggatccaatgaagcaggcggtatataccaagtgctagaaataccttag

SEQ ID NO: 152199 - DNA, 483 bp, Artificial Sequence
  derived and/or modified sequence
atggccttcctgggcctgttcagcctgctggtgctgcagagcatggccactggcgccacattcccagaggaagcaattgccgatctgtcagtaaacatgtacaaccgcctgagggcgacaggcgaagatgagaacatcttgttttcaccactgtccatcgctctggcaatgggcatgatggaactcggtgctcagggcagtacgcagaaggagattaggcactctatgggatatgactcattaaaaaacggtgaagaatttagctttttgaaggagttcagtaacatggtgactgcgaaagagtctcaatacgtcatgaagatagcaaatagtttgtttgtacagaacggattccacgtgaacgaagagttcctgcagatgatgaagaagtattttaacgccgccgtcaaccatgttgatttctcccagaacgtggccgtggctaactacattaataaatgggttgagaataacaccaactag

SEQ ID NO: 152200 - DNA, 1233 bp, Artificial Sequence
  derived and/or modified sequence
atggcgttcctcggacttttttcacttctcgtcttgcagtcaatggctactggcgctacatttccagaggaggctattgctgacctgtccgtcaatatgtacaacagactgcgtgcgacgggagaagacgaaaatattctgttctctcctctatccatagctctggcaatgggcatgatggagcttggggctcagggctccacacaaaaggaaatacggcactcaatgggctacgactctctgaagaacggagaagagttttcattcctgaaggaatttagtaatatggtcacggccaaagagtcacagtacgtgatgaagatagctaattcattgttcgtgcaaaatggattccatgttaatgaggagttcctacaaatgatgaagaagtactttaatgcagccgttaaccacgtggattttagccaaaacgtggccgtggctaattacatcaacaagtgggtggagaataacaccaataatctcgtgaaagatctcgtgtcccccagagactttgacgctgccacctatctggctctgattaatgcagtttacttcaaaggtaattggaaatctcagttcagacctgaaaacactagaacgtttagcttcaccaaggacgatgaaagtgaggtccagataccaatgatgtaccagcaaggcgagttttactacggggaattctctgacgggtcaaacgaggcaggcggaatctatcaggtactggaaatcccttatgaaggcgatgaaatcagcatgatgttagtgctatcccgccaagaagttccccttgccacgctggaacccctagtgaaggcgcagttggttgaggagtgggcaaattccgtcaagaagcagaaagtggaagtttatctgcccaggtttacagttgagcaggaaattgatctgaaggacgtccttaaggctttgggcatcaccgaaatttttatcaaggatgccaatcttaccggactctctgacaacaaggagatcttcctgtcaaaagctattcacaaaagctttctcgaggtgaatgaggagggttcggaggcggctgctgtctctggaatgattgccattagtcgcatggccgtactatatccccaggtcatagtggaccacccatttttttttctcatcagaaatagacgaacgggtaccatcctttttatggggagggtgatgcatcccgagactatgaacacctctggacatgactttgaagaactgtag

SEQ ID NO: 152201 - DNA, 1233 bp, Artificial Sequence
  derived and/or modified sequence
atggcttttcttgggttgtttagtctgctcgtgttgcaatccatggctacgggagctacctttcctgaggaggcgatcgccgatcttagtgtgaacatgtataacaggctccgagcaacaggggaggacgagaacatcttgtttagccccctctctatcgcgttggctatgggtatgatggagctgggagcccaggggtcaactcaaaaagaaatcagacactctatgggatacgacagtctgaaaaacggcgaggagtttagttttcttaaagagttttctaacatggtgacagctaaggagtctcagtacgtaatgaagatagcaaatagtttgttcgttcagaacggtttccatgtgaacgaggagttcctccagatgatgaaaaagtactttaatgcagcagtgaaccatgttgacttctcccaaaatgtcgctgtggctaactacatcaacaagtgggttgagaacaataccaataacctcgtcaaagatctggtatcaccacgcgacttcgacgccgctacatatctggccctgatcaatgcagtttatttcaagggaaattggaagtcgcagttccgccctgagaatactcggacctttagttttactaaggatgatgaatctgaagtccagatccccatgatgtatcagcaaggcgaattctattatggagaatttagcgacgggagtaatgaggccggaggtatttaccaggtgctcgagatcccgtacgagggggatgagatcagtatgatgcttgtcttatcaaggcaggaggtgccactggcgaccctggaacccctggtgaaagcccaactcgtggaggaatgggctaacagcgtgaaaaaacaaaaggttgaagtgtacctacctcggttcaccgtcgagcaagagattgacctgaaagatgtgctgaaagctcttggcatcacagaaatcttcatcaaggacgccaatctgaccggcctgtcggacaacaaggagatatttttatctaaagctattcacaagtcgtttctggaagtcaatgaagaaggctctgaagctgctgcggttagcggcatgatagcaatctccagaatggccgtgttatatccgcaggttatcgtagaccacccctttttcttcctgatccggaatagacgtactggaacaatcctctttatgggacgggtgatgcaccctgaaactatgaatacaagtgggcatgatttcgaggagctctag

SEQ ID NO: 152202 - DNA, 738 bp, Artificial Sequence
  derived and/or modified sequence
atggctttccttgggctgtttagtcttctggtcctgcagagcatggccactggagcaacttttcctgaggaagctatagccgacctgtctgtaaacatgtacaatcgactgcgcgctaccggcgaggacgagaatatcttattctccccactgagcatcgctttggcaatggggatgatggaattgggcgctcaggggtcaactcaaaaggaaatccgtcactcaatgggttacgatagtttgaaaaacggcgaggagttctccttcctgaaggagtttagcaacatggtgactgcaaaggaatcacagtatgtgatgaaaattgcaaactccctcttcgtgcagaatggttttcatgtgaatgaagaattccttcagatgatgaaaaaatactttaatgctgctgtgaaccacgttgactttagccagaatgtcgccgtcgcaaactatatcaacaagtgggtcgagaataatacaaacaatttagtgaaagacctggtaagccccagggactttgacgcagcaacctaccttgccctcattaatgccgtgtactttaaggggaactggaagtcacaatttagaccggagaacacaagaacatttagtttcactaaggatgacgagtccgaggtgcagattcccatgatgtatcagcaaggtgagttttactatggggagttcagtgatggaagcaatgaagccggtgggatctaccaagtactggaaatcccgtag

SEQ ID NO: 152203 - DNA, 483 bp, Artificial Sequence
  derived and/or modified sequence
atggcattcttgggcctgtttagcctgctggtgctgcagtcaatggccaccggcgctacattcccagaagaggcaatagccgacctctccgtaaacatgtacaatagattgcgcgctaccggggaagacgaaaacattctgttctcccccttgagtatcgccctggccatgggcatgatggagcttggagctcagggcagcacccagaaagagattagacactctatgggatatgactcacttaaaaatggcgaggagttctcattcttgaaggagttctccaatatggtcacggctaaagagtcccaatatgtgatgaaaattgccaactccctattcgtgcaaaacggcttccatgttaatgaagagtttttacagatgatgaaaaaatacttcaacgctgctgtgaatcacgtcgacttttctcagaatgtggcagtggcaaattacattaataagtgggtcgagaacaacacaaactag

SEQ ID NO: 152204 - DNA, 1907 bp, Artificial Sequence
  derived and/or modified sequence
agtttcccgggagagacgaaagcaggaacgagagcggagcggagcacagtccgccgagcacaagctccagcatcccgtcaggggttgcaggtgtgtgggaggtaagcgtgggtccttcttcggggcgtctgcactgccctggagaaaacgtcttccaataggaattacatcaagacacagctaaaagagtccgcgttgggttaggaaaccggtgcaaaacctctcgggtgaaagatttacatttttcgactttaagggcaaaaaagcaaaaggaagcttgactctgggtataaagggcgtggttagtgtttttggtttgagttgcaccagtaaaactgttctgggagatctgaagattgagaaaaatcctgctaattgaggacgaggtggatgttatctggtggatgttataggcttgaaactgttacaatatggctttccttggactcttctctttgctggttctgcaaagtatggctacaggggccactttccctgaggaagccattgctgacttgtcagtgaatatgtataatcgtcttagagccactggtgaagatgaaaatattctcttctctccattgagtattgctcttgcaatgggaatgatggaacttggggcccaaggatctacccagaaagaaatccgccactcaatgggatatgacagcctaaaaaatggtgaagaattttctttcttgaaggagttttcaaacatggtaactgctaaagagagccaatatgtgatgaaaattgccaattccttgtttgtgcaaaatggatttcatgtcaatgaggagtttttgcaaatgatgaaaaaatattttaatgcagcagtaaatcatgtggacttcagtcaaaatgtagccgtggccaactacatcaataagtgggtggagaataacacaaacaatctggtgaaagatttggtatccccaagggattttgatgctgccacttatctggccctcattaatgctgtctatttcaaggggaactggaagtcgcagtttaggcctgaaaatactagaaccttttctttcactaaagatgatgaaagtgaagtccaaattccaatgatgtatcagcaaggagaattttattatggggaatttagtgatggctccaatgaagctggtggtatctaccaagtcctagaaataccatatgaaggagatgaaataagcatgatgctggtgctgtccagacaggaagttcctcttgctactctggagccattagtcaaagcacagctggttgaagaatgggcaaactctgtgaagaagcaaaaagtagaagtatacctgcccaggttcacagtggaacaggaaattgatttaaaagatgttttgaaggctcttggaataactgaaattttcatcaaagatgcaaatttgacaggcctctctgataataaggagatttttctttccaaagcaattcacaagtccttcctagaggttaatgaagaaggctcagaagctgctgctgtctcaggaatgattgcaattagtaggatggctgtgctgtatcctcaagttattgtcgaccatccatttttctttcttatcagaaacaggagaactggtacaattctattcatgggacgagtcatgcatcctgaaacaatgaacacaagtggacatgatttcgaagaactttaagttactttatttgaataacaaggaaaacagtaactaagcacattatgtttgcaactggtatatatttaggatttgtgttttacagtatatcttaagataatatttaaaatagttccagataaaaacaatatatgtaaattataagtaacttgtcaaggaatgttatcagtattaagctaatggtcctgttatgtcattgtgtttgtgtgctgttgtttaaaataaaagtacctattgaacatg

SEQ ID NO: 152205 - DNA, 1890 bp, Artificial Sequence
  derived and/or modified sequence
gaaggataggctgagccggggctcccagcagagacgcctgggtggggcaggaggccgctccaggtgtgagccacagaggaggggagagggacccccacgggagtggaagtggcagagcagctgcagaagtgcagggagcggaaaggtaccagggcagctgctttccgctgcctccggtccgggcagctgcagaaacagcagggggaggagcaacagctgccaaattcgccaactagaggagggagaggcggagcttgggtccctgtagaagccagaggcgcagtctggactgtagtttcccgggagagacgaaagcaggaacgagagcggagcggagcacagtccgccgagcacaagctccagcatcccgtcaggggttgcaggtgtgtgggaggcttgaaactgttacaatatggctttccttggactcttctctttgctggttctgcaaagtatggctacaggggccactttccctgaggaagccattgctgacttgtcagtgaatatgtataatcgtcttagagccactggtgaagatgaaaatattctcttctctccattgagtattgctcttgcaatgggaatgatggaacttggggcccaaggatctacccagaaagaaatccgccactcaatgggatatgacagcctaaaaaatggtgaagaattttctttcttgaaggagttttcaaacatggtaactgctaaagagagccaatatgtgatgaaaattgccaattccttgtttgtgcaaaatggatttcatgtcaatgaggagtttttgcaaatgatgaaaaaatattttaatgcagcagtaaatcatgtggacttcagtcaaaatgtagccgtggccaactacatcaataagtgggtggagaataacacaaacaatctggtgaaagatttggtatccccaagggattttgatgctgccacttatctggccctcattaatgctgtctatttcaaggggaactggaagtcgcagtttaggcctgaaaatactagaaccttttctttcactaaagatgatgaaagtgaagtccaaattccaatgatgtatcagcaaggagaattttattatggggaatttagtgatggctccaatgaagctggtggtatctaccaagtcctagaaataccatatgaaggagatgaaataagcatgatgctggtgctgtccagacaggaagttcctcttgctactctggagccattagtcaaagcacagctggttgaagaatgggcaaactctgtgaagaagcaaaaagtagaagtatacctgcccaggttcacagtggaacaggaaattgatttaaaagatgttttgaaggctcttggaataactgaaattttcatcaaagatgcaaatttgacaggcctctctgataataaggagatttttctttccaaagcaattcacaagtccttcctagaggttaatgaagaaggctcagaagctgctgctgtctcaggaatgattgcaattagtaggatggctgtgctgtatcctcaagttattgtcgaccatccatttttctttcttatcagaaacaggagaactggtacaattctattcatgggacgagtcatgcatcctgaaacaatgaacacaagtggacatgatttcgaagaactttaagttactttatttgaataacaaggaaaacagtaactaagcacattatgtttgcaactggtatatatttaggatttgtgttttacagtatatcttaagataatatttaaaatagttccagataaaaacaatatatgtaaattataagtaacttgtcaaggaatgttatcagtattaagctaatggtcctgttatgtcattgtgtttgtgtgctgttgtttaaaataaaagtacctattgaacatgtg

SEQ ID NO: 152206 - DNA, 842 bp, Artificial Sequence
  derived and/or modified sequence
tttcccgggagagacgaaagcaggaacgagagcggagcggagcacagtccgccgagcacaagctccagcatcccgtcaggggttgcaggcttgaaactgttacaatatggctttccttggactcttctctttgctggttctgcaaagtatggctacaggggccactttccctgaggaagccattgctgacttgtcagtgaatatgtataatcgtcttagagccactggtgaagatgaaaatattctcttctctccattgagtattgctcttgcaatgggaatgatggaacttggggcccaaggatctacccagaaagaaatccgccactcaatgggatatgacagcctaaaaaatggtgaagaattttctttcttgaaggagttttcaaacatggtaactgctaaagagagccaatatgtgatgaaaattgccaattccttgtttgtgcaaaatggatttcatgtcaatgaggagtttttgcaaatgatgaaaaaatattttaatgcagcagtaaatcatgtggacttcagtcaaaatgtagccgtggccaactacatcaataagtgggtggagaataacacaaacaatctggtgaaagatttggtatccccaagggattttgatgctgccacttatctggccctcattaatgctgtctatttcaaggggaactggaagtcgcagtttaggcctgaaaatactagaaccttttctttcactaaagatgatgaaagtgaagtccaaattccaatgatgtatcagcaaggagaattttattatggggaatttagtgatggctccaatgaagctggtggtatctaccaagtcctagaaataccat

SEQ ID NO: 152207 - DNA, 582 bp, Artificial Sequence
  derived and/or modified sequence
gaggggcctgtggtggggatcctggggctgtcgggctgagtatgccgtgtgggtggagaggaagcctcggggaaatcgcccaggcttgaaactgttacaatatggctttccttggactcttctctttgctggttctgcaaagtatggctacaggggccactttccctgaggaagccattgctgacttgtcagtgaatatgtataatcgtcttagagccactggtgaagatgaaaatattctcttctctccattgagtattgctcttgcaatgggaatgatggaacttggggcccaaggatctacccagaaagaaatccgccactcaatgggatatgacagcctaaaaaatggtgaagaattttctttcttgaaggagttttcaaacatggtaactgctaaagagagccaatatgtgatgaaaattgccaattccttgtttgtgcaaaatggatttcatgtcaatgaggagtttttgcaaatgatgaaaaaatattttaatgcagcagtaaatcatgtggacttcagtcaaaatgtagccgtggccaactacatcaataagtgggtggagaataacacaaaca

SEQ ID NO: 152208 - DNA, 1233 bp, Artificial Sequence
  derived and/or modified sequence
atggccttcctgggcctgttcagcctgctggtgctgcagagcatggccaccggcgccaccttccccgaggaggccatcgccgacctgagcgtgaacatgtacaacagactgagagccaccggcgaggacgagaacatcctgttcagccccctgagcatcgccctggccatgggcatgatggagctgggcgcccagggcagcacccagaaggagatcagacacagcatgggctacgacagcctgaagaacggcgaggagttcagcttcctgaaggagttcagcaacatggtgaccgccaaggagagccagtacgtgatgaagatcgccaacagcctgttcgtgcagaacggcttccacgtgaacgaggagttcctgcagatgatgaagaagtacttcaacgccgccgtgaaccacgtggacttcagccagaacgtggccgtggccaactacatcaacaagtgggtggagaacaacaccaacaacctggtgaaggacctggtgagccccagagacttcgacgccgccacctacctggccctgatcaacgccgtgtacttcaagggcaactggaagagccagttcagacccgagaacaccagaaccttcagcttcaccaaggacgacgagagcgaggtgcagatccccatgatgtaccagcagggcgagttctactacggcgagttcagcgacggcagcaacgaggccggcggcatctaccaggtgctggagatcccctacgagggcgacgagatcagcatgatgctggtgctgagcagacaggaggtgcccctggccaccctggagcccctggtgaaggcccagctggtggaggagtgggccaacagcgtgaagaagcagaaggtggaggtgtacctgcccagattcaccgtggagcaggagatcgacctgaaggacgtgctgaaggccctgggcatcaccgagatcttcatcaaggacgccaacctgaccggcctgagcgacaacaaggagatcttcctgagcaaggccatccacaagagcttcctggaggtgaacgaggagggcagcgaggccgccgccgtgagcggcatgatcgccatcagcagaatggccgtgctgtacccccaggtgatcgtggaccaccccttcttcttcctgatcagaaacagaagaaccggcaccatcctgttcatgggcagagtgatgcaccccgagaccatgaacaccagcggccacgacttcgaggagctgtag

SEQ ID NO: 152209 - DNA, 738 bp, Artificial Sequence
  derived and/or modified sequence
atggccttcctgggcctgttcagcctgctggtgctgcagagcatggccaccggcgccaccttccccgaggaggccatcgccgacctgagcgtgaacatgtacaacagactgagagccaccggcgaggacgagaacatcctgttcagccccctgagcatcgccctggccatgggcatgatggagctgggcgcccagggcagcacccagaaggagatcagacacagcatgggctacgacagcctgaagaacggcgaggagttcagcttcctgaaggagttcagcaacatggtgaccgccaaggagagccagtacgtgatgaagatcgccaacagcctgttcgtgcagaacggcttccacgtgaacgaggagttcctgcagatgatgaagaagtacttcaacgccgccgtgaaccacgtggacttcagccagaacgtggccgtggccaactacatcaacaagtgggtggagaacaacaccaacaacctggtgaaggacctggtgagccccagagacttcgacgccgccacctacctggccctgatcaacgccgtgtacttcaagggcaactggaagagccagttcagacccgagaacaccagaaccttcagcttcaccaaggacgacgagagcgaggtgcagatccccatgatgtaccagcagggcgagttctactacggcgagttcagcgacggcagcaacgaggccggcggcatctaccaggtgctggagatcccctag

SEQ ID NO: 152210 - DNA, 483 bp, Artificial Sequence
  derived and/or modified sequence
atggccttcctgggcctgttcagcctgctggtgctgcagagcatggccaccggcgccaccttccccgaggaggccatcgccgacctgagcgtgaacatgtacaacagactgagagccaccggcgaggacgagaacatcctgttcagccccctgagcatcgccctggccatgggcatgatggagctgggcgcccagggcagcacccagaaggagatcagacacagcatgggctacgacagcctgaagaacggcgaggagttcagcttcctgaaggagttcagcaacatggtgaccgccaaggagagccagtacgtgatgaagatcgccaacagcctgttcgtgcagaacggcttccacgtgaacgaggagttcctgcagatgatgaagaagtacttcaacgccgccgtgaaccacgtggacttcagccagaacgtggccgtggccaactacatcaacaagtgggtggagaacaacaccaactag

SEQ ID NO: 152211 - protein, 728 aa, Artificial Sequence
  derived and/or modified sequence
MAGPEGFQYRALYPFRRERPEDLELLPGDVLVVSRAALQALGVAEGGERCPQSVGWMPGLNERTRQRGDFPGTYVEFLGPVALARPGPRPRGPRPLPARPRDGAPEPGLTLPDLPEQFSPPDVAPPLLVKLVEAIERTGLDSESHYRPELPAPRTDWSLSDVDQWDTAALADGIKSFLLALPAPLVTPEASAEARRALREAAGPVGPALEPPTLPLHRALTLRFLLQHLGRVASRAPALGPAVRALGATFGPLLLRAPPPPSSPPPGGAPDGSEPSPDFPALLVEKLLQEHLEEQEVAPPALPPKPPKAKPASTVLANGGSPPSLQDAEWYWGDISREEVNEKLRDTPDGTFLVRDASSKIQGEYTLTLRKGGNNKLIKVFHRDGHYGFSEPLTFCSVVDLINHYRHESLAQYNAKLDTRLLYPVSKYQQDQIVKEDSVEAVGAQLKVYHQQYQDKSREYDQLYEEYTRTSQELQMKRTAIEAFNETIKIFEEQGQTQEKCSKEYLERFRREGNEKEMQRILLNSERLKSRIAEIHESRTKLEQQLRAQASDNREIDKRMNSLKPDLMQLRKIRDQYLVWLTQKGARQKKINEWLGIKNETEDQYALMEDEDDLPHHEERTWYVGKINRTQAEEMLSGKRDGTFLIRESSQRGCYACSVVVDGDTKHCVIYRTATGFGFAEPYNLYGSLKELVLHYQHASLVQHNDALTVTLAHPVRAPGPGPPPAAR

SEQ ID NO: 152212 - DNA, 4026 bp, Artificial Sequence
  derived and/or modified sequence
ccgcccggctcgaatgcgctcgggcatttccgccgggggcgggccaggccgctcggaaccgtggcggcggcggaggcggggatcccgcggctgcggcgacggtggccgcggtggagccacggggcgggcttggcttggtgtgacggcggctgcggcggcggtggcggccgcgaccaggtcggcgtcctcagctggccgagcatggtggcagcctgcacccttggctcccttgtctggtgcagccagcagagccgccagccttgggcgcccatggccctccgtgtgagggcgtgagcggcctgccccagcctcacctgctgatggaggactcaatggcccagtgacctgacaccacaccaccaactccctcccaccagctgacgaatggtggacccagtgacgagtggcccttgtaagggtcatggaataatttgaagcgaggcatgagcggcccctgtggtcgcctgtgactgctggagatagaggtcccagcaccccaagccaacccagcggaccctcccagccctgcttcaaccaatggggccagtggggctccaagcagccacctaaccatccagaccccaccccactcacgcggccatggcgggccctgagggcttccagtaccgcgctctgtacccgttccgccgggagcggccggaggacctggagctgctgcccggcgacgtgctggtagtgagccgggcggccttgcaggcgctgggcgtggccgagggtggcgagcgctgcccacagagcgtgggctggatgcccggcctcaacgagcgcacacggcagcgaggtgacttccctggcacctatgtggagttcctggggcccgtggccctggcccggcccggccctcgcccacggggcccccgcccactgcccgccaggccccgtgatggggcccctgagccaggcctcacactccccgacttgcccgagcagttctccccacctgatgtggctccccctcttctggtgaagcttgtggaggccattgaaaggacagggctggacagcgaatctcactaccgcccggagctgcccgcaccgcgtacagactggtccctgagcgacgtggatcagtgggacacggcagccctggctgacggcattaagagcttcctgctggcactgcccgcgccgctcgtgacccccgaggcctcggccgaggcgcgccgggccctgcgggaggccgcggggcccgtggggccggcgctggagccaccgacgctgccgctgcaccgcgcgctcacgctgcgcttcctgctccagcacctgggccgcgtggccagccgcgccccggccctgggtcccgcggtccgggccctgggcgccacctttgggccgctgctgctgcgcgcgccgccgccgccgtcctcgccgccgccagggggcgctcccgacgggagtgagcccagccctgacttcccggcgctgctggtggagaagctgcttcaggaacacttggaagagcaggaggttgcgcccccagcgctgccgcctaaaccccccaaggcaaagccggcctccacagtcctggccaatggagggagcccaccctccctgcaggatgctgagtggtactggggggacatttcaagggaggaggtgaacgagaaactccgggacactcccgatggcaccttcctagtccgagatgcttctagcaagatccagggcgagtacacgctgaccctcaggaaaggcgggaacaataagctgatcaaggtcttccaccgagatgggcactatggcttctcagagccactcaccttctgctccgttgtggacctcatcaatcactaccgccacgagtctctggcccagtacaatgccaagctggacacacggctcctctaccctgtgtccaaataccagcaggaccagattgtcaaggaggacagcgtggaggcagtgggcgcccagcttaaggtctatcaccagcagtaccaggacaagagccgcgagtatgaccagctttatgaagagtacacacggacctcccaggagctgcagatgaagcgtactgcaattgaggccttcaatgagactatcaagatctttgaagagcagggccagactcaagagaaatgcagcaaggaatacctggagcgcttccggcgtgagggcaacgagaaagagatgcaaaggatcctgctgaactccgagcggctcaagtcccgcattgccgagatccatgagagccgcacgaagctggagcagcagctgcgggcccaggcctcggacaacagagagatcgacaagcgcatgaacagcctcaagccggacctcatgcagctgcgcaagatccgagaccagtacctcgtgtggctcacccagaaaggcgcccggcagaagaaaatcaacgagtggctggggattaaaaatgagactgaggaccagtacgcactcatggaggacgaggacgatctcccgcaccacgaggaacgcacttggtacgtgggcaagatcaaccgcacgcaggcagaggagatgctgagtggcaagcgggatggcaccttcctcatccgcgagagcagccagcggggctgctacgcctgctccgtggtagtggacggcgacaccaagcactgcgtcatctaccgcacggccaccggcttcggcttcgcggagccctacaacctgtacgggtcgctgaaggagctggtgctgcactaccagcacgcctcgctggtgcagcacaacgacgcgctcaccgtcaccctggcgcacccagtgcgcgccccgggccccggcccgccgcctgccgcccgctgagcaccgaggacccgccccaagcagagccgcccctgggcccgtctgcgccggaggctgcggcggcgggagccacggaccagaccagccacatccaggggtcctcatttctccggctctggctcttgtttggggttctctcaccctctttctctttccttccctcccccattctccagatctccctctgtctccttttctctgtctttcttggcccctgtctctctccatgttgggggtcctaactcccccaccccatatctacgtgtcctccgggcattgccctctccatggctctggtcaccctgaccctctgccctgcccaccgcaggtcccccggggtcccggaagccccttctggctgcacctgccatgtttacagagggcccctgggctgcgcggccccagcctgggcaccctgatttttaagccatagacctggggtcagggcaggaaggaacttcactctgctgcttccgagaacctcggccgtgacattcggggccgggcgggacccgccccacagactccaacttcccctccaaaccccgaagtgaaacccgccaccgggttacccccacaagggggccgctgcgagaagttcacccacccccgaaaaaataattaaactcgcaggccaggcacggtggctcatgcctgtaatcccagcactttgggaggccaagacgggcggatcttttgaggtcgggagttggaggccagcctggccaaaatggcaaaaccccgcatctactaaaatacaaaaattagccgggcgtggtggcggccgcctgtaatcccagctacttgggaggctgaggcgtgagaatctcttgaacccaggagatggaggttgcagtgagcagagatcgtgccactgcactccagcctgggtaacagagggagactcctccgtctcaaaaaaataaataaataaacttgtgagctggccccaacccctcctaggaatcacagctccccgtactggtgccgccgcagtggccaagttgcgacactgcccacggcccctccctctgatgcagattcagggcttctcttcgatcatgttgggttttgattctgtttttccttgactgcaaaaccctctttcctctcctcttttgggacaagagccctggttttctacgctgcccttggccaccacactgcctgccccacgagctgggaggcaggttttgtacggtacgttgttattgatatgatataaaacatcaaacgtcg

SEQ ID NO: 152213 - DNA, 2187 bp, Artificial Sequence
  derived and/or modified sequence
atggcaggaccagagggttttcagtaccgggccttataccctttcaggcgagaacggcctgaggatctggaattgttgcccggggacgtgctggtcgtctctagggccgcgctccaggcactcggcgttgcagaaggaggtgagaggtgtcctcagtctgttggctggatgccaggactaaatgagcgcaccaggcagagaggggactttcctggaacgtacgtggaatttctcggccctgtcgcactggccaggcccgggccgagaccgcgtggcccccgtcctctccctgctcgacccagagacggtgcccccgagccaggtttaactcttccagacctgccagagcagttttcaccacctgatgtggcgcctccactgttagtaaagttagtggaagcaatcgagagaaccggcctggattctgaatcccattacagacctgaactacctgctccacggaccgattggtctctctcagacgtggatcaatgggatacggccgccctggcagacggcatcaaatcattccttctcgccctaccagctcccctggtgaccccagaagcttcagcggaggcgaggcgggccctgagagaggcagccggaccagtgggtcctgctctggagccacctacgctaccactgcatcgggcactaacattgcgttttctgctgcaacatttagggcgggtggccagtcgcgcaccagcactaggacccgcagtcagggctctcggtgcaacctttggcccccttctgctacgcgctccccctccccccagttcccctcccccgggtggcgcgccagatgggagcgaaccttcaccagacttccctgcccttctggtagagaaattgttacaggagcacctagaagagcaggaagtagcccctcctgcgctgccccctaagcccccaaaggctaaacctgcatcaaccgttctggccaatggcggatcccccccttctcttcaggatgcagaatggtactggggcgacatttcaagggaggaggttaatgaaaaactccgggacacacctgacggaaccttcctggtcagagacgcatctagcaaaattcagggggagtacaccctgactctgagaaagggaggtaacaacaaactcattaaggtgttccacagggacgggcattacgggttctcggagcctttaaccttttgctcagtggtcgatttgataaatcactatcgccacgagagcctggcacagtacaacgctaagctggacacccgtctcctttaccccgtcagtaagtaccagcaggaccaaatcgtcaaggaagattccgtagaggccgttggagcccagctgaaggtttatcatcagcagtatcaggacaaatcacgagaatacgaccagctgtacgaagagtacacgcgtacatctcaggaacttcagatgaagcgtactgcaattgaggccttcaacgaaaccataaagatttttgaagagcagggccaaacccaggagaaatgtagtaaggagtacctcgaaagatttcgtagggaggggaatgagaaagaaatgcagaggatactcctgaatagtgagcgattaaaatccaggatcgccgagatccatgagtcacggacaaagttggagcagcagctcagagcccaggcatcggataatagggaaatcgataagcggatgaatagcctgaagccggacctgatgcagttgaggaagataagagaccagtacctagtttggctaacacaaaaaggagctaggcagaaaaaaatcaacgagtggcttggaatcaaaaacgagacagaagatcagtatgcactaatggaggatgaggatgacctgccacatcatgaggagaggacatggtatgtgggcaaaataaaccgcacacaggctgaagagatgttaagcggtaaacgcgacgggactttcctgatccgggaatcctcacagagaggatgttacgcctgtagcgtagtcgttgatggagacaccaaacactgcgtaatatataggaccgccacaggtttcggattcgccgaaccctataacttatacggttctctgaaggaactcgtcctgcactatcagcatgctagcctggtgcaacacaacgacgccttgaccgttaccttggctcacccagtgcgtgcccccggtccaggccctccccccgcagcccgttag

SEQ ID NO: 152214 - DNA, 2187 bp, Artificial Sequence
  derived and/or modified sequence
atggccggccctgagggcttccagtaccgggccctgtaccccttccggcgggagaggcctgaggacctggagctgctgcctggagatgtgctggtggtgtcccgggccgccctgcaggccctgggcgtggccgagggcggggagcgctgcccccagagcgtgggctggatgcctggcctgaatgaaagaacccggcagagaggagacttccctggcacctacgtggagttcctgggccctgtggccctggcccggcccggcccccggccccggggcccccggcccctgcctgcccggcccagagatggagcccctgagcccggcctgaccctgcctgacctgcctgagcagttcagccccccagatgtggccccacccctgctggtgaagctggtggaggccattgaaagaacaggcctggacagcgagagccactacagacctgagctgcctgcccccaggacagactggagcctgagtgatgtggaccagtgggacacagctgccctggctgatggcatcaagagcttcctgctggccctgcctgcccccctggtgaccccagaggccagcgctgaggcccggcgggccctgcgggaggccgccggccctgtgggccctgccctggagccccccaccctgcccctgcaccgggccctgaccctgcgcttcctgctgcagcacctgggccgggtggccagccgggccccagccctgggccctgctgtgcgggccctgggcgccaccttcggccccctgctgctgcgggcccctcctccacccagcagccccccacctgggggcgccccagatggcagcgagcccagcccagacttccctgccctgctggtggagaagctgctgcaggagcacctggaggagcaggaggtggcccccccagccctgccccccaagccacccaaggccaagccagccagcacagtgctggccaacggcggcagcccccccagcctgcaggatgctgagtggtactggggagacatcagccgggaggaggtgaatgagaagctgcgggacaccccagatggcaccttcctggtgagagatgccagcagcaagatccagggcgagtacaccctgaccctgaggaaaggaggcaacaacaagctgatcaaggtgttccacagagatggccactacggcttcagcgagcccctgaccttctgcagcgtggtggacctgatcaaccactacagacatgagagcctggcccagtacaatgccaagctggacacccggctgctgtaccctgtgtccaagtaccagcaggaccagatcgtgaaggaggacagcgtggaggccgtgggcgcccagctgaaggtgtaccaccagcagtaccaggacaagagccgggagtatgaccagctgtatgaggagtacaccaggaccagccaggagctgcagatgaagaggacagccatcgaggccttcaatgagaccatcaagatctttgaggagcagggccagacccaggagaagtgcagcaaggagtacctggagcgcttccggcgggagggcaatgagaaggagatgcagaggatcctgctgaacagcgagcggctgaagagcagaattgctgagatccacgagagcaggaccaagctggagcagcagctgcgggcccaggccagtgacaaccgggagattgacaagaggatgaacagcctgaagccagacctgatgcagctgaggaagatccgggaccagtacctggtgtggctgacccagaagggggcccggcagaagaagatcaatgagtggctgggcatcaagaatgaaacagaggaccagtatgccctgatggaggatgaagatgacctgccccaccacgaggagaggacctggtacgtgggcaagatcaacagaacccaggccgaggagatgctgagcggcaagagagatggcaccttcctgatccgggagagcagccagaggggctgctacgcctgcagcgtggtggtggatggagacaccaagcactgcgtcatctacagaacagccactggatttggatttgctgagccctacaacctgtatggcagcctgaaggagctggtgctgcactaccagcacgccagcctggtgcagcacaatgatgccctgactgtgaccctggcccaccctgtgcgggcccctggccctggccccccacctgctgccaggtag

SEQ ID NO: 152215 - DNA, 2187 bp, Artificial Sequence
  derived and/or modified sequence
atggccggccccgagggcttccagtaccgggccctgtaccccttcagaagggagagacctgaggacctggagctgttgcccggagacgtcttagtagtatctcgtgctgcactgcaggctctgggggtggctgaaggcggggagcggtgtcctcagagcgttgggtggatgcctggcctgaacgaacggactcgccagcgcggggactttcctgggacttacgtggagttcctgggcccagtggcactggcaagacccgggccgcgacctaggggcccaaggcccctgcctgcccggccccgggacggagcccctgagccaggtctaacactccccgatctaccagaacagttcagccctcccgacgtggccccaccgctgctcgtaaaactcgtggaggccatcgaacggacaggcctagattctgaatctcactaccggcctgaattaccagcccctagaacggactggtctttatctgatgtggatcagtgggacacagccgctctggccgatggcatcaaatcattcttactggcactaccggcccctctggtgactcccgaagcctctgccgaggcgaggcgagcactccgtgaagcagcaggccccgtgggtcctgctcttgagcccccaactttgcccctgcacagggccctcacattgcgattcctcttacagcatctggggcgcgtcgcatccagggctcctgccctcggacctgcggtgcgggccttaggggcaacattcggtccactcctgctgcgagctcctcctcctcccagttctccgcctcccgggggggcaccagatggttcggaaccctctcctgacttcccagcactcctggtagagaagttactccaggaacacctagaggagcaggaggtggctccgcctgccctgccccctaagcccccaaaagccaagcctgcttccaccgtactggcaaacggtggatctcccccttcgctccaggatgcagagtggtactggggcgatattagcagagaagaggtgaatgaaaaactgcgcgataccccagatggaacatttctggtgcgcgatgcctcttcgaaaatccaaggggaatacacgctgacccttcgaaaggggggcaacaacaagctgataaaggtgttccaccgcgatggccattatggattttctgaaccattgactttctgttccgtggtagacttaattaaccactacagacatgaatccctggcacaatacaatgccaagctggacacgaggttgctttacccagtgtcaaaatatcagcaggaccagatcgtgaaagaggattcagtcgaggcggtaggtgcacagctcaaagtgtatcaccagcaataccaggataaaagccgggagtacgaccaattgtatgaagaatatactagaacaagccaggaactgcaaatgaaacgaaccgcaattgaagcatttaacgaaacaatcaagatcttcgaggagcagggccaaacccaggaaaagtgttccaaagaatatttggagcgattcagaagggaggggaatgaaaaagagatgcagcgaattctgctgaactctgagaggttgaaatccagaatcgccgagatccacgagtcccggactaagctggagcaacagctacgggctcaggcatccgacaacagagagattgacaagcgcatgaactcactcaagcctgatctcatgcagctgagaaaaatcagggaccagtacctagtgtggctcactcagaaaggagcgcgacagaaaaagataaacgagtggctggggattaagaatgagacagaagaccagtatgccttgatggaagatgaggacgacctgccccatcacgaagagcggacttggtacgtcggcaaaattaaccggacccaagcagaggagatgctctctggaaagcgcgatgggacattcctcatccgggaatcctcccagcggggatgttacgcctgtagcgtcgtggttgatggagataccaaacactgcgtgatctacagaaccgccacgggctttggatttgccgaaccctacaacctctacggcagcctgaaagaattagtcctgcactatcagcacgccagcttagtccagcacaatgacgctctgactgtgaccctggctcatcccgtgcgtgctcccgggcccggcccgcccccagctgctcgttag

SEQ ID NO: 152216 - DNA, 2187 bp, Artificial Sequence
  derived and/or modified sequence
atggcgggtcccgagggcttccaatatagagcactgtatccattcaggcgcgaacggcctgaggatctggagctgcttcccggtgatgttctggtcgtttcacgagccgctttacaggccctgggcgtggccgagggcggagagcggtgtccgcagagcgtgggatggatgccaggtctcaacgaacgcactcggcagaggggtgacttccccggaacatacgttgagttcttaggtcccgtggcgctcgccaggcctggtccgaggcctcgcggtcccaggcccttgcctgcacgacctagagacggcgcaccagagccaggcttgactcttcctgacctaccggagcagttttcacctcctgatgtggcacctcccctcctagtcaagctcgtcgaggcaatcgaacggaccggcttggatagcgagtctcattacagaccagagctaccggcaccgagaacagactggagcctgagcgacgtcgatcagtgggacacagctgctctggcagatggcataaaatcctttttgctggcccttccagcacccctggtcacacccgaagcctcggcagaagctcgtcgtgccctgagagaagcggcaggccctgtgggaccggctcttgaaccccctacactgcctttacatcgggcactgaccctccggttcttgctccagcacctcggtcgagttgccagtcgcgcacccgctctgggccctgccgtgagggccttaggtgccacattcggccctctgcttctccgggcacctccgccaccctcgagcccacccccaggcggagccccagatggatccgagcccagtccggattttcctgctctcttagtcgagaaactcctgcaagagcacctggaagaacaggaagtagccccaccagctctgccgcctaagcctccgaaggccaagcccgcatcgaccgtgctagctaacgggggttcgcctcccagcctgcaggatgctgagtggtactggggcgatatcagtcgagaggaggtgaatgaaaaactacgagatacacctgatggaacattccttgttagagacgcaagctctaaaatacagggagagtatacgctcaccctccgaaaggggggaaataacaaacttatcaaggtgtttcatcgggatggacattacggctttagcgagcctctcactttttgctctgttgtggatctgatcaatcattaccggcacgagtccctggcccagtataatgcaaagcttgatactcgcctgctgtaccccgtcagcaaataccagcaagaccagattgtcaaggaggacagcgttgaagccgtcggagcacagctcaaagtctatcatcaacagtatcaggacaaatcaagagaatacgatcagttgtacgaggagtacactagaacttcccaggaactccaaatgaagcggaccgccattgaagcttttaacgaaaccatcaagattttcgaggaacagggacaaactcaggaaaaatgtagcaaagagtacttggaaaggtttagacgggagggcaacgagaaagaaatgcagcggatcctgctgaactctgagagattgaaatcccgtatcgccgaaatacacgagtctcgaaccaagctggaacagcaactaagggctcaggcctcagacaaccgtgagatcgataagcggatgaacagcctgaagcccgaccttatgcaactccggaagataagagaccagtatctggtgtggcttacacaaaagggagctagacagaagaaaataaatgagtggctcggtatcaagaacgaaacagaagaccaatacgctcttatggaggacgaagatgacttgcctcatcacgaggagagaacctggtatgttggcaagatcaatagaacacaggccgaggagatgctctcaggcaagcgggatgggacgtttctgatccgggagagcagtcagcgcggatgctacgcatgctccgtcgtcgtggatggggacaccaagcactgtgtcatttacagaaccgcgactggtttcggattcgccgagccctacaacttatacggctccctgaaggagctggtgcttcactaccaacatgcctcgttggtgcagcacaacgacgctctgaccgtaactttagcacaccccgtacgggctccaggtccaggtcctcctccggctgcgagatag

SEQ ID NO: 152217 - DNA, 2187 bp, Artificial Sequence
  derived and/or modified sequence
atggccggccccgagggcttccagtacagagccctgtaccccttcagaagagagagacccgaggacctggagctgctgcccggcgacgtgctggtggtgagcagagccgccctgcaggccctgggcgtggccgagggcggcgagagatgcccccagagcgtgggctggatgcccggcctgaacgagagaaccagacagagaggcgacttccccggcacctacgtggagttcctgggccccgtggccctggccagacccggccccagacccagaggccccagacccctgcccgccagacccagagacggcgcccccgagcccggcctgaccctgcccgacctgcccgagcagttcagcccccccgacgtggccccccccctgctggtgaagctggtggaggccatcgagagaaccggcctggacagcgagagccactacagacccgagctgcccgcccccagaaccgactggagcctgagcgacgtggaccagtgggacaccgccgccctggccgacggcatcaagagcttcctgctggccctgcccgcccccctggtgacccccgaggccagcgccgaggccagaagagccctgagagaggccgccggccccgtgggccccgccctggagccccccaccctgcccctgcacagagccctgaccctgagattcctgctgcagcacctgggcagagtggccagcagagcccccgccctgggccccgccgtgagagccctgggcgccaccttcggccccctgctgctgagagccccccccccccccagcagccccccccccggcggcgcccccgacggcagcgagcccagccccgacttccccgccctgctggtggagaagctgctgcaggagcacctggaggagcaggaggtggccccccccgccctgccccccaagccccccaaggccaagcccgccagcaccgtgctggccaacggcggcagcccccccagcctgcaggacgccgagtggtactggggcgacatcagcagagaggaggtgaacgagaagctgagagacacccccgacggcaccttcctggtgagagacgccagcagcaagatccagggcgagtacaccctgaccctgagaaagggcggcaacaacaagctgatcaaggtgttccacagagacggccactacggcttcagcgagcccctgaccttctgcagcgtggtggacctgatcaaccactacagacacgagagcctggcccagtacaacgccaagctggacaccagactgctgtaccccgtgagcaagtaccagcaggaccagatcgtgaaggaggacagcgtggaggccgtgggcgcccagctgaaggtgtaccaccagcagtaccaggacaagagcagagagtacgaccagctgtacgaggagtacaccagaaccagccaggagctgcagatgaagagaaccgccatcgaggccttcaacgagaccatcaagatcttcgaggagcagggccagacccaggagaagtgcagcaaggagtacctggagagattcagaagagagggcaacgagaaggagatgcagagaatcctgctgaacagcgagagactgaagagcagaatcgccgagatccacgagagcagaaccaagctggagcagcagctgagagcccaggccagcgacaacagagagatcgacaagagaatgaacagcctgaagcccgacctgatgcagctgagaaagatcagagaccagtacctggtgtggctgacccagaagggcgccagacagaagaagatcaacgagtggctgggcatcaagaacgagaccgaggaccagtacgccctgatggaggacgaggacgacctgccccaccacgaggagagaacctggtacgtgggcaagatcaacagaacccaggccgaggagatgctgagcggcaagagagacggcaccttcctgatcagagagagcagccagagaggctgctacgcctgcagcgtggtggtggacggcgacaccaagcactgcgtgatctacagaaccgccaccggcttcggcttcgccgagccctacaacctgtacggcagcctgaaggagctggtgctgcactaccagcacgccagcctggtgcagcacaacgacgccctgaccgtgaccctggcccaccccgtgagagcccccggccccggccccccccccgccgccagatag

SEQ ID NO: 152218 - protein, 266 aa, Artificial Sequence
  derived and/or modified sequence
MHNILKKYHQYIVECHGITLLPQFLGMYRLNVDGVEIYVIVTRNVFSHRLSVYRKYDLKMANLKATFTFPKPTGSTVAREASDKEKAKELPTLKDNDFINEGQKIYIDDNNKKVFLEKLKKDVEFLAQLKLMDYSLLVGIHDVERAEQEEVECEENDGEEEGESDGTHPVGTPPDSPGNTLNSSPPLAPGEFDPNIDVYGIKCHENSPRKEVYFMAIIDILTHYDAKKKAAHAAKTVKHGAGAEISTVNPEQYSKRFLDFIGHILT

SEQ ID NO: 152219 - protein, 222 aa, Artificial Sequence
  derived and/or modified sequence
MWGVNHSINELSHVQIPVMLMPDDFKAYSKIKVDNHLFNKENMPSHFKFKEYCPMVFRNLRERFGIDDQDFQNSLTRSAPLPNDSQARSGARFHTSYDKRYIIKTITSEDVAEMHNILKKYHQYIVECHGITLLPQFLGMYRLNVDGVEIYVIVTRNVFSHRLSVYRKYDLKGSTVAREASDKEKSPTPAIVVLPVPHSAATSEKHCIDPMRVLLHFSSSNC

SEQ ID NO: 152220 - protein, 406 aa, Artificial Sequence
  derived and/or modified sequence
MATPGNLGSSVLASKTKTKKKHFVAQKVKLFRASDPLLSVLMWGVNHSINELSHVQIPVMLMPDDFKAYSKIKVDNHLFNKENMPSHFKFKEYCPMVFRNLRERFGIDDQDFQNSLTRSAPLPNDSQARSGARFHTSYDKRYIIKTITSEDVAEMHNILKKYHQYIVECHGITLLPQFLGMYRLNVDGVEIYVIVTRNVFSHRLSVYRKYDLKGSTVAREASDKEKAKELPTLKDNDFINEGQKIYIDDNNKKVFLEKLKKDVEFLAQLKLMDYSLLVGIHDVERAEQEEVECEENDGEEEGESDGTHPVGTPPDSPGNTLNSSPPLAPGEFDPNIDVYGIKCHENSPRKEVYFMAIIDILTHYDAKKKAAHAAKTVKHGAGAEISTVNPEQYSKRFLDFIGHILT

SEQ ID NO: 152221 - protein, 215 aa, Artificial Sequence
  derived and/or modified sequence
INELSHVQIPVMLMPDDFKAYSKIKVDNHLFNKENMPSHFKFKEYCPMVFRNLRERFGIDDQDFQNSLTRSAPLPNDSQARSGARFHTSYDKRYIIKTITSEDVAEMHNILKKYHQYIVECHGITLLPQFLGMYRLNVDGVEIYVIVTRNVFSHRLSVYRKYDLKGSTVAREASDKEKSPTPAIVVLPVPHSAATSEKHCIDPMRVLLHFSSSNC

SEQ ID NO: 152222 - protein, 75 aa, Artificial Sequence
  derived and/or modified sequence
INELSHVQIPVMLMPDDFKAYSKIKVDNHLFNKENMPSHFKFKEYCPMVFRNLRERFGIDDQDFQVSCVCNICFQ

SEQ ID NO: 152223 - protein, 347 aa, Artificial Sequence
  derived and/or modified sequence
MLMPDDFKAYSKIKVDNHLFNKENMPSHFKFKEYCPMVFRNLRERFGIDDQDFQNSLTRSAPLPNDSQARSGARFHTSYDKRYIIKTITSEDVAEMHNILKKYHQYIVECHGITLLPQFLGMYRLNVDGVEIYVIVTRNVFSHRLSVYRKYDLKGSTVAREASDKEKAKELPTLKDNDFINEGQKIYIDDNNKKVFLEKLKKDVEFLAQLKLMDYSLLVGIHDVERAEQEEVECEENDGEEEGESDGTHPVGTPPDSPGNTLNSSPPLAPGEFDPNIDVYGIKCHENSPRKEVYFMAIIDILTHYDAKKKAAHAAKTVKHGAGAEISTVNPEQYSKRFLDFIGHILT

SEQ ID NO: 152224 - DNA, 669 bp, Artificial Sequence
  derived and/or modified sequence
atgtggggcgtgaaccacagcatcaacgagctgagccacgtgcagatccccgtgatgctgatgcccgacgacttcaaggcctacagcaagatcaaggtggacaaccacctgttcaacaaggagaacatgcccagccacttcaagttcaaggagtactgccccatggtgttcagaaacctgagagagagattcggcatcgacgaccaggacttccagaacagcctgaccagaagcgcccccctgcccaacgacagccaggccagaagcggcgccagattccacaccagctacgacaagagatacatcatcaagaccatcaccagcgaggacgtggccgagatgcacaacatcctgaagaagtaccaccagtacatcgtggagtgccacggcatcaccctgctgccccagttcctgggcatgtacagactgaacgtggacggcgtggagatctacgtgatcgtgaccagaaacgtgttcagccacagactgagcgtgtacagaaagtacgacctgaagggcagcaccgtggccagagaggccagcgacaaggagaagagccccacccccgccatcgtggtgctgcccgtgccccacagcgccgccaccagcgagaagcactgcatcgaccccatgagagtgctgctgcacttcagcagcagcaactgctag

SEQ ID NO: 152225 - DNA, 1221 bp, Artificial Sequence
  derived and/or modified sequence
atggccacccccggcaacctgggcagcagcgtgctggccagcaagaccaagaccaagaagaagcacttcgtggcccagaaggtgaagctgttcagagccagcgaccccctgctgagcgtgctgatgtggggcgtgaaccacagcatcaacgagctgagccacgtgcagatccccgtgatgctgatgcccgacgacttcaaggcctacagcaagatcaaggtggacaaccacctgttcaacaaggagaacatgcccagccacttcaagttcaaggagtactgccccatggtgttcagaaacctgagagagagattcggcatcgacgaccaggacttccagaacagcctgaccagaagcgcccccctgcccaacgacagccaggccagaagcggcgccagattccacaccagctacgacaagagatacatcatcaagaccatcaccagcgaggacgtggccgagatgcacaacatcctgaagaagtaccaccagtacatcgtggagtgccacggcatcaccctgctgccccagttcctgggcatgtacagactgaacgtggacggcgtggagatctacgtgatcgtgaccagaaacgtgttcagccacagactgagcgtgtacagaaagtacgacctgaagggcagcaccgtggccagagaggccagcgacaaggagaaggccaaggagctgcccaccctgaaggacaacgacttcatcaacgagggccagaagatctacatcgacgacaacaacaagaaggtgttcctggagaagctgaagaaggacgtggagttcctggcccagctgaagctgatggactacagcctgctggtgggcatccacgacgtggagagagccgagcaggaggaggtggagtgcgaggagaacgacggcgaggaggagggcgagagcgacggcacccaccccgtgggcaccccccccgacagccccggcaacaccctgaacagcagcccccccctggcccccggcgagttcgaccccaacatcgacgtgtacggcatcaagtgccacgagaacagccccagaaaggaggtgtacttcatggccatcatcgacatcctgacccactacgacgccaagaagaaggccgcccacgccgccaagaccgtgaagcacggcgccggcgccgagatcagcaccgtgaaccccgagcagtacagcaagagattcctggacttcatcggccacatcctgacctag

SEQ ID NO: 152226 - DNA, 669 bp, Artificial Sequence
  derived and/or modified sequence
atgtggggcgtgaatcatagtattaacgaactatcccacgtgcaaatccctgttatgctgatgcccgatgactttaaggcctatagcaaaattaaggtagacaaccacctattcaacaaggagaacatgccctctcattttaagtttaaggaatactgcccaatggtatttagaaatctgcgggaacggtttggaatcgacgaccaggacttccagaacagcctcaccagatctgccccactccccaacgattctcaagcccgatccggcgctcggttccacactagttatgacaagcgatatatcataaaaacgatcacgagcgaagacgtagccgaaatgcataacattctgaaaaagtaccaccaatatattgtagaatgtcatggaataacactgctgcctcagtttttggggatgtataggttgaatgtggatggtgtggaaatctatgtgatcgtaacccggaacgtgttctcacaccgtctatccgtgtaccggaagtacgatttgaaaggtagcactgtggctcgcgaagcctcagataaagagaagtcccccacccccgctattgtagttttgcccgttccccatagcgccgccaccagtgaaaagcactgcatcgacccaatgcgtgtgctgctgcacttcagctcctccaattgttag

SEQ ID NO: 152227 - DNA, 1221 bp, Artificial Sequence
  derived and/or modified sequence
atggccacacccggaaatctggggagttcagtgctggcctccaaaaccaaaacaaagaagaaacacttcgtagcccagaaggtgaagctatttagggcttctgacccgctgctgagcgtcctgatgtggggggtgaatcactctatcaacgagctgtcacacgtccagatccctgtcatgttaatgcccgacgattttaaggcgtactctaagatcaaggtcgataatcacttattcaataaggagaacatgccttcccactttaaattcaaagagtattgcccaatggtctttcgcaatctccgggagaggttcggaatcgatgaccaggacttccaaaattcccttacacgttctgcccctctccctaatgatagccaggcccgttcaggagctcggttccatacatcgtacgataagagatacatcattaagactataacttcagaggatgtagccgaaatgcataatattctgaaaaaatatcaccaatacattgtcgaatgtcacggaatcaccctgctgccccagtttttgggaatgtaccgactcaacgttgacggcgtggaaatttatgttatcgtaacaaggaatgtgttttctcatcggctgtcagtgtatcggaaatatgacctgaagggatcaaccgttgcaagagaagctagcgacaaagagaaggctaaggagttgccaacactgaaagataatgactttattaacgagggacaaaagatttacattgacgacaacaacaagaaggtgtttctggagaaactgaaaaaagatgtggaatttctcgctcagttaaagctcatggactactccctcttagtggggatacacgacgtcgaacgcgcagagcaggaggaagtcgagtgcgaagaaaatgatggggaggaggaaggggaatcagacggaacacaccccgtgggcactccaccggactcaccaggtaataccctgaactctagcccaccgctggcacctggcgaattcgatcctaatatcgatgtgtacggtatcaaatgtcacgagaattctccccgcaaagaagtctacttcatggcaattattgacattcttacacactacgatgctaaaaagaaggccgcccacgccgcaaaaacagtgaagcacggagccggggcagaaataagcaccgttaaccctgagcagtacagcaaacgcttccttgatttcatcggtcatattctaacatag

SEQ ID NO: 152228 - DNA, 669 bp, Artificial Sequence
  derived and/or modified sequence
atgtggggcgtgaaccacagcatcaatgagctgagccacgtgcagatccctgtgatgctgatgccagatgacttcaaggcctacagcaagatcaaggtggacaaccacctgttcaacaaggagaacatgcccagccacttcaagttcaaggagtactgccccatggtgttcaggaacctgcgggagcgcttcggcattgatgaccaggacttccagaacagcctgaccaggtctgcccccctgcccaatgacagccaggcccggagcggggcccgcttccacaccagctatgacaagcgctacatcatcaagaccatcaccagtgaagatgtggccgagatgcacaacatcctgaagaagtaccaccagtacatcgtggagtgccacggcatcaccctgctgccccagttcctgggcatgtaccgcctgaatgtggatggagtggagatctacgtgattgtgaccagaaatgtgttcagccaccggctgtctgtgtacagaaaatatgacctgaagggcagcacagtggcccgggaggccagtgacaaggagaagagccccaccccagccatcgtggtgctgcctgtgccccacagcgctgccaccagcgagaagcactgcatcgaccccatgagggtgctgctgcacttcagcagcagcaactgctag

SEQ ID NO: 152229 - DNA, 1221 bp, Artificial Sequence
  derived and/or modified sequence
atggccaccccaggcaacctgggcagctctgtgctggccagcaagaccaagaccaagaagaagcactttgtggcccagaaggtgaagctgttccgggccagtgaccccctgctgtctgtgctgatgtggggcgtgaaccacagcatcaatgagctgagccacgtgcagatccctgtgatgctgatgccagatgacttcaaggcctacagcaagatcaaggtggacaaccacctgttcaacaaggagaacatgcccagccacttcaagttcaaggagtactgccccatggtgttcaggaacctgcgggagagatttggaattgatgaccaggacttccagaacagcctgaccaggtctgcccccctgcccaatgacagccaggcccggagcggggcccgcttccacaccagctatgacaagcgctacatcatcaagaccatcaccagtgaagatgtggccgagatgcacaacatcctgaagaagtaccaccagtacatcgtggagtgccacggcatcaccctgctgccccagttcctgggcatgtaccgcctgaatgtggatggagtggagatctacgtgattgtgaccagaaatgtgttcagccaccggctgtctgtgtacagaaaatatgacctgaagggcagcacagtggcccgggaggccagtgacaaggagaaggccaaggagctgcccaccctgaaggacaatgacttcatcaatgaaggccagaagatctacattgatgacaacaacaagaaggtgttcctggagaagctgaagaaggatgtggagttcctggcccagctgaagctgatggactacagcctgctggtgggcatccatgatgtggagcgggcagagcaggaggaggtggagtgtgaagaaaatgatggagaggaggagggggagagtgatggcacccaccctgtgggcaccccaccagacagccctggcaacaccctgaacagcagcccccccctggcccctggagaatttgaccccaacattgatgtgtatggcatcaagtgccacgagaacagccccaggaaggaggtgtacttcatggccatcatcgacatcctgacccactatgatgccaagaagaaggccgcccatgctgccaagacagtgaagcatggagctggagctgagatcagcacagtgaaccctgagcagtacagcaagcgcttcctggacttcatcggccacatcctgacctag

SEQ ID NO: 152230 - DNA, 669 bp, Artificial Sequence
  derived and/or modified sequence
atgtggggcgtgaaccacagcatcaacgagctgagccacgtgcagattccagtcatgctgatgccagacgactttaaggcctattccaagatcaaggttgataatcatctgttcaacaaggagaacatgccatctcacttcaaatttaaggaatactgcccaatggtctttcggaatctgagagaacgatttggcattgacgaccaggacttccagaattccttaactcggtctgccccactgcctaatgactcgcaggcacggagcggggctagattccacacctcatatgataagaggtatatcataaaaacgattacatctgaagatgttgcagaaatgcacaacattttaaaaaaatatcaccagtacatagtcgagtgtcatggaattacgttactgccccagttcctcggcatgtaccgattgaacgtggacggtgtggagatctacgtaattgtgactagaaacgtttttagtcaccggttgtcagtatatcgtaaatacgatcttaagggatcaacagtggcccgggaggctagcgacaaagaaaaaagtcccacccccgcgatcgtggtattgccagtccctcatagtgctgcaaccagcgagaaacattgcatcgacccaatgagggtcttgttacacttcagctccagtaattgctag

SEQ ID NO: 152231 - DNA, 1221 bp, Artificial Sequence
  derived and/or modified sequence
atggccacccccggcaacctgggcagcagcgtgctggccagcaagaccaaaaccaaaaaaaagcactttgtagctcagaaggtcaagctgtttcgggcaagtgaccctctcctgtcagttcttatgtggggggtcaaccattccattaatgaactgagtcacgtgcaaataccagtcatgctcatgcctgacgacttcaaggcatactccaaaattaaggtcgacaaccacctcttcaacaaagaaaacatgcccagccatttcaaatttaaagagtattgtcccatggtctttcgcaatctgcgagagaggtttggaatcgacgaccaggacttccaaaattcgctcactcgctcggctccgctgcctaacgatagtcaggccaggagtggggctcgctttcacacgtcttacgataagagatacatcattaagactatcacgtccgaagacgtagctgagatgcataatattctaaagaagtaccaccagtatattgtagagtgccacggcattactctgctgccacaatttctgggcatgtatcgcctaaacgtggatggagtcgagatatatgtcatcgtcacccggaacgtgtttagccaccgactctcagtctaccgcaaatacgacctgaaaggatccaccgtcgcccgcgaggcctcggacaaggagaaagcgaaggaactgcccactctgaaagataatgactttatcaatgagggtcagaagatatacattgatgataacaataagaaggtcttcttagagaagctgaagaaagacgtagaattcctggctcagttgaaactaatggattacagcctgctggtagggatccacgatgtggaaagagccgagcaggaagaggtggagtgcgaggagaatgatggggaggaagagggtgaaagcgatggcactcacccagtgggaacccccccagacagtcctggcaacaccctgaacagcagccccccgctagcccctggggagtttgatcctaacattgacgtttatggcatcaaatgtcacgagaactctccccgtaaggaggtatatttcatggccattatcgacatcctgacccactatgacgccaaaaagaaggccgctcacgccgctaaaactgttaaacatggcgccggtgcggaaattagtacagtgaaccccgaacaatactccaagagatttttagacttcattggacacattctcacatag

SEQ ID NO: 152232 - DNA, 1040 bp, Artificial Sequence
  derived and/or modified sequence
gcgggctgagcgcggatccgcggcgggcgcaggatacgggccggggcgcgagccgagcgcagtctgccgggccgagcgggcggagcgagccgagtggggctgagcgcgccggcggcggcgggcggagcggagcgcggcgcgccggggccgccgccggggggatgcggctgcctccccgggccggggtgtagagagggcgggtccccggcctcgggagcacggcggtggaggggacataggaggcggccatggcgacccccggcaacctagggtcctctgtcctggcgagcaagaccaagaccaagaagaagcacttcgtagcgcagaaagtgaagctgtttcgggccagcgacccgctgctcagcgtcctcatgtggggggtaaaccactcgatcaatgaactgagccatgttcaaatccctgttatgttgatgccagatgacttcaaagcctattcaaaaataaaggtggacaatcacctttttaacaaagaaaacatgccgagccatttcaagtttaaggaatactgcccgatggtcttccgtaacctgcgggagaggtttggaattgatgatcaagatttccagaattccctgaccaggagcgcacccctccccaacgactcccaggcccgcagtggagctcgttttcacacttcctacgacaaaagatacatcatcaagactattaccagtgaagacgtggccgaaatgcacaacatcctgaagaaataccaccagtacatagtggaatgtcatgggatcacccttcttccccagttcttgggcatgtaccggcttaatgttgatggagttgaaatatatgtgatagttacaagaaatgtattcagccaccgtttgtctgtgtataggaaatacgacttaaagggctctacagtggctagagaagctagtgacaaagaaaagtctcccacccctgctattgtggttcttcctgttccccattctgctgccaccagcgagaaacactgtattgacccgatgagagttctacttcatttctcttcatcaaattgttga

SEQ ID NO: 152233 - DNA, 3802 bp, Artificial Sequence
  derived and/or modified sequence
gcggcgggcgcaggatacgggccggggcgcgagccgagcgcagtctgccgggccgagcgggcggagcgagccgagtggggctgagcgcgccggcggcggcgggcggagcggagcgcggcgcgccggggccgccgccggggggatgcggctgcctccccgggccggggtgtagagagggcgggtccccggcctcgggagcacggcggtggaggggacataggaggcggccatggcgacccccggcaacctagggtcctctgtcctggcgagcaagaccaagaccaagaagaagcacttcgtagcgcagaaagtgaagctgtttcgggccagcgacccgctgctcagcgtcctcatgtggggggtaaaccactcgatcaatgaactgagccatgttcaaatccctgttatgttgatgccagatgacttcaaagcctattcaaaaataaaggtggacaatcacctttttaacaaagaaaacatgccgagccatttcaagtttaaggaatactgcccgatggtcttccgtaacctgcgggagaggtttggaattgatgatcaagatttccagaattccctgaccaggagcgcacccctccccaacgactcccaggcccgcagtggagctcgttttcacacttcctacgacaaaagatacatcatcaagactattaccagtgaagacgtggccgaaatgcacaacatcctgaagaaataccaccagtacatagtggaatgtcatgggatcacccttcttccccagttcttgggcatgtaccggcttaatgttgatggagttgaaatatatgtgatagttacaagaaatgtattcagccaccgtttgtctgtgtataggaaatacgacttaaagggctctacagtggctagagaagctagtgacaaagaaaaggccaaagaactgccaactctgaaagataatgatttcattaatgagggccaaaagatttatattgatgacaacaacaagaaggtcttcctggaaaaactaaaaaaggatgttgagtttctggcccagctgaagctcatggactacagtctgctggtgggaattcatgatgtggagagagccgaacaggaggaagtggagtgtgaggagaacgatggggaggaggagggcgagagcgatggcacccacccggtgggaacccccccagatagccccgggaatacactgaacagctcaccacccctggctcccggggagttcgatccgaacatcgacgtctatggaattaagtgccatgaaaactcgcctaggaaggaggtgtacttcatggcaattattgacatccttactcattatgatgcaaaaaagaaagctgcccatgctgcaaaaactgttaaacatggcgctggcgcggagatctccaccgtgaacccagaacagtattcaaagcgctttttggactttattggccacatcttgacgtaacctcctgcgcagcctcggacagacatgaacattggatggacagaggtggcttcggtgtaggaaaaatgaaaaccaaactcagtgaagtactcatcttgcaggaagcaaacctccttgtttacatcttcaggccaagatgactgatttgggggctactcgctttacagctacctgattttcccagcatcgttctagctatttctgactttgtgtatatgtgtgtgtgtgtgtgttgggggggggtgagtgtgtgcgcgcgtgtgcattttaaaagtcataaattaattaaaacagatccacttcggtcagtatgtgtcccaacaaagaccctttgattccagctatggccgaatgaatgagtgagtgagtgagtgagtgaatgaacacacgtgtgggggaggggagaaggaagtgcatgatgtcaggcaccgtgttggcatcacacaacaaactgtggatcagttttttttttttttttttttttttggagttgaaagatgtgagacagtattcagaataatgaagataataatgatgattattataataatgatgatgattccaaggaaaaaacctacagcgaatgttccatttctaccccgcacgcagacactctccctaacactgataacctgagcccccagcactggacggaagaatgctggcgtctccgtgtgtactggttcagggttctggccccagccttgtcaggaccccctggtgtccagagcccccacccctcccgcaacaagcagctgatgccccagtgattctctatacatttttcacctcggccaatatgtccaggaaaactgcttacttctcttttcttgcctggagccttcattgttcacccttacgttgcaatataggaattaatgctacaaaataaaagtaaagcttacctgaaaagtgcatagtttggggcaatggtatctacatctcccactgtgggaaaaccagcaaagcatcaaaactctcaattctcctgttaccaaatgcagatctgaattataagatgtttatgtttgaccattgtttcaacaatgggattttgttacgaattatccctttaactgaaaccctcagttttactgtttacattattaggaaaacagggatatcttttgaatctaaaaatttgatgtacagcatgtgatttttgaagtttacatgtaaagtcacagtataggtgaaataacgtttgtcatattttgagacgtatcctgcagccatgtttttacgtgagtgttttagtcaaagtacatggtagacagtctttcacaataaaaggaaaaggatttttttttcctccaaatgtacatttatcaacctaatgattgatttttttaaaaagagatttcgccccagtctggtttatgaaagttcattgccctaaactgtgctgattgtttttaatcaagttataaatttccaacctagatcatgtatctaccaactctcctgcattttccaaaaggcattgagcttaaatattagtcttgcttagagtaggttatccacttacatgctgcgctaaagccatgcctttgaaactccttgtttaaaacatgatatgatttttgtgggcagtttcagaaaagaaaacaaacaaacaaaaatcgaccctttaattattacttgcaactcaacagatctccctgccgtactgccttttccaggaactttacttcagggctgtccagattgcagctgtgccccgtgtatgtggatctagttcacagagtctttggaagccagcagtcgtgccctccgtatactgtccactcattttatgtagatttggtatcctcagcagccagtgttaacaccactgtcacgtagtgtacagattcatcttttatgtatttaaagtaatccatactatgatttggtttttccctgcaccattaattctggcatcagatcagtttttgtgttgtgaagttctactgtggtttgacccaagaccacaaccatgagaccctgaagtaaagataaggtacacatacattatttgagtaactgtttccttgggggccaatctgtgtatgcttttagaagtttacagaatgcttttatttttgtctataacaaacagtctgtcatttatttctgttgataaaccatttggacagagtgaggacgtttgccctgttatctcctagtgctaacaatacactccagtcatgagccgggctttacaaataaagcacttttgatgactcacaagatgaatccttttttcctctgtcccaattgtgtgtctctgttccaaacacattttaaatactcggtcctgacagtgtctttagctaatccttgaagaaatgaaagtggaattgaatcttt

SEQ ID NO: 152234 - DNA, 669 bp, Artificial Sequence
  derived and/or modified sequence
atgtggggcgtaaaccacagtatcaacgaattgtcacatgtccagattccagttatgcttatgcccgacgactttaaagcctatagcaaaatcaaggtggacaaccacctgttcaacaaagaaaatatgcccagccattttaagttcaaggagtactgccctatggtattcaggaatctgcgggaaagatttggcattgacgaccaggattttcaaaactcactgacccgatcagcgcctctgcccaatgacagtcaggccaggtccggagctaggtttcacacctcttatgacaagaggtatatcataaagacgattacatctgaggatgtggccgagatgcataacattctcaagaagtaccatcaatacatagtggagtgtcacggtatcacgctgctgccccaattcctgggcatgtatagactgaacgtggacggggtggaaatttatgttatagtaaccagaaacgtgttcagccacaggctgagcgtgtaccggaagtatgaccttaagggatctacagttgcgagggaagccagtgataaagagaagtcacccacacctgccattgttgtactccccgtcccccatagtgcagcgacgtcagaaaaacattgcatcgaccctatgagggtgctgctgcatttctccagctctaattgctag

SEQ ID NO: 152235 - DNA, 1221 bp, Artificial Sequence
  derived and/or modified sequence
atggcgacccccggtaacctgggcagcagcgtgcttgctagcaaaaccaagaccaaaaaaaaacacttcgtggcacagaaggttaagctgttccgagcctcggacccgcttttgtctgttctcatgtggggcgtgaatcattctattaatgagctctcacatgttcagatacctgtcatgctaatgccagatgatttcaaggcctatagtaagatcaaagtagataaccatctgttcaacaaggagaatatgcctagccatttcaagttcaaggaatattgcccaatggtgtttcgcaatctccgtgaacgcttcggaattgacgaccaggatttccagaactcgctgacccgcagtgccccactccctaatgattctcaggctaggtccggagccaggtttcacactagctacgacaaacgctatatcataaagaccataacctcagaggatgtggctgagatgcataatattttaaagaaataccatcagtatatcgttgagtgccacggcatcacgctgctaccacagtttctcggcatgtacagactaaatgtggacggtgtcgagatctacgtgatcgttacccgcaatgtgttcagccaccgcctctcagtctatcggaaatacgacttgaagggttcaacagtggccagggaagcctcggataaagaaaaagccaaagagttgcctaccttgaaggataacgactttattaacgaggggcaaaaaatttatattgatgacaacaacaagaaggttttcctggagaagctgaaaaaagacgtggaatttctggctcagctgaagcttatggattattccctgttggtgggaattcatgatgtggaaagggctgaacaggaggaagtcgagtgcgaagaaaatgatggtgaagaggagggggaatcggacggaacgcaccctgtcggtactccgcctgatagtcccggtaacacccttaattccagtccacccctagcccctggcgagttcgaccctaacattgacgtctatgggatcaagtgccacgaaaactcacccaggaaagaggtttacttcatggccatcattgacattttaacacattacgatgcaaagaagaaagccgcacacgcagccaaaacagttaaacacggcgctggggcagaaatctcaaccgtgaaccctgagcagtactcaaagaggtttcttgattttattggtcacatcttaacgtag

SEQ ID NO: 152236 - DNA, 909 bp, Artificial Sequence
  derived and/or modified sequence
atggaattcggcctgctctccgaggccgaggccagaagcccagcacttagcttgagcgatgccggaactcctcacccacagttgccagaacatggctgcaaagggcaggagcattcagacagcgagaaagcatcagcctccctgcccggtggatctcctgaggatgggtctttaaagaaaaagcagcggcgacagcgtacccacttcacatctcagcagctccaggagttggaggctacttttcagagaaatcgctaccccgacatgtcaacccgtgaggagattgctgtctggacaaatctgactgaagctagggtcagggtgtggtttaagaacaggcgcgcgaagtggagaaaacgtgaacgatcccagcaagctgagctttgcaaaggcagtttcgctgctccactcggaggccttgtcccaccatacgaggaagtctatccaggctacagctatgggaactggcctcccaaagcgcttgcccccccattagccgcaaagaccttccccttcgctttcaacagtgtcaatgttggtcctctggccagccagcccgtcttttcccctcctagtagtatcgctgcttccatggttccaagtgcagctgccgctcctggaacagttcccggacctggggccctccagggcctcggggggggcccaccagggttggcacccgccgccgtatcttctggggccgtctcctgcccgtacgcatccgcagccgcagcagccgccgctgctgcttcctctccatatgtgtatcgggacccctgcaactcgtccctggcgagtttgaggctcaaggcaaagcagcatgcctcattcagctatcctgctgtacacggaccccctcctgctgctaatctttccccgtgccagtatgccgtggagcgccccgtgtag

SEQ ID NO: 152237 - DNA, 909 bp, Artificial Sequence
  derived and/or modified sequence
atggagttcgggctcctcagtgaggcagaggcaagaagccccgctctgtctctctctgacgctggaactcctcatccccagcttcctgaacatggctgcaagggccaggaacactccgactctgaaaaggcctccgcgtctctcccggggggctccccagaagatggatcccttaaaaaaaagcagcggcgacagcggacccacttcacttctcagcagctccaggaacttgaggctaccttccagagaaataggtatccagacatgtctacgagagaggagatcgccgtttggaccaatctaacagaagcccgcgtgcgcgtgtggtttaagaatcgcagagccaagtggaggaaacgcgaaaggtcacagcaggcagaactatgtaaaggatccttcgccgcccctcttggcggcctggttccgccttacgaagaggtttatcccggttacagttatggcaactggccccccaaggcactggcccccccactagcggcaaaaaccttcccctttgcattcaatagtgtgaacgtgggacctctggcatcgcagccagttttcagtcctcctagtagtattgctgcatctatggttccttcagcagccgccgcacccggaactgtgcccggtcctggcgctctgcagggacttggtggtgggccacccggcctggctcctgccgccgtcagctctggtgctgtatcttgcccttacgccagtgcagccgctgctgcagccgcagctgcctccagtccctacgtgtaccgcgacccttgtaactcttctctggcctccctaagactgaaggctaagcaacacgctagcttcagctaccccgcagtgcacggcccccctccggcagccaacctctccccgtgccagtacgctgttgagaggcctgtgtag

SEQ ID NO: 152238 - DNA, 909 bp, Artificial Sequence
  derived and/or modified sequence
atggagtttggcctgctgtctgaggccgaggcccggagccctgccctgagcctgagtgatgctggcaccccccacccccagctgcctgagcacggctgcaagggccaggagcacagcgacagcgagaaggccagcgccagcctgcccggcggcagcccagaagatggcagcctgaagaagaagcagaggcggcagaggacccacttcaccagccagcagctgcaggagctggaggccaccttccagaggaaccgctacccagacatgagcacccgggaggagattgctgtgtggaccaacctgacagaggcccgggtgcgggtgtggttcaagaacagaagagccaagtggaggaagcgggagaggagccagcaggccgagctgtgcaagggcagctttgctgcccccctgggcggcctggtgcccccctatgaggaggtgtacccaggctacagctatggcaactggccacccaaggccctggccccacccctggccgccaagaccttcccctttgccttcaacagcgtgaatgtgggccccctggccagccagcccgtcttcagcccccccagcagcattgctgcctccatggtgcccagcgctgctgctgcccctggcaccgtgcccggccctggggccctgcagggcctgggcggcggccccccaggcctggccccagctgctgtgagcagcggggctgtgtcctgcccctatgccagcgctgctgctgctgctgctgctgctgccagcagcccctacgtgtacagagacccctgcaacagcagcctggccagcctgcggctgaaggccaagcagcacgccagcttctcctacccagctgtgcacggccccccacctgctgccaacctgagcccctgccagtatgctgtggagaggcctgtgtag

SEQ ID NO: 152239 - DNA, 909 bp, Artificial Sequence
  derived and/or modified sequence
atggagttcggcctgctgagcgaggccgaggcccggagccccgccctgtccttgagcgacgccggcacaccacatccacagcttccagagcatgggtgcaagggtcaggagcacagcgactccgagaaggccagcgcatcattacccgggggttctcccgaggacgggagtttgaaaaaaaaacagcgtagacagagaacacatttcacaagtcagcaactccaggagttggaagccacttttcagagaaataggtaccccgatatgagcacgcgggaggagatcgcagtgtggactaatctgacggaggccagggtgcgggtgtggttcaaaaaccggagagccaaatggagaaaacgtgagcggtcacaacaggctgagttgtgcaagggaagttttgccgcacctttaggaggtctcgtccccccttacgaggaggtatatccaggttattcatacggtaactggccgccgaaggcccttgcccctccactggctgctaaaacgttcccattcgcctttaattccgtgaatgtcgggcctctggcctcacaaccggtgttttctcctccatcgtcgattgccgctagtatggtgcccagtgcggcggccgcccctggaaccgtaccaggtcccggcgcccttcagggcttaggcggcggcccaccggggctggctccagcggcagtgagctcaggtgctgtgagctgtccctacgcctcagctgccgccgctgccgctgcggccgcaagttccccttatgtttaccgcgatccctgcaattctagtctggcctctttgcgcctgaaggcgaagcagcatgccagttttagctatccagccgtccacggccccccccccgccgcgaatctatctccatgtcagtatgcagttgagcggcctgtgtag

SEQ ID NO: 152240 - DNA, 909 bp, Artificial Sequence
  derived and/or modified sequence
atggagttcggcctgctgagcgaggccgaggcccggagccccgccctaagcctttctgacgctggaaccccccatccacagcttcctgaacacggctgcaaagggcaggaacactctgattctgaaaaggccagtgcatctttgcctggcgggagcccagaagatggtagtctgaagaaaaagcaacgccgacagcgcacgcattttacatcacagcaactgcaggagctggaggcaacttttcaacgcaaccgctacccagacatgtcgactagggaggaaatagctgtgtggaccaacctcaccgaagccagggtcagggtgtggttcaagaatcgcagagcaaagtggcgtaagcgggagcgatctcagcaagcagaactgtgcaaggggagttttgcagcccccttaggaggactggtgcctccatacgaggaggtgtacccaggctattcctatggtaactggcctccaaaagcactcgctccccccctggccgccaaaacattcccgttcgccttcaacagtgtgaatgtgggccccctagctagccagccagtgttctcacccccctcatctatcgcagcttccatggttccatcagcggccgcggccccaggcactgttccgggcccaggagcactgcagggtcttggcggggggccaccaggcctagcccctgcagcggtcagttctggggcggtgtcttgtccatacgcatctgcggcagctgccgctgccgccgctgcctcctcaccgtacgtgtacagagacccctgcaatagcagcctcgccagtctccgtctgaaagccaagcagcatgcttctttctcctaccccgccgtgcacggcccacctcctgctgctaacctttcaccatgccaatatgctgttgaacgacctgtctag

SEQ ID NO: 152241 - DNA, 909 bp, Artificial Sequence
  derived and/or modified sequence
atggagtttgggctacttagcgaggcggaagctcgttctccagcgctatcgctgtctgatgccggtactcctcacccgcagctccctgagcacggttgcaagggtcaggaacatagcgattccgagaaagccagcgcaagccttccaggcggatctcctgaagatggaagtctcaaaaagaagcagcggaggcaacgcacacattttacaagccaacagctgcaggagcttgaggcgactttccagaggaaccggtatcctgacatgtccactagggaggagattgcagtctggacaaatctgaccgaggcccgtgtgcgggtgtggttcaagaacaggcgcgctaaatggcgcaaacgcgagagatcgcagcaggccgaactgtgtaaggggtccttcgcagcccctctcggaggtttggtacccccatacgaggaagtttacccagggtacagctacgggaactggccacctaaggccctggcaccacccctcgctgcgaaaacttttccgttcgcttttaactcagtcaatgttggacccttggcttctcagccagtcttcagcccaccttcctctatcgcggcaagcatggtacctagtgcggctgcggcaccagggaccgtaccaggtcccggtgcgctgcaggggcttgggggtggcccaccaggtctcgcccctgctgcagtcagctctggagccgtgagttgtccatacgcctctgccgctgcggctgcagctgccgctgcttcgtcaccatacgtgtacagggatccttgcaattcatccctcgcatcactgagacttaaagccaagcaacacgcttccttctcgtatccagctgtgcacggtcctccccctgctgcaaacctgagcccctgccaatatgccgtagagaggcctgtctag

SEQ ID NO: 152242 - DNA, 909 bp, Artificial Sequence
  derived and/or modified sequence
atggagtttggacttttatctgaagcggaggccagatcccccgctttatcactgtcagacgccggaacccctcatcctcagctacccgagcacggttgcaagggccaagagcacagcgactcagagaaagcctctgctagcttgcccggtgggagccccgaggatgggtccctaaaaaagaagcagcgacggcaacgaactcactttacttctcagcagctccaggagctcgaggctacatttcaaaggaaccgctaccccgatatgtctactcgtgaggaaattgcggtatggacaaacttgacagaggcacgggttagggtctggttcaagaaccggagagccaagtggcgcaagagggagagatcccaacaagcagagctgtgcaaaggatctttcgcagctccccttggcggtctggtgcctccctacgaggaggtgtatccaggatacagctacggaaactggccacctaaggccctcgcaccacccctcgcggcaaagaccttccccttcgcgtttaactccgtgaatgtggggcctctcgcgtctcagccggtattcagccccccatccagcattgccgcttccatggttccaagcgcagcggctgcccctggaaccgtgcctggcccaggtgcattacaaggactaggaggtggaccaccgggactggcaccagccgctgtctcctccggcgctgtgtcatgcccatacgctagtgccgctgccgctgccgcagccgctgcttcttcaccttacgtttacagagatccatgtaactccagcctggcttcgctgagactgaaagccaagcagcacgcctctttttcctatccggctgtgcatggccctccccctgcagcaaacctcagtccttgtcagtatgctgtagagagacccgtgtag

SEQ ID NO: 152243 - DNA, 909 bp, Artificial Sequence
  derived and/or modified sequence
atggagttcggcctgctgagcgaggccgaggccagaagccccgccctgagcctgagcgacgccggcaccccccacccccagctgcccgagcacggctgcaagggccaggagcacagcgacagcgagaaggccagcgccagcctgcccggcggcagccccgaggacggcagcctgaagaagaagcagagaagacagagaacccacttcaccagccagcagctgcaggagctggaggccaccttccagagaaacagataccccgacatgagcaccagagaggagatcgccgtgtggaccaacctgaccgaggccagagtgagagtgtggttcaagaacagaagagccaagtggagaaagagagagagaagccagcaggccgagctgtgcaagggcagcttcgccgcccccctgggcggcctggtgcccccctacgaggaggtgtaccccggctacagctacggcaactggccccccaaggccctggccccccccctggccgccaagaccttccccttcgccttcaacagcgtgaacgtgggccccctggccagccagcccgtgttcagcccccccagcagcatcgccgccagcatggtgcccagcgccgccgccgcccccggcaccgtgcccggccccggcgccctgcagggcctgggcggcggcccccccggcctggcccccgccgccgtgagcagcggcgccgtgagctgcccctacgccagcgccgccgccgccgccgccgccgccgccagcagcccctacgtgtacagagacccctgcaacagcagcctggccagcctgagactgaaggccaagcagcacgccagcttcagctaccccgccgtgcacggccccccccccgccgccaacctgagcccctgccagtacgccgtggagagacccgtgtag

SEQ ID NO: 152244 - protein, 603 aa, Artificial Sequence
  derived and/or modified sequence
MSAAVTAGKLARAPADPGKAGVPGVAAPGAPAAAPPAKEIPEVLVDPRSRRRYVRGRFLGKGGFAKCFEISDADTKEVFAGKIVPKSLLLKPHQREKMSMEISIHRSLAHQHVVGFHGFFEDNDFVFVVLELCRRRSLLELHKRRKALTEPEARYYLRQIVLGCQYLHRNRVIHRDLKLGNLFLNEDLEVKIGDFGLATKVEYDGERKKTLCGTPNYIAPEVLSKKGHSFEVDVWSIGCIMYTLLVGKPPFETSCLKETYLRIKKNEYSIPKHINPVAASLIQKMLQTDPTARPTINELLNDEFFTSGYIPARLPITCLTIPPRFSIAPSSLDPSNRKPLTVLNKGLENPLPERPREKEEPVVRETGEVVDCHLSDMLQQLHSVNASKPSERGLVRQEEAEDPACIPIFWVSKWVDYSDKYGLGYQLCDNSVGVLFNDSTRLILYNDGDSLQYIERDGTESYLTVSSHPNSLMKKITLLKYFRNYMSEHLLKAGANITPREGDELARLPYLRTWFRTRSAIILHLSNGSVQINFFQDHTKLILCPLMAAVTYIDEKRDFRTYRLSLLEEYGCCKELASRLRYARTMVDKLLSSRSASNRLKAS

SEQ ID NO: 152245 - protein, 247 aa, Artificial Sequence
  derived and/or modified sequence
MSAAVTAGKLARAPADPGKAGVPGVAAPGAPAAAPPAKEIPEVLVDPRSRRRYVRGRFLGKGGFAKCFEISDADTKEVFAGKIVPKSLLLKPHQREKMSMEISIHRSLAHQHVVGFHGFFEDNDFVFVVLELCRRRSLLELHKRRKALTEPEARYYLRQIVLGCQYLHRNRVIHRDLKLGNLFLNEDLEVKIGDFGLATKVEYDGERKKTLCGTPNYIAPAVPCLQCAPQPRWLGRAASSLQVGVAV

SEQ ID NO: 152246 - protein, 506 aa, Artificial Sequence
  derived and/or modified sequence
MSMEISIHRSLAHQHVVGFHGFFEDNDFVFVVLELCRRRSLLELHKRRKALTEPEARYYLRQIVLGCQYLHRNRVIHRDLKLGNLFLNEDLEVKIGDFGLATKVEYDGERKKTLCGTPNYIAPEVLSKKGHSFEVDVWSIGCIMYTLLVGKPPFETSCLKETYLRIKKNEYSIPKHINPVAASLIQKMLQTDPTARPTINELLNDEFFTSGYIPARLPITCLTIPPRFSIAPSSLDPSNRKPLTVLNKGLENPLPERPREKEEPVVRETGEVVDCHLSDMLQQLHSVNASKPSERGLVRQEEAEDPACIPIFWVSKWVDYSDKYGLGYQLCDNSVGVLFNDSTRLILYNDGDSLQYIERDGTESYLTVSSHPNSLMKKITLLKYFRNYMSEHLLKAGANITPREGDELARLPYLRTWFRTRSAIILHLSNGSVQINFFQDHTKLILCPLMAAVTYIDEKRDFRTYRLSLLEEYGCCKELASRLRYARTMVDKLLSSRSASNRLKAS

SEQ ID NO: 152247 - DNA, 1812 bp, Artificial Sequence
  derived and/or modified sequence
atgagcgccgccgtgaccgccggcaagctggccagagcccccgccgaccccggcaaggccggcgtgcccggcgtggccgcccccggcgcccccgccgccgccccccccgccaaggagatccccgaggtgctggtggaccccagaagcagaagaagatacgtgagaggcagattcctgggcaagggcggcttcgccaagtgcttcgagatcagcgacgccgacaccaaggaggtgttcgccggcaagatcgtgcccaagagcctgctgctgaagccccaccagagagagaagatgagcatggagatcagcatccacagaagcctggcccaccagcacgtggtgggcttccacggcttcttcgaggacaacgacttcgtgttcgtggtgctggagctgtgcagaagaagaagcctgctggagctgcacaagagaagaaaggccctgaccgagcccgaggccagatactacctgagacagatcgtgctgggctgccagtacctgcacagaaacagagtgatccacagagacctgaagctgggcaacctgttcctgaacgaggacctggaggtgaagatcggcgacttcggcctggccaccaaggtggagtacgacggcgagagaaagaagaccctgtgcggcacccccaactacatcgcccccgaggtgctgagcaagaagggccacagcttcgaggtggacgtgtggagcatcggctgcatcatgtacaccctgctggtgggcaagccccccttcgagaccagctgcctgaaggagacctacctgagaatcaagaagaacgagtacagcatccccaagcacatcaaccccgtggccgccagcctgatccagaagatgctgcagaccgaccccaccgccagacccaccatcaacgagctgctgaacgacgagttcttcaccagcggctacatccccgccagactgcccatcacctgcctgaccatcccccccagattcagcatcgcccccagcagcctggaccccagcaacagaaagcccctgaccgtgctgaacaagggcctggagaaccccctgcccgagagacccagagagaaggaggagcccgtggtgagagagaccggcgaggtggtggactgccacctgagcgacatgctgcagcagctgcacagcgtgaacgccagcaagcccagcgagagaggcctggtgagacaggaggaggccgaggaccccgcctgcatccccatcttctgggtgagcaagtgggtggactacagcgacaagtacggcctgggctaccagctgtgcgacaacagcgtgggcgtgctgttcaacgacagcaccagactgatcctgtacaacgacggcgacagcctgcagtacatcgagagagacggcaccgagagctacctgaccgtgagcagccaccccaacagcctgatgaagaagatcaccctgctgaagtacttcagaaactacatgagcgagcacctgctgaaggccggcgccaacatcacccccagagagggcgacgagctggccagactgccctacctgagaacctggttcagaaccagaagcgccatcatcctgcacctgagcaacggcagcgtgcagatcaacttcttccaggaccacaccaagctgatcctgtgccccctgatggccgccgtgacctacatcgacgagaagagagacttcagaacctacagactgagcctgctggaggagtacggctgctgcaaggagctggccagcagactgagatacgccagaaccatggtggacaagctgctgagcagcagaagcgccagcaacagactgaaggccagctag

SEQ ID NO: 152248 - DNA, 744 bp, Artificial Sequence
  derived and/or modified sequence
atgagcgccgccgtgaccgccggcaagctggccagagcccccgccgaccccggcaaggccggcgtgcccggcgtggccgcccccggcgcccccgccgccgccccccccgccaaggagatccccgaggtgctggtggaccccagaagcagaagaagatacgtgagaggcagattcctgggcaagggcggcttcgccaagtgcttcgagatcagcgacgccgacaccaaggaggtgttcgccggcaagatcgtgcccaagagcctgctgctgaagccccaccagagagagaagatgagcatggagatcagcatccacagaagcctggcccaccagcacgtggtgggcttccacggcttcttcgaggacaacgacttcgtgttcgtggtgctggagctgtgcagaagaagaagcctgctggagctgcacaagagaagaaaggccctgaccgagcccgaggccagatactacctgagacagatcgtgctgggctgccagtacctgcacagaaacagagtgatccacagagacctgaagctgggcaacctgttcctgaacgaggacctggaggtgaagatcggcgacttcggcctggccaccaaggtggagtacgacggcgagagaaagaagaccctgtgcggcacccccaactacatcgcccccgccgtgccctgcctgcagtgcgccccccagcccagatggctgggcagagccgccagcagcctgcaggtgggcgtggccgtgtag

SEQ ID NO: 152249 - DNA, 1521 bp, Artificial Sequence
  derived and/or modified sequence
atgagcatggagatcagcatccacagaagcctggcccaccagcacgtggtgggcttccacggcttcttcgaggacaacgacttcgtgttcgtggtgctggagctgtgcagaagaagaagcctgctggagctgcacaagagaagaaaggccctgaccgagcccgaggccagatactacctgagacagatcgtgctgggctgccagtacctgcacagaaacagagtgatccacagagacctgaagctgggcaacctgttcctgaacgaggacctggaggtgaagatcggcgacttcggcctggccaccaaggtggagtacgacggcgagagaaagaagaccctgtgcggcacccccaactacatcgcccccgaggtgctgagcaagaagggccacagcttcgaggtggacgtgtggagcatcggctgcatcatgtacaccctgctggtgggcaagccccccttcgagaccagctgcctgaaggagacctacctgagaatcaagaagaacgagtacagcatccccaagcacatcaaccccgtggccgccagcctgatccagaagatgctgcagaccgaccccaccgccagacccaccatcaacgagctgctgaacgacgagttcttcaccagcggctacatccccgccagactgcccatcacctgcctgaccatcccccccagattcagcatcgcccccagcagcctggaccccagcaacagaaagcccctgaccgtgctgaacaagggcctggagaaccccctgcccgagagacccagagagaaggaggagcccgtggtgagagagaccggcgaggtggtggactgccacctgagcgacatgctgcagcagctgcacagcgtgaacgccagcaagcccagcgagagaggcctggtgagacaggaggaggccgaggaccccgcctgcatccccatcttctgggtgagcaagtgggtggactacagcgacaagtacggcctgggctaccagctgtgcgacaacagcgtgggcgtgctgttcaacgacagcaccagactgatcctgtacaacgacggcgacagcctgcagtacatcgagagagacggcaccgagagctacctgaccgtgagcagccaccccaacagcctgatgaagaagatcaccctgctgaagtacttcagaaactacatgagcgagcacctgctgaaggccggcgccaacatcacccccagagagggcgacgagctggccagactgccctacctgagaacctggttcagaaccagaagcgccatcatcctgcacctgagcaacggcagcgtgcagatcaacttcttccaggaccacaccaagctgatcctgtgccccctgatggccgccgtgacctacatcgacgagaagagagacttcagaacctacagactgagcctgctggaggagtacggctgctgcaaggagctggccagcagactgagatacgccagaaccatggtggacaagctgctgagcagcagaagcgccagcaacagactgaaggccagctag

SEQ ID NO: 152250 - DNA, 1812 bp, Artificial Sequence
  derived and/or modified sequence
atgtccgccgcggtaaccgcaggcaaattagcccgggcaccagcagaccccggaaaggctggagtgcctggcgttgccgctccgggagcaccggcagcagcaccccctgccaaagagatccctgaagtcttagtagacccgcgatcccgccgaagatacgtccgtggacgatttttgggcaaagggggatttgctaagtgtttcgaaatcagcgatgccgacacgaaagaagtgtttgccggcaaaatcgttcccaagtctctcctgctgaaaccccaccagcgggaaaagatgtccatggagatttcaattcataggtccctggctcatcagcatgtggtgggcttccacgggttctttgaagataacgatttcgtcttcgtagtgttggagctgtgtagaaggcgttccctcctggagctgcacaaaagaagaaaagcacttactgaaccagaagctcgctattatttgagacagatcgtcctgggctgtcagtacctgcatcggaatagagttatccatcgggacctgaagttgggcaatctgttccttaatgaggatctggaagtcaaaattggcgacttcggactggccacgaaggtggaatacgatggcgaacgaaagaagaccctgtgcggtacccctaattatatcgctcctgaggtcctgtctaagaaggggcacagtttcgaagtggacgtgtggagcatcgggtgcatcatgtacacgctcctggtcggcaagccgccgtttgagacaagttgtttaaaggagacgtacctgcgaatcaagaagaacgagtactccattccaaagcatattaacccggtagcagcatctctgatacagaagatgctgcaaaccgatcctacagcaagacccactattaatgaacttttgaacgatgaattctttacatccggctatatccccgcaaggctccctattacctgtttgactatccccccccgttttagcatagctccttcatccctcgaccctagtaataggaaacctctcacagtgctgaacaaaggattggagaaccccctccctgagagaccacgcgaaaaagaggaaccagtggtcagggagacaggtgaagttgtcgactgtcatctaagtgacatgctgcaacagcttcacagcgtaaacgcttccaaaccgagtgagcgggggttggtgcggcaagaggaggctgaagatccagcttgcatcccgattttctgggtgtcaaagtgggtggactattccgacaagtatggcttaggctaccaactatgcgataactctgtgggcgtactcttcaatgacagcacccgcctgatcctttataatgacggcgattctctccagtacatcgagagagacggcacggagagctatttgaccgtttcttcacatccgaactccttaatgaagaaaatcaccctccttaagtacttccgcaattacatgagtgaacacttgctgaaagcaggagctaatatcactccccgggagggcgacgaactggcgcggttgccttacctgcgaacttggtttcgtactcggagcgcaatcatcctgcatctgtccaatggatccgtccagattaatttttttcaggatcacactaaactcatattgtgccctcttatggcagcagttacctacatcgacgaaaaacgcgatttccgtacatacaggctatctcttctggaggagtatggatgttgcaaagagctcgcgtctaggctgcggtatgcccgcaccatggtggataagctgctgtcctctaggtccgcctctaaccggcttaaggcatcctag

SEQ ID NO: 152251 - DNA, 744 bp, Artificial Sequence
  derived and/or modified sequence
atgtcagcggcagtgaccgccgggaagctggctcgcgcccccgctgatcctggcaaggcaggggtgccgggagtggctgcccccggcgccccagccgccgcgcctcccgcaaaggagatcccagaggtcctggtggatcccagatctaggagaaggtacgtgcggggcaggttcttgggtaaaggaggattcgccaagtgttttgagatcagtgacgcagacaccaaagaggtttttgctggaaagatcgtgcctaagtctctactactgaaaccccaccaaagggagaagatgagcatggagatctcaatccatcgctcattagcgcaccagcatgtagtagggttccacggcttttttgaggacaacgactttgtcttcgttgtactggaactatgtcggcggcggtcactcttagagctgcacaaaagacggaaggccctgacagaacccgaagcaagatactatctgcgccagatcgtgcttggttgccagtacctacacagaaaccgcgtcatccatagggacctgaagcttggcaacctctttctgaacgaggatctggaggtaaagataggcgattttggattggccacaaaggttgaatatgatggtgaacgtaagaaaaccctgtgtgggacaccaaattatatagcccctgcggtcccttgcttacagtgcgcgccacagcctcgatggcttggaagggcagcgtcttcccttcaagtgggcgtcgccgtatag

SEQ ID NO: 152252 - DNA, 1521 bp, Artificial Sequence
  derived and/or modified sequence
atgtccatggaaatctcaatccatcgaagcctcgctcaccagcatgtggtggggttccatggcttctttgaagacaatgacttcgtgttcgtcgtgctagagctatgccggcggcggtctttgttggaactgcacaagagacggaaagcactgacagagccagaggcacgatactacctgagacagattgtgctgggatgtcagtatctacatcggaatcgtgtgattcaccgggatttaaaactaggcaacctgtttctcaacgaagatctcgaagtaaaaattggggacttcgggctggccacaaaggtcgaatacgacggcgaaaggaagaaaacactctgcggcacacctaactatattgctcctgaagtcctgagcaagaaagggcactctttcgaagtggatgtttggtccatagggtgcattatgtatacgctgcttgtgggaaaacctccatttgagacatcgtgcctgaaagagacctacctgcgcatcaagaagaatgaatacagcataccaaaacacataaaccctgtggcagcctcgttaatacagaagatgctccagacggatccgaccgcccgaccaaccattaatgaattactcaatgacgagtttttcacgagcggatatattcccgcgcgtctgcccattacttgtctaacgatacctcctcgtttcagcattgccccatctagccttgacccatctaatcgcaaacctctcaccgtgcttaacaagggcctggagaacccccttcctgaaagacctcgcgaaaaagaggagccagtggttcgggaaacgggggaggtggtcgactgtcacctgtctgatatgctgcaacaactccacagtgtcaatgccagcaaaccatccgaacgggggttggttcgccaggaagaggctgaggaccccgcgtgtatccccattttctgggtgagcaagtgggtcgactacagcgacaagtacggactgggataccagttgtgcgacaacagcgtgggggtgctgttcaatgacagcacccggcttattctttataatgacggtgatagcctacagtacattgagcgggatggcactgagtcttatctaacagtgtcttctcatcccaattccctgatgaagaaaattaccctacttaagtacttccggaactacatgtctgaacacctgttgaaagccggcgctaatattaccccaagagagggcgacgaattggctagattaccatacctgaggacatggtttaggaccaggtcagctataatcctacatttgtccaacggaagtgttcaaatcaatttcttccaagatcacaccaagctcattctgtgcccactgatggcagcggtgacatacattgacgagaagcgtgattttcgtacctaccggttaagcttattagaagaatacggatgctgcaaagagttagcatccaggttacggtacgctcggacgatggtggataaactgttgtcgagccgaagcgccagtaaccgattgaaagcttcctag

SEQ ID NO: 152253 - DNA, 1812 bp, Artificial Sequence
  derived and/or modified sequence
atgtctgctgctgtgacagctgggaagctggcccgggccccagctgaccccgggaaggccggcgtgcctggggtggccgcccctggggccccagctgctgcccccccagccaaggagatccctgaggtgctggtggaccccaggagcagaagaagatatgtgcggggccgcttcctgggcaaaggaggctttgccaagtgctttgagatcagtgatgctgacaccaaggaggtgtttgctgggaagatcgtgcccaagagcctgctgctgaagccccaccagcgggagaagatgtccatggagatcagcatccacaggagcctggcccaccagcacgtggtgggcttccacggcttctttgaagataatgactttgtgtttgtggtgctggagctgtgcagaagaagaagcctgctggagctgcacaagaggaggaaggccctgacagagcctgaggcccgctactacctgcggcagatcgtgctgggctgccagtacctgcacaggaacagagtcatccaccgggacctgaagctgggcaacctcttcctgaatgaagacctggaggtgaagatcggggactttggcctggccaccaaggtggagtatgatggagagaggaagaagaccctgtgtggcacccccaactacatcgcccctgaggtgctgagcaagaagggccacagctttgaggtggatgtgtggagcatcggctgcatcatgtacaccctgctggtgggcaagcccccatttgagaccagctgcctgaaggagacctacctgcgcatcaagaagaatgagtacagcatccccaagcacatcaaccctgtggccgccagcctcatccagaagatgctgcagacagaccccacagcccggcccaccatcaatgagctgctgaatgatgagttcttcaccagcggctacatcccagcccggctgcccatcacctgcctgaccatccccccacgcttcagcatcgcccccagcagcctggaccccagcaacaggaagcccctgactgtgctgaacaagggcctggagaaccccctgcctgagcggccccgggagaaggaggagcctgtggtgcgggagaccggggaggtggtggactgccacctgagtgacatgctgcagcagctgcacagcgtgaatgccagcaagcccagcgagcggggcctggtgcggcaggaggaggctgaagatcctgcctgcatccccatcttctgggtgtccaagtgggtggactacagcgacaagtatggcctgggctaccagctgtgtgacaacagcgtgggcgtgctcttcaatgacagcaccaggctcatcctgtacaatgatggagacagcctgcagtacatcgagagagatggaacagagagctacctgactgtgagcagccaccccaacagcctgatgaagaagatcaccctgctgaagtacttcaggaactacatgtctgagcacctgctgaaggccggggccaacatcaccccccgggagggagatgagctggcccggctgccctacctgcggacctggttccgcaccaggtctgccatcatcctgcacctgagcaatggatctgtgcagatcaacttcttccaggaccacaccaagctgatcctgtgccccctgatggctgctgtgacctacattgatgagaagagggacttccgcacctaccgcctgagcctgctggaggagtatggctgctgcaaggagctggccagccggctgcgctatgcccggaccatggtggacaagctgctgagcagccgcagcgccagcaaccggctgaaggccagctag

SEQ ID NO: 152254 - DNA, 744 bp, Artificial Sequence
  derived and/or modified sequence
atgtctgctgctgtgacagctgggaagctggcccgggccccagctgaccccgggaaggccggcgtgcctggggtggccgcccctggggccccagctgctgcccccccagccaaggagatccctgaggtgctggtggaccccaggagcagaagaagatatgtgcggggccgcttcctgggcaaaggaggctttgccaagtgctttgagatcagtgatgctgacaccaaggaggtgtttgctgggaagatcgtgcccaagagcctgctgctgaagccccaccagcgggagaagatgtccatggagatcagcatccacaggagcctggcccaccagcacgtggtgggcttccacggcttctttgaagataatgactttgtgtttgtggtgctggagctgtgcagaagaagaagcctgctggagctgcacaagaggaggaaggccctgacagagcctgaggcccgctactacctgcggcagatcgtgctgggctgccagtacctgcacaggaacagagtcatccaccgggacctgaagctgggcaacctcttcctgaatgaagacctggaggtgaagatcggggactttggcctggccaccaaggtggagtatgatggagagaggaagaagaccctgtgtggcacccccaactacatcgccccagctgtgccctgcctgcagtgtgccccccagccccgctggctgggccgggccgccagcagcctgcaggtgggcgtggccgtgtag

SEQ ID NO: 152255 - DNA, 1521 bp, Artificial Sequence
  derived and/or modified sequence
atgtccatggagatcagcatccacaggagcctggcccaccagcacgtggtgggcttccacggcttctttgaggacaatgactttgtgtttgtggtgctggagctgtgcagaagaagaagcctgctggagctgcacaagaggaggaaggccctgacagagcctgaggcccgctactacctgcggcagatcgtgctgggctgccagtacctgcacaggaacagagtcatccaccgggacctgaagctgggcaacctcttcctgaatgaagacctggaggtgaagattggagactttggcctggccaccaaggtggagtatgatggagagaggaagaagaccctgtgtggcacccccaactacatcgcccctgaggtgctgagcaagaagggccacagctttgaggtggatgtgtggagcatcggctgcatcatgtacaccctgctggtgggcaagcccccatttgagaccagctgcctgaaggagacctacctgcgcatcaagaagaatgagtacagcatccccaagcacatcaaccctgtggccgccagcctcatccagaagatgctgcagacagaccccacagcccggcccaccatcaatgagctgctgaatgatgagttcttcaccagcggctacatcccagcccggctgcccatcacctgcctgaccatccccccacgcttcagcatcgcccccagcagcctggaccccagcaacaggaagcccctgactgtgctgaacaagggcctggagaaccccctgcctgagcggccccgggagaaggaggagcctgtggtgcgggagactggagaggtggtggactgccacctgagtgacatgctgcagcagctgcacagcgtgaatgccagcaagcccagcgagcggggcctggtgcggcaggaggaggccgaggaccctgcctgcatccccatcttctgggtgtccaagtgggtggactacagcgacaagtatggcctgggctaccagctgtgtgacaacagcgtgggcgtgctcttcaatgacagcaccaggctcatcctgtacaatgatggagacagcctgcagtacatcgagagagatggaacagagagctacctgactgtgagcagccaccccaacagcctgatgaagaagatcaccctgctgaagtacttcaggaactacatgtctgagcacctgctgaaggccggggccaacatcaccccccgggagggagatgagctggcccggctgccctacctgcggacctggttccgcaccaggtctgccatcatcctgcacctgagcaatggatctgtgcagatcaacttcttccaggaccacaccaagctgatcctgtgccccctgatggctgctgtgacctacattgatgagaagagggacttccgcacctaccgcctgagcctgctggaggagtatggctgctgcaaggagctggccagccggctgcgctatgcccggaccatggtggacaagctgctgagcagccgcagcgccagcaaccggctgaaggccagctag

SEQ ID NO: 152256 - DNA, 1812 bp, Artificial Sequence
  derived and/or modified sequence
atgagcgccgccgtgaccgccggcaagctggcccgggcccccgccgaccccggaaaggccggagtgccaggtgtggccgctcctggagcccctgccgcagcccccccagccaaagagatcccagaagttctagttgacccccggtcgcggcgtcggtatgttagaggacgcttcctaggaaagggagggtttgcgaaatgtttcgaaatctccgacgcagacacaaaggaggtgtttgctggtaaaatcgttccaaaatcattacttctcaaacctcaccagagagaaaagatgagcatggaaatttctatccaccgctcactcgcgcaccagcatgtcgtggggtttcacggcttctttgaagacaacgacttcgtcttcgttgtgttagaactgtgccgaagacgctcactgctggaactgcataagagacgaaaagctctgacagagcctgaagcacgctactacttgcggcaaatcgttctaggatgccagtacttacatcgtaaccgggtcatccacagggatctaaaacttggtaacctgtttctcaatgaggacctcgaggttaagatcggggactttggtctggcgaccaaagtcgaatatgatggcgagcgtaaaaagaccctctgcggtacaccaaactacattgctccagaagtgctgagtaagaaaggtcattcctttgaagtagatgtctggtccatcgggtgcatcatgtatacccttcttgtcggaaagccacctttcgaaacttcctgtctgaaagagacgtatcttcggatcaaaaaaaatgaatactccatcccaaaacacatcaatccagtggctgcgagcctcatccagaaaatgctgcagaccgaccccactgcaagaccaaccatcaatgaactattgaacgatgagttcttcacatctggctacatccccgctcgactgcccataacttgtctcacaatacccccgcgcttctccattgctccttctagtcttgacccatcaaaccggaagcccttgacagttctaaacaaggggctggagaacccattgcccgaaagacccagagagaaagaggagcccgtggttagggagaccggtgaagtggttgactgccacctatcggatatgctgcagcagctccatagtgtcaatgcttctaagccatccgaaagagggcttgtgcggcaagaagaagcggaggacccggcctgtattccaatattttgggtcagcaaatgggtggattatagcgataagtatggcctcgggtaccagttatgtgataacagtgtgggcgtgctgttcaatgacagtacccggcttatcctgtataatgacggggattctctccagtacatagagagggacggcactgagtcctatctgaccgtttcttcccatcccaatagcctcatgaagaagataactctgctgaagtattttcgcaactacatgtctgagcatctgctcaaagctggcgctaatataactccccgggagggggatgagttggctcgcctgccgtatctacgaacctggttccggacccgaagcgctattattttacacttgtcaaatgggtctgtccagatcaactttttccaggatcatacaaagttaatcctgtgtccgcttatggccgccgttacctatattgatgaaaagagggatttccgaacttacaggctctcgctgctggaagagtatggctgctgcaaggagcttgcgagtaggctgcggtacgcccgtacaatggtcgacaagctgctaagcagtcgctccgcaagtaatcggctgaaggcctcctag

SEQ ID NO: 152257 - DNA, 744 bp, Artificial Sequence
  derived and/or modified sequence
atgagcgccgccgtgaccgccggcaagctggcccgggcccccgccgacccaggtaaggctggggtgccaggtgttgctgctcctggcgcacctgccgccgctcctcctgctaaagaaatcccagaggttctggtggatccccgctcgagaaggcgctatgtgcgagggagattcctgggcaagggaggttttgctaagtgttttgaaatcagcgatgccgacacaaaggaagtgtttgccggcaagattgtgccaaagagccttcttctgaaaccccaccaacgtgaaaagatgtcaatggaaatctcaattcataggtccctggctcaccagcatgtggttgggttccacggtttctttgaggacaacgattttgttttcgtggtgctggagctctgccggcgccgcagtttattagagctgcataagcgacgaaaggcattaacagagcccgaggctcggtattaccttaggcaaatcgtgctcggatgccagtacttacatcgtaaccgagtgattcatcgcgacctcaagttgggaaatctgtttctgaatgaagatctggaggtgaaaattggagattttgggctcgctaccaaggtcgaatatgacggcgaaagaaagaaaacattgtgcgggacaccaaactacatcgcacccgccgtgccatgtttgcaatgcgcccctcaaccccggtggctggggcgggccgctagctccctgcaggtaggggtcgccgtatag

SEQ ID NO: 152258 - DNA, 1521 bp, Artificial Sequence
  derived and/or modified sequence
atgagcatggagatcagcatccaccggagcctggcccaccagcacgtggtcgggttccacgggtttttcgaggacaatgactttgtatttgttgtgttagagctgtgtcgccggaggagtttgctggagctccataaacgcaggaaggctttaaccgagcccgaggccagatattatctccgccagatcgtgcttggctgtcagtatttacatcgaaatagggtgattcatcgggacctcaaacttggtaatctgtttttgaacgaggatctcgaagtgaaaatcggtgattttggactggctaccaaggtggagtatgatggcgaaagaaagaagactttatgtggaacaccgaactatattgctccagaagtcctgagcaaaaaagggcactccttcgaggtggacgtatggagtatcggctgtataatgtacacacttctggtcgggaagccgcctttcgaaacctcctgcttgaaagagacatatctaaggattaaaaagaatgaatactcaatcccaaagcacattaatcctgttgcagcctctctgattcagaagatgttgcagacagaccctactgccaggcctaccataaatgaactgcttaacgacgaattttttacctctggctacataccggcccgtcttccgatcacttgtttaactattcccccccgattttcgattgctccctcgtcactcgacccctcaaatcggaaacccttaaccgttctgaacaagggtctggaaaacccactgcccgagagaccacgggaaaaagaggagccagtagtcagagagaccggggaggtggtggactgtcacttgtccgacatgcttcagcagcttcactcagttaacgcaagcaagccaagcgagcggggcctcgtccggcaagaagaagcggaagaccccgcctgtatccccattttctgggtctctaaatgggtggactatagcgataaatacggcctgggatatcagttgtgtgacaactcagtaggcgtgcttttcaatgattccacccgtcttatcttatacaacgatggggattccctccagtacattgagagggacggcactgagagctatttaactgtgtctagccatcctaatagtcttatgaaaaaaataaccctactgaagtattttcggaactatatgtctgagcaccttctgaaagcaggagcaaatatcacaccccgggagggcgacgaattagcacgactgccctatctccgcacgtggttccgtaccagatctgccatcattctgcatttatctaacggaagcgtccagattaacttctttcaagatcacacaaagctgattttgtgcccgttgatggccgcagtcacatacatcgatgagaaacgggacttccgaacataccggctgtccctgcttgaggagtatggctgctgtaaggagttggcttcacggctgcgctacgcaagaaccatggtggataagctgttgtccagcaggtctgcttccaatcgcttgaaggccagctag

SEQ ID NO: 152259 - DNA, 1812 bp, Artificial Sequence
  derived and/or modified sequence
atgtctgccgctgtgacagccggaaagctggcgagggcacccgcagaccctggtaaggccggagttcccggtgtggccgctccaggcgcacccgcagcagcccctcccgcaaaagaaatccccgaagtgctcgttgaccccaggtctaggagacgctatgtaagggggagatttctggggaaaggcggtttcgccaagtgttttgagatctcagatgccgatacaaaggaggtctttgctggcaaaattgtgccgaagagcttactactcaagccacaccagcgggaaaagatgtccatggaaatctctatccacagatcactggcccaccagcacgtggtcggattccatggcttttttgaagataacgactttgtgttcgttgtcctggagctctgccgcagaagatctctgctggagttacataaacggcgaaaggctcttaccgaacctgaagccagatactatttgagacagatcgttctgggatgccaatacctgcacagaaacagggtgatccacagagacctgaaactcggcaatctgttcctgaacgaagacctggaggttaagattggagactttggcctcgccactaaagttgagtatgacggagaaagaaagaagaccctatgtggtaccccaaactacattgctcccgaggtgttatctaagaagggacattccttcgaagttgacgtatggagcatcggatgcatcatgtacaccctgctagttgggaagccccctttcgagacctcctgccttaaggagacatatctgaggataaaaaagaacgagtacagtatccctaaacacatcaatccagtggcggcatcacttattcagaaaatgttgcagactgatccgaccgcacgccctaccattaatgagctgttaaatgacgaattcttcacaagcggatatattcccgcacggctcccaatcacatgtctgacaatcccaccacggttcagcatcgcaccctcctctcttgacccttccaacagaaaaccgctgacagttctcaacaagggcctggagaacccgctgcccgaacgccctagagagaaagaagaacccgtcgtgagggaaaccggagaagtggtggattgtcacttgtctgacatgctccagcagcttcactctgtcaatgctagtaaaccatcagaacggggactagtcaggcaagaagaggccgaggatcccgcatgcatccccatcttttgggtttccaagtgggtagattactccgacaagtatggcctagggtaccagctgtgcgacaattctgtgggggtgctcttcaacgactccactcgcctgatcctgtataacgatggagacagccttcagtacattgagcgggacgggaccgagtcctacctgaccgtgtcttcacaccctaattccctgatgaagaagatcactctgctcaagtactttcggaactacatgtctgagcacctcttgaaagccggtgctaacatcacaccccgagaaggcgacgagctagccaggctgccctatctgagaacctggttccggacccggtcagctataatcctgcatctaagtaatgggagcgtgcagataaacttctttcaggaccacacgaagttaattctatgtcctctgatggcagccgtcacttatatcgacgagaagcgggattttaggacatataggctgagcctgctggaggagtatggctgctgtaaggagttggcttcaagactaaggtacgcacggaccatggttgacaagctgttgagcagcagatctgcctccaataggctcaaagctagctag

SEQ ID NO: 152260 - DNA, 744 bp, Artificial Sequence
  derived and/or modified sequence
atgtccgctgctgtgaccgccggaaaactggcacgtgctcctgccgatccaggaaaagctggagtgccgggagtggcggcacccggtgcgcctgcggctgccccacctgctaaggaaatacctgaagtgctggtggatcctcggtctcgcagacgatatgtgagaggaagattcctgggaaaagggggatttgccaagtgttttgaaatcagtgacgccgacacaaaagaggtgttcgccggaaagatcgtacccaaaagcctgctactcaagccccatcagcgagagaaaatgtccatggaaatctccattcacaggtctctggcccaccagcatgtggtcggattccatggcttctttgaggataatgattttgtgtttgtggtgttggagttgtgtcgaaggaggagtttattagagttgcacaagcgtcggaaagcactgaccgagcctgaggcccgttattacctccgacaaattgtacttggctgccagtatctgcatcgcaatcgggtaatacacagggacctgaagctgggaaacctgtttctgaacgaagacctggaggtgaaaataggagactttggtctagcaaccaaagtagaatatgacggcgaacgcaaaaagaccctctgcggcacgcccaattatattgcgccagcggtaccatgcctgcaatgtgctccccaacctcggtggcttgggagagcagcctcttctctccaagtcggagttgctgtttag

SEQ ID NO: 152261 - DNA, 1521 bp, Artificial Sequence
  derived and/or modified sequence
atgtctatggagatttctatacacaggagcctggctcatcagcacgtggtgggcttccatggttttttcgaggacaatgactttgtctttgtagtcctggagctttgtcgcaggcggtccctcctcgaactgcacaagcgccgtaaagctttaacagagccagaagcccgatactacttgcgccaaatagtcttaggctgtcagtacctacatcggaacagggtgatccatcgagacctgaaattgggtaacctgttccttaatgaagacttggaagtgaaaatcggagattttgggctggcaaccaaggtggagtacgatggggagcgaaagaagacactgtgcggtacacccaattatatagcccctgaggtgctgagtaagaagggccattcattcgaggtggacgtctggagtatcggatgcataatgtacactcttctggttggcaaacctccttttgagacttcatgcctcaaggaaacttatcttaggatcaagaagaatgagtactcaatccccaagcacatcaatcctgtcgccgcttctttgatccagaagatgttgcagacagaccccaccgccagacctacaattaatgagcttcttaacgacgaattttttacatctggatatattccagcgaggcttccaatcacatgcttgaccatccccccacggttttctatcgctccctcgtcattagatcccagtaatcggaagccattgaccgttcttaacaagggacttgagaatccactgcctgagcgaccgagggagaaggaagagcccgtagtgcgggagacaggggaggtagtggattgccacctgtctgacatgctgcaacagcttcattcagtgaacgcctcaaaaccttccgagaggggactcgttcgacaggaggaggcagaggaccccgcttgtattcccatcttttgggtgagcaagtgggttgactatagcgacaaatatgggcttggatatcagctgtgtgacaattcagttggggtcctcttcaacgacagtacccggctgatcctgtataacgacggagactctctgcagtatatagagcgcgatggcactgagtcctatttaacggtgagcagccacccgaattctttgatgaagaaaatcacccttctaaaatacttcagaaattacatgagcgagcacctgttaaaggcaggggctaatatcaccccccgtgagggcgatgagcttgcaaggcttccgtatctcagaacatggtttaggactcggtctgctatcatcttgcacctctcaaatgggtccgtccagattaactttttccaggaccacaccaagcttatcctgtgcccactgatggcagcagtgacctatattgatgaaaagcgtgacttcaggacctatagactctctttactcgaagaatatggatgctgtaaggaattggccagtaggctgagatacgcgagaaccatggtcgataagctgttgagctcccggagcgcctccaacaggcttaaagcgagttag

SEQ ID NO: 152262 - DNA, 2227 bp, Artificial Sequence
  derived and/or modified sequence
agtggcgcgcaggcttttgtaacgttcccagcgccgcgtttgaattcggggaggagcggagcggtgcggaggctctgctcggatcgaggtctgcagcgcagcttcgggagcatgagtgctgcagtgactgcagggaagctggcacgggcaccggccgaccctgggaaagccggggtccccggagttgcagctcccggagctccggcggcggctccaccggcgaaagagatcccggaggtcctagtggacccacgcagccggcggcgctatgtgcggggccgctttttgggcaagggcggctttgccaagtgcttcgagatctcggacgcggacaccaaggaggtgttcgcgggcaagattgtgcctaagtctctgctgctcaagccgcaccagagggagaagatgtccatggaaatatccattcaccgcagcctcgcccaccagcacgtcgtaggattccacggctttttcgaggacaacgacttcgtgttcgtggtgttggagctctgccgccggaggtctctcctggagctgcacaagaggaggaaagccctgactgagcctgaggcccgatactacctacggcaaattgtgcttggctgccagtacctgcaccgaaaccgagttattcatcgagacctcaagctgggcaaccttttcctgaatgaagatctggaggtgaaaataggggattttggactggcaaccaaagtcgaatatgacggggagaggaagaagaccctgtgtgggactcctaattacatagctcccgaggtgctgagcaagaaagggcacagtttcgaggtggatgtgtggtccattgggtgtatcatgtataccttgttagtgggcaaaccaccttttgagacttcttgcctaaaagagacctacctccggatcaagaagaatgaatacagtattcccaagcacatcaaccccgtggccgcctccctcatccagaagatgcttcagacagatcccactgcccgcccaaccattaacgagctgcttaatgacgagttctttacttctggctatatccctgcccgtctccccatcacctgcctgaccattccaccaaggttttcgattgctcccagcagcctggaccccagcaaccggaagcccctcacagtcctcaataaaggcttggagaaccccctgcctgagcgtccccgggaaaaagaagaaccagtggttcgagagacaggtgaggtggtcgactgccacctcagtgacatgctgcagcagctgcacagtgtcaatgcctccaagccctcggagcgtgggctggtcaggcaagaggaggctgaggatcctgcctgcatccccatcttctgggtcagcaagtgggtggactattcggacaagtacggccttgggtatcagctctgtgataacagcgtgggggtgctcttcaatgactcaacacgcctcatcctctacaatgatggtgacagcctgcagtacatagagcgtgacggcactgagtcctacctcaccgtgagttcccatcccaactccttgatgaagaagatcaccctccttaaatatttccgcaattacatgagcgagcacttgctgaaggcaggtgccaacatcacgccgcgcgaaggtgatgagctcgcccggctgccctacctacggacctggttccgcacccgcagcgccatcatcctgcacctcagcaacggcagcgtgcagatcaacttcttccaggatcacaccaagctcatcttgtgcccactgatggcagccgtgacctacatcgacgagaagcgggacttccgcacataccgcctgagtctcctggaggagtacggctgctgcaaggagctggccagccggctccgctacgcccgcactatggtggacaagctgctgagctcacgctcggccagcaaccgtctcaaggcctcctaatagctgccctcccctccggactggtgccctcctcactcccacctgcatctggggcccatactggttggctcccgcggtgccatgtctgcagtgtgccccccagccccggtggctgggcagagctgcatcatccttgcaggtgggggttgctgtataagttatttttgtacatgttcgggtgtgggttctacagccttgtccccctccccctcaaccccaccatatgaattgtacagaatatttctattgaattcggaactgtcctttccttggctttatgcacattaaacagatgtgaatattc

SEQ ID NO: 152263 - DNA, 894 bp, Artificial Sequence
  derived and/or modified sequence
agcatgagtgctgcagtgactgcagggaagctggcacgggcaccggccgaccctgggaaagccggggtccccggagttgcagctcccggagctccggcggcggctccaccggcgaaagagatcccggaggtcctagtggacccacgcagccggcggcgctatgtgcggggccgctttttgggcaagggcggctttgccaagtgcttcgagatctcggacgcggacaccaaggaggtgttcgcgggcaagattgtgcctaagtctctgctgctcaagccgcaccagagggagaagatgtccatggaaatatccattcaccgcagcctcgcccaccagcacgtcgtaggattccacggctttttcgaggacaacgacttcgtgttcgtggtgttggagctctgccgccggaggtctctcctggagctgcacaagaggaggaaagccctgactgagcctgaggcccgatactacctacggcaaattgtgcttggctgccagtacctgcaccgaaaccgagttattcatcgagacctcaagctgggcaaccttttcctgaatgaagatctggaggtgaaaataggggattttggactggcaaccaaagtcgaatatgacggggagaggaagaagaccctgtgtgggactcctaattacatagctcccgcggtgccatgtctgcagtgtgccccccagccccggtggctgggcagagctgcatcatccttgcaggtgggggttgctgtataagttatttttgtacatgttcgggtgtgggttctacagccttgtccccctccccctcaaccccaccatatgaattgtacagaatatttctattgaattcggaactgtcctttccttggctttatgcacattaaacagatgtgaatattc

SEQ ID NO: 152264 - DNA, 1893 bp, Artificial Sequence
  derived and/or modified sequence
ctctgctcggatcgaggtctgcagcgcagcttcgggagcatgagtgctgcagtgactgcagggagaagatgtccatggaaatatccattcaccgcagcctcgcccaccagcacgtcgtaggattccacggctttttcgaggacaacgacttcgtgttcgtggtgttggagctctgccgccggaggtctctcctggagctgcacaagaggaggaaagccctgactgagcctgaggcccgatactacctacggcaaattgtgcttggctgccagtacctgcaccgaaaccgagttattcatcgagacctcaagctgggcaaccttttcctgaatgaagatctggaggtgaaaataggggattttggactggcaaccaaagtcgaatatgacggggagaggaagaagaccctgtgtgggactcctaattacatagctcccgaggtgctgagcaagaaagggcacagtttcgaggtggatgtgtggtccattgggtgtatcatgtataccttgttagtgggcaaaccaccttttgagacttcttgcctaaaagagacctacctccggatcaagaagaatgaatacagtattcccaagcacatcaaccccgtggccgcctccctcatccagaagatgcttcagacagatcccactgcccgcccaaccattaacgagctgcttaatgacgagttctttacttctggctatatccctgcccgtctccccatcacctgcctgaccattccaccaaggttttcgattgctcccagcagcctggaccccagcaaccggaagcccctcacagtcctcaataaaggcttggagaaccccctgcctgagcgtccccgggaaaaagaagaaccagtggttcgagagacaggtgaggtggtcgactgccacctcagtgacatgctgcagcagctgcacagtgtcaatgcctccaagccctcggagcgtgggctggtcaggcaagaggaggctgaggatcctgcctgcatccccatcttctgggtcagcaagtgggtggactattcggacaagtacggccttgggtatcagctctgtgataacagcgtgggggtgctcttcaatgactcaacacgcctcatcctctacaatgatggtgacagcctgcagtacatagagcgtgacggcactgagtcctacctcaccgtgagttcccatcccaactccttgatgaagaagatcaccctccttaaatatttccgcaattacatgagcgagcacttgctgaaggcaggtgccaacatcacgccgcgcgaaggtgatgagctcgcccggctgccctacctacggacctggttccgcacccgcagcgccatcatcctgcacctcagcaacggcagcgtgcagatcaacttcttccaggatcacaccaagctcatcttgtgcccactgatggcagccgtgacctacatcgacgagaagcgggacttccgcacataccgcctgagtctcctggaggagtacggctgctgcaaggagctggccagccggctccgctacgcccgcactatggtggacaagctgctgagctcacgctcggccagcaaccgtctcaaggcctcctaatagctgccctcccctccggactggtgccctcctcactcccacctgcatctggggcccatactggttggctcccgcggtgccatgtctgcagtgtgccccccagccccggtggctgggcagagctgcatcatccttgcaggtgggggttgctgtataagttatttttgtacatgttcgggtgtgggttctacagccttgtccccctccccctcaaccccaccatatgaattgtacagaatatttctattgaattcggaactgtcctttccttggctttatgcacattaaacagatgtgaatattc

SEQ ID NO: 152265 - protein, 58 aa, Artificial Sequence
  derived and/or modified sequence
MDTQKDVQPPKQQPMIYICGECHTENEIKSRDPIRCRECGYRIMYKKRTKRLVVFDAR

SEQ ID NO: 152266 - DNA, 177 bp, Artificial Sequence
  derived and/or modified sequence
atggacacccagaaagacgtgcagcctccaaagcagcaacctatgatatatatttgtggcgagtgccacacagaaaatgaaattaagagccgagaccctatccgctgccgggaatgtgggtataggattatgtacaagaagagaacgaagaggctcgtcgttttcgatgctaggtag

SEQ ID NO: 152267 - DNA, 177 bp, Artificial Sequence
  derived and/or modified sequence
atggacacccagaaggatgtgcagccccccaagcagcagcccatgatctacatctgtggggagtgccacacagaaaatgagatcaagagccgggaccccatccgctgccgggagtgtggctaccgcatcatgtacaagaagaggaccaagaggctggtggtgtttgatgccaggtag

SEQ ID NO: 152268 - DNA, 177 bp, Artificial Sequence
  derived and/or modified sequence
atggacacccagaaggacgtgcagccccccaagcagcagcccatgatctatatctgtggagagtgccataccgaaaacgagataaagagtcgggatcccatccgctgccgagagtgtgggtacagaattatgtataaaaaacgaactaaacggctggtggtgttcgacgctaggtag

SEQ ID NO: 152269 - DNA, 998 bp, Artificial Sequence
  derived and/or modified sequence
ggagtaagagagagagaaagagagacagcactgtgcgtcatgtaccagcgccggaagttggtctcgacacctggactagccgggttgtatttggaaacgcggagtgagtttttccgtgctgtgtaggggctaacaatggacacccagaaggacgttcaacctccaaagcagcaaccaatgatatatatctgtggagagtgtcacacagaaaatgaaataaaatctagggatccaatcagatgcagagaatgtggatacagaataatgtacaagaaaaggactaaaagattggtcgtttttgatgctcgatgaatgctgggaattcagaggaatgtcttcacttatacttggatttgctctcttcccatttctgattgttgtatagctttcgattttgcttacagtagttcccccttatcttcgggagatacattccaaggcccccagtgaactcctgaaacctcaaacagtaccaaacctttatacactgttttttccatatatatatacctatgataaagtataatgtataaattaagcatagcaagagattaataataatgtaatagaacaatgataacatactataataaaagttatgtgaatgtggttggtctctcttgctttcaaaatatcttcttgtacagtactcacctattttagaatgtggttgactacaggtaaccaaaaccacagaaagggaaactttggatgaggggggcactactgtacttaggaatacaactatatacatatgattttatttttaagaccatattatatttgggtatctactaatattttgtataaagcaattttttgttccattacgtgactttttgttttattgtatatgtaatttaacacacaataaagggtaaagttgcttccccaaaccacacttttaatcaaaacctagaatcatctgcagtccttgttaaaaatgcaggtttctagaaccctctgaagttctgattaaataaatttattgcaaacca

SEQ ID NO: 152270 - DNA, 177 bp, Artificial Sequence
  derived and/or modified sequence
atggacactcaaaaagacgttcagccacctaagcaacagccaatgatttatatatgtggcgagtgtcatactgagaacgaaattaagagtcgcgacccaatcagatgcagggaatgtggatatcgcattatgtacaaaaagaggactaagcgattggtggtttttgacgcacgatag

SEQ ID NO: 152271 - DNA, 177 bp, Artificial Sequence
  derived and/or modified sequence
atggacacccagaaggacgtgcagccccccaagcagcagcccatgatctacatctgcggcgagtgccacaccgagaacgagatcaagagcagagaccccatcagatgcagagagtgcggctacagaatcatgtacaagaagagaaccaagagactggtggtgttcgacgccagatag

SEQ ID NO: 152272 - protein, 1230 aa, Artificial Sequence
  derived and/or modified sequence
MSALCWGRGAAGLKRALRPCGRPGLPGKEGTAGGVCGPRRSSSASPQEQDQDRRKDWGHVELLEVLQARVRQLQAESVSEVVVNRVDVARLPECGSGDGSLQPPRKVQMGAKDATPVPCGRWAKILEKDKRTQQMRMQRLKAKLQMPFQSGEFKALTRRLQVEPRLLSKQMAGCLEDCTRQAPESPWEEQLARLLQEAPGKLSLDVEQAPSGQHSQAQLSGQQQRLLAFFKCCLLTDQLPLAHHLLVVHHGQRQKRKLLTLDMYNAVMLGWARQGAFKELVYVLFMVKDAGLTPDLLSYAAALQCMGRQDQDAGTIERCLEQMSQEGLKLQALFTAVLLSEEDRATVLKAVHKVKPTFSLPPQLPPPVNTSKLLRDVYAKDGRVSYPKLHLPLKTLQCLFEKQLHMELASRVCVVSVEKPTLPSKEVKHARKTLKTLRDQWEKALCRALRETKNRLEREVYEGRFSLYPFLCLLDEREVVRMLLQVLQALPAQGESFTTLARELSARTFSRHVVQRQRVSGQVQALQNHYRKYLCLLASDAEVPEPCLPRQYWEELGAPEALREQPWPLPVQMELGKLLAEMLVQATQMPCSLDKPHRSSRLVPVLYHVYSFRNVQQIGILKPHPAYVQLLEKAAEPTLTFEAVDVPMLCPPLPWTSPHSGAFLLSPTKLMRTVEGATQHQELLETCPPTALHGALDALTQLGNCAWRVNGRVLDLVLQLFQAKGCPQLGVPAPPSEAPQPPEAHLPHSAAPARKAELRRELAHCQKVAREMHSLRAEALYRLSLAQHLRDRVFWLPHNMDFRGRTYPCPPHFNHLGSDVARALLEFAQGRPLGPHGLDWLKIHLVNLTGLKKREPLRKRLAFAEEVMDDILDSADQPLTGRKWWMGAEEPWQTLACCMEVANAVRASDPAAYVSHLPVHQDGSCNGLQHYAALGRDSVGAASVNLEPSDVPQDVYSGVAAQVEVFRRQDAQRGMRVAQVLEGFITRKVVKQTVMTVVYGVTRYGGRLQIEKRLRELSDFPQEFVWEASHYLVRQVFKSLQEMFSGTRAIQHWLTESARLISHMGSVVEWVTPLGVPVIQPYRLDSKVKQIGGGIQSITYTHNGDISRKPNTRKQKNGFPPNFIHSLDSSHMMLTALHCYRKGLTFVSVHDCYWTHAADVSVMNQVCREQFVRLHSEPILQDLSRFLVKRFCSEPQKILEASQLKETLQAVPKPGAFDLEQVKRSTYFFS

SEQ ID NO: 152273 - protein, 883 aa, Artificial Sequence
  derived and/or modified sequence
MNTINIAKNDFSDIELAAIPFNTLADHYGERLAREQLALEHESYEMGEARFRKMFERQLKAGEVADNAAAKPLITTLLPKMIARINDWFEEVKAKRGKRPTAFQFLQEIKPEAVAYITIKTTLACLTSADNTTVQAVASAIGRAIEDEARFGRIRDLEAKHFKKNVEEQLNKRVGHVYKKAFMQVVEADMLSKGLLGGEAWSSWHKEDSIHVGVRCIEMLIESTGMVSLHRQNAGVVGQDSETIELAPEYAEAIATRAGALAGISPMFQPCVVPPKPWTGITGGGYWANGRRPLALVRTHSKKALMRYEDVYMPEVYKAINIAQNTAWKINKKVLAVANVITKWKHCPVEDIPAIEREELPMKPEDIDMNPEALTAWKRAAAAVYRKDKARKSRRISLEFMLEQANKFANHKAIWFPYNMDWRGRVYAVSMFNPQGNDMTKGLLTLAKGKPIGKEGYYWLKIHGANCAGVDKVPFPERIKFIEENHENIMACAKSPLENTWWAEQDSPFCFLAFCFEYAGVQHHGLSYNCSLPLAFDGSCSGIQHFSAMLRDEVGGRAVNLLPSETVQDIYGIVAKKVNEILQADAINGTDNEVVTVTDENTGEISEKVKLGTKALAGQWLAYGVTRSVTKRSVMTLAYGSKEFGFRQQVLEDTIQPAIDSGKGLMFTQPNQAAGYMAKLIWESVSVTVVAAVEAMNWLKSAAKLLAAEVKDKKTGEILRKRCAVHWVTPDGFPVWQEYKKPIQTRLNLMFLGQFRLQPTINTNKDSEIDAHKQESGIAPNFVHSQDGSHLRKTVVWAHEKYGIESFALIHDSFGTIPADAANLFKAVRETMVDTYESCDVLADFYDQFADQLHESQLDKMPALPAKGNLNLRDILESDFAFA

SEQ ID NO: 152274 - DNA, 3693 bp, Artificial Sequence
  derived and/or modified sequence
atgagcgccctgtgctggggcagaggcgccgccggcctgaagagagccctgagaccctgcggcagacccggcctgcccggcaaggagggcaccgccggcggcgtgtgcggccccagaagaagcagcagcgccagcccccaggagcaggaccaggacagaagaaaggactggggccacgtggagctgctggaggtgctgcaggccagagtgagacagctgcaggccgagagcgtgagcgaggtggtggtgaacagagtggacgtggccagactgcccgagtgcggcagcggcgacggcagcctgcagccccccagaaaggtgcagatgggcgccaaggacgccacccccgtgccctgcggcagatgggccaagatcctggagaaggacaagagaacccagcagatgagaatgcagagactgaaggccaagctgcagatgcccttccagagcggcgagttcaaggccctgaccagaagactgcaggtggagcccagactgctgagcaagcagatggccggctgcctggaggactgcaccagacaggcccccgagagcccctgggaggagcagctggccagactgctgcaggaggcccccggcaagctgagcctggacgtggagcaggcccccagcggccagcacagccaggcccagctgagcggccagcagcagagactgctggccttcttcaagtgctgcctgctgaccgaccagctgcccctggcccaccacctgctggtggtgcaccacggccagagacagaagagaaagctgctgaccctggacatgtacaacgccgtgatgctgggctgggccagacagggcgccttcaaggagctggtgtacgtgctgttcatggtgaaggacgccggcctgacccccgacctgctgagctacgccgccgccctgcagtgcatgggcagacaggaccaggacgccggcaccatcgagagatgcctggagcagatgagccaggagggcctgaagctgcaggccctgttcaccgccgtgctgctgagcgaggaggacagagccaccgtgctgaaggccgtgcacaaggtgaagcccaccttcagcctgcccccccagctgcccccccccgtgaacaccagcaagctgctgagagacgtgtacgccaaggacggcagagtgagctaccccaagctgcacctgcccctgaagaccctgcagtgcctgttcgagaagcagctgcacatggagctggccagcagagtgtgcgtggtgagcgtggagaagcccaccctgcccagcaaggaggtgaagcacgccagaaagaccctgaagaccctgagagaccagtgggagaaggccctgtgcagagccctgagagagaccaagaacagactggagagagaggtgtacgagggcagattcagcctgtaccccttcctgtgcctgctggacgagagagaggtggtgagaatgctgctgcaggtgctgcaggccctgcccgcccagggcgagagcttcaccaccctggccagagagctgagcgccagaaccttcagcagacacgtggtgcagagacagagagtgagcggccaggtgcaggccctgcagaaccactacagaaagtacctgtgcctgctggccagcgacgccgaggtgcccgagccctgcctgcccagacagtactgggaggagctgggcgcccccgaggccctgagagagcagccctggcccctgcccgtgcagatggagctgggcaagctgctggccgagatgctggtgcaggccacccagatgccctgcagcctggacaagccccacagaagcagcagactggtgcccgtgctgtaccacgtgtacagcttcagaaacgtgcagcagatcggcatcctgaagccccaccccgcctacgtgcagctgctggagaaggccgccgagcccaccctgaccttcgaggccgtggacgtgcccatgctgtgcccccccctgccctggaccagcccccacagcggcgccttcctgctgagccccaccaagctgatgagaaccgtggagggcgccacccagcaccaggagctgctggagacctgcccccccaccgccctgcacggcgccctggacgccctgacccagctgggcaactgcgcctggagagtgaacggcagagtgctggacctggtgctgcagctgttccaggccaagggctgcccccagctgggcgtgcccgccccccccagcgaggccccccagccccccgaggcccacctgccccacagcgccgcccccgccagaaaggccgagctgagaagagagctggcccactgccagaaggtggccagagagatgcacagcctgagagccgaggccctgtacagactgagcctggcccagcacctgagagacagagtgttctggctgccccacaacatggacttcagaggcagaacctacccctgccccccccacttcaaccacctgggcagcgacgtggccagagccctgctggagttcgcccagggcagacccctgggcccccacggcctggactggctgaagatccacctggtgaacctgaccggcctgaagaagagagagcccctgagaaagagactggccttcgccgaggaggtgatggacgacatcctggacagcgccgaccagcccctgaccggcagaaagtggtggatgggcgccgaggagccctggcagaccctggcctgctgcatggaggtggccaacgccgtgagagccagcgaccccgccgcctacgtgagccacctgcccgtgcaccaggacggcagctgcaacggcctgcagcactacgccgccctgggcagagacagcgtgggcgccgccagcgtgaacctggagcccagcgacgtgccccaggacgtgtacagcggcgtggccgcccaggtggaggtgttcagaagacaggacgcccagagaggcatgagagtggcccaggtgctggagggcttcatcaccagaaaggtggtgaagcagaccgtgatgaccgtggtgtacggcgtgaccagatacggcggcagactgcagatcgagaagagactgagagagctgagcgacttcccccaggagttcgtgtgggaggccagccactacctggtgagacaggtgttcaagagcctgcaggagatgttcagcggcaccagagccatccagcactggctgaccgagagcgccagactgatcagccacatgggcagcgtggtggagtgggtgacccccctgggcgtgcccgtgatccagccctacagactggacagcaaggtgaagcagatcggcggcggcatccagagcatcacctacacccacaacggcgacatcagcagaaagcccaacaccagaaagcagaagaacggcttcccccccaacttcatccacagcctggacagcagccacatgatgctgaccgccctgcactgctacagaaagggcctgaccttcgtgagcgtgcacgactgctactggacccacgccgccgacgtgagcgtgatgaaccaggtgtgcagagagcagttcgtgagactgcacagcgagcccatcctgcaggacctgagcagattcctggtgaagagattctgcagcgagccccagaagatcctggaggccagccagctgaaggagaccctgcaggccgtgcccaagcccggcgccttcgacctggagcaggtgaagagaagcacctacttcttcagctag

SEQ ID NO: 152275 - DNA, 3693 bp, Artificial Sequence
  derived and/or modified sequence
atgtcagctctttgctggggccggggggccgccggcttgaaaagggctttgcggccatgcggccgccctggactacctgggaaagagggcacagccggcggagtttgcggccctaggcggtcttctagtgctagtcctcaggaacaggatcaggatcgcaggaaagactgggggcacgtggaactgctggaagttctgcaggcacgtgttagacaactgcaggcggagagcgtgtcagaggtcgtcgtgaacagggtagatgtcgcgcgattgcccgaatgtggtagcggagacggaagcttacagcctcccaggaaggtccagatgggagccaaagacgctacccccgtcccctgcgggaggtgggccaaaattctggaaaaggacaagcggacccagcaaatgcgcatgcaacgtctaaaggccaagctccaaatgcccttccagtcaggcgagttcaaggcgttgactcgccggctgcaggtcgagccacgtctcctgagcaagcagatggcaggatgcctggaggattgcaccagacaggctccagaatcaccgtgggaggaacagctggctcggctccttcaggaggcccccgggaagctcagcctagacgtggagcaggccccatcaggtcagcatagtcaggcgcaactttctggacaacagcagcgcctcctcgctttttttaagtgctgcttactcaccgatcagctgcctctagcccaccacctcttggtggtgcatcatggccagagacaaaagagaaagctgctgaccttggacatgtataacgctgtgatgcttggttgggcccggcaaggcgctttcaaggaactggtgtacgtgctgtttatggttaaggatgcaggattgactccggacctgttgtcatacgctgccgctctacagtgcatgggccggcaagaccaagatgccgggactattgagcgatgcttagaacaaatgagccaggaaggcctgaagttgcaagccctgtttaccgcagtgctgttgtcagaggaggaccgtgctaccgttcttaaagcagttcacaaggtgaaacctactttcagtctgccgccccagttgccgccgccagttaacacatcgaaacttctgcgtgacgtgtacgctaaggacgggcgggttagctaccccaaattgcaccttcctctgaaaaccttgcagtgtctcttcgagaagcaactacacatggaattggcaagcagggtgtgtgtggtcagcgtagagaagcctacactcccttcgaaagaggtgaaacatgcgcggaaaacactcaaaactctccgagatcagtgggagaaggccttatgcagggctctgagagagaccaaaaaccgactcgagcgcgaggtttacgagggaagattctcactgtatccgtttctgtgtctgctggacgaacgcgaagttgttagaatgctgcttcaggtgctccaggcactgccagctcagggcgagagctttacaactctagccagggagctctcagcccggactttcagtaggcatgtcgtgcagagacaacgcgtctccggtcaagtgcaggcactgcagaaccattatcggaagtacctgtgtcttctcgcctctgatgccgaagtgcctgaaccctgtctgcctcggcagtattgggaagaacttggcgcccccgaagcacttcgagagcagccttggccgctccccgtgcagatggaactgggaaaattgctcgcggagatgctggtgcaggccacgcaaatgccttgttctctggacaaacctcaccggagttctcgcctggttccggtgctgtaccatgtttattctttccgaaatgtccagcagattggcatcctcaaaccacacccggcctacgttcaactactggagaaggccgcagagccaactctgacattcgaggccgtagatgtgcctatgttgtgccctcctctcccctggacttctcctcatagcggcgcctttctgttgtctccaaccaaactgatgagaaccgttgagggcgcaacgcagcaccaggagttactggaaacatgccctcctacagcactgcatggagcccttgacgcgcttacgcagctgggcaattgtgcctggagggtgaatggcagggtattggatctggtactccagctattccaggccaaggggtgtccacaactcggggtgcccgccccaccttcagaggccccccaacctcctgaggcccacttgccgcattctgctgccccagccagaaaggccgagcttagacgggagctggcccattgccagaaagtggcgagagaaatgcattcactgcgcgctgaggcgctatatcgcctgtctctcgcccaacacctgcgggatagagtgttctggctgccccacaatatggactttcgaggtaggacctatccctgccccccacattttaatcatcttggatccgatgttgcgcgggcattgttggaattcgcccaaggccgaccccttggcccccacggtctggattggctcaagattcacttggtcaatctgacggggctgaagaagcgggagcccctcaggaagcggctggctttcgctgaagaggttatggacgatatactagactctgcagaccagccccttaccggcagaaaatggtggatgggcgctgaggagccttggcaaacactggcttgttgtatggaagtcgccaatgcggtgcgggcctccgatcccgctgcatacgtgagtcatcttcccgtgcatcaggatggtagctgtaacggactgcaacactacgctgcactgggaagagacagcgtcggtgcagcatccgtgaatctggagccatctgatgtgccccaggatgtgtacagtggggtcgcggctcaggtggaagttttcaggagacaggacgctcaaagaggcatgcgtgtggctcaagtgctggaaggatttattacccgcaaagtcgtgaaacagacggtgatgacagtggtctatggcgtcactcgctatggagggcgcctgcaaattgagaagagattacgtgaactttctgactttccccaggaattcgtgtgggaagcctcgcactaccttgtaaggcaggtgttcaagtcgctgcaggagatgttcagcggcacgcgcgcgattcaacattggctgactgaatctgctcggctgatcagtcacatggggagcgtagttgagtgggtcaccccactcggggtcccagtcatccaaccttaccgccttgatagtaaagtgaagcaaatagggggtggcatccagagcattacctacacacataatggggatataagtcggaagcctaatacacggaaacagaagaacggattccctccaaacttcatccacagcttggattctagccacatgatgctcacagctctgcattgctacagaaaggggctgacgtttgtttccgtgcatgattgctattggacacatgccgctgatgtgtcagtgatgaatcaagtttgccgagagcagttcgttcgcttacactctgaaccaatcctgcaggacctcagcaggttcttggtgaagcgattttgcagtgagccccagaaaattctggaggcctcccagctgaaggaaacattgcaggcagtccccaagccaggcgcctttgacctggagcaggttaaacggtcaacatactttttctcctag

SEQ ID NO: 152276 - DNA, 3693 bp, Artificial Sequence
  derived and/or modified sequence
atgtctgccctgtgctggggccgcggggctgctggcctgaagagggccctgcggccctgtggccggcccggcctgcccgggaaggagggcacagctgggggcgtgtgtggccccaggaggagcagcagcgccagcccccaggagcaggaccaggacaggaggaaggactggggccacgtggagctgctggaggtgctgcaggcccgggtgcggcagctgcaggccgagagcgtgtctgaggtggtggtgaacagagtggatgtggcccggctgcctgaatgtggcagcggagatggcagcctgcagccccccaggaaggtgcagatgggcgccaaggatgccacccctgtgccctgtggccgctgggccaagatcctggagaaggacaagaggacccagcagatgaggatgcagaggctgaaggccaagctgcagatgcccttccagagcggggagttcaaggccctgacccggcggctgcaggtggagccccggctgctgagcaagcagatggccggctgcctggaggactgcacccggcaggcccctgagagcccctgggaggagcagctggcccggctgctgcaggaggcccctgggaagctgagcctggatgtggagcaggcccccagcggccagcacagccaggcccagctgagcggccagcagcagaggctgctggccttcttcaagtgctgcctgctgacagaccagctgcccctggcccaccacctgctggtggtgcaccacggccagaggcagaagaggaagctgctgaccctggacatgtacaatgctgtgatgctgggctgggcccggcagggcgccttcaaggagctggtgtatgtgctcttcatggtgaaggatgctggcctgaccccagacctgctgtcctatgctgctgccctgcagtgcatgggccggcaggaccaggatgctggcaccatcgagcgctgcctggagcagatgagccaggagggcctgaagctgcaggccctcttcaccgctgtgctgctgtctgaggaggaccgggccaccgtgctgaaggctgtgcacaaggtgaagcccaccttcagcctgcccccccagctgcccccacctgtgaacaccagcaagctgctgagagatgtgtatgccaaggatggccgggtgtcctaccccaagctgcacctgcccctgaagaccctgcagtgcctgtttgagaagcagctgcacatggagctggccagccgggtgtgtgtggtgtctgtggagaagcccaccctgcccagcaaggaggtgaagcacgccaggaagaccctgaagaccctgcgggaccagtgggagaaggccctgtgccgggccctgcgggagaccaagaaccggctggagcgggaggtgtatgagggccgcttcagcctgtaccccttcctgtgcctgctggatgagcgggaggtggtgaggatgctgctgcaggtgctgcaggccctgcctgcccagggcgagagcttcaccaccctggcccgggagctgagcgcccggaccttcagccgccacgtggtgcagaggcagagggtgtctggccaggtgcaggccctgcagaaccactacaggaagtacctgtgcctgctggccagtgatgctgaggtgcctgagccctgcctgccccggcagtactgggaggagctgggcgcccctgaggccctgcgggagcagccctggcccctgcctgtgcagatggagctgggcaagctgctggccgagatgctggtgcaggccacccagatgccctgcagcctggacaagccccacaggagcagccggctggtgcctgtgctgtaccacgtgtacagcttcagaaatgtgcagcagatcggcatcctgaagccccacccagcctacgtgcagctgctggagaaggctgctgagcccaccctgacctttgaagctgtggatgtgcccatgctgtgcccccccctgccctggaccagcccccacagcggggccttcctgctgagccccaccaagctgatgaggacagtggagggcgccacccagcaccaggagctgctggagacctgccccccaacagccctgcatggagccctggatgccctgacccagctgggcaactgtgcctggagggtgaatggccgggtgctggacctggtgctgcagctgttccaggccaagggctgcccccagctgggcgtgcctgccccacccagcgaggccccccagcccccagaggcccacctgccccacagcgctgccccagccaggaaggccgagctgcggcgggagctggcccactgccagaaggtggcccgggagatgcacagcctgcgggcagaggccctgtaccgcctgagcctggcccagcacctgcgggacagagtcttctggctgccccacaacatggacttccggggccgcacctacccctgccccccccacttcaaccacctgggcagtgatgtggcccgggccctgctggagtttgcccagggccggcccctgggcccccacggcctggactggctgaagatccacctggtgaacctgaccggcctgaagaagcgggagcccctgaggaagaggctggcctttgctgaggaggtgatggatgacatcctggacagcgctgaccagcccctgaccggcaggaagtggtggatgggcgctgaggagccctggcagaccctggcctgctgcatggaggtggccaatgctgtgcgggccagtgaccctgctgcctacgtgagccacctgcctgtgcaccaggacggcagctgcaatggcctgcagcactacgccgccctgggccgggacagcgtgggcgccgcctctgtgaacctggagcccagtgatgtgccccaggatgtgtacagcggcgtggccgcccaggtggaggtgttccggcggcaggatgcccagaggggcatgagggtggcccaggtgctggagggcttcatcaccaggaaggtggtgaagcagacagtgatgacagtggtgtatggagtgaccaggtatggaggccgcctgcagatcgagaagaggctgcgggagctgagtgacttcccccaggagtttgtgtgggaggccagccactacctggtgcggcaggtgttcaagagcctgcaggagatgttttctggcacccgggccatccagcactggctgacagaaagtgcccggctcatcagccacatgggctctgtggtggagtgggtgacccccctgggcgtgcctgtgatccagccctaccgcctggacagcaaggtgaagcagattggaggcggcatccagagcatcacctacacccacaatggagacatcagcaggaagcccaacaccaggaagcagaagaatggcttcccccccaacttcatccacagcctggacagcagccacatgatgctgacagccctgcactgctacaggaagggcctgacctttgtgtctgtgcatgactgctactggacccatgctgctgatgtgtctgtgatgaaccaggtgtgccgggagcagtttgtgcggctgcacagcgagcccatcctgcaggacctgagccgcttcctggtgaagcgcttctgcagcgagccccagaagatcctggaggccagccagctgaaggagaccctgcaggccgtgcccaagccaggggcctttgacctggagcaggtgaagaggagcacctacttcttctcctag

SEQ ID NO: 152277 - DNA, 3693 bp, Artificial Sequence
  derived and/or modified sequence
atgagcgccctgtgctggggccggggcgccgccggcctgaagcgggctctaaggccatgcggccgccctggcttgccgggaaaggaagggacagccgggggggtgtgtggacctcgccgcagcagcagcgctagccctcaggaacaggaccaagataggagaaaagattgggggcatgtagaactgctcgaagtccttcaggccagagtgagacaactccaggctgagagtgtcagcgaggtcgtggtgaatcgggtggatgtggcaaggttaccagaatgtgggtctggagatggctcactgcagccacccaggaaagtccagatgggtgccaaggatgctaccccagtgccatgtgggcggtgggctaagatcttagagaaggacaagcgtactcagcagatgcgcatgcagcgtcttaaggccaaactccagatgcctttccagtccggagagtttaaagctttaacaaggaggctgcaggttgaacctaggctgctgtcaaagcagatggctggctgcctggaggattgcacgcggcaggcacccgaatccccatgggaggaacagctggctcgcttgctgcaggaagcccccggcaaattgtccctggacgttgagcaggcacctagtggacagcactcacaggcccagctcagcggccagcaacaacgcctgctggccttttttaaatgttgtctgctgactgatcagctgccgttggctcaccatcttctcgtagtccatcacgggcagcgacagaagcgaaaactgctgacccttgatatgtacaatgcagtcatgttgggctgggcccggcagggggctttcaaggagctggtctacgtcctgttcatggtaaaggatgccgggcttacccctgatctactctcctacgccgctgccctgcagtgcatgggccgacaggatcaggacgccggcacaattgagagatgtcttgagcagatgtcacaggaaggactgaaactgcaggctctgtttactgcagtcctgctatccgaggaggacagagccacagtcctgaaagccgtgcataaggtcaagcccacattttctctgcccccacagctcccgccccctgtaaacacctccaaacttctccgagatgtctacgccaaggacgggagggtctcctaccctaagttgcatctccctctgaaaaccctccaatgtctcttcgagaaacagctgcacatggaattggctagcagagtgtgtgtcgtctctgtggagaagccaactctgccttccaaagaggtgaaacacgcgcggaagactctcaagacattgagggaccagtgggagaaggcactgtgcagggctttgagggaaacgaaaaatcgcttggagagagaggtgtacgagggacgcttttcgctgtaccccttcttatgtctactggatgaacgtgaggtcgtgcgaatgttgcttcaagtactgcaggccctccccgctcaaggagaatccttcactacactggccagagaactcagcgcccggacttttagccggcatgtggtgcagcgccagcgtgtgtccggacaggtgcaggctctacagaatcattatcggaagtatttgtgcctacttgcatccgatgcggaggtgcccgagccctgcctcccccgacagtactgggaggagttgggcgcaccagaagctctgagggagcagccatggcccctccccgtacaaatggagctgggcaaactgctagctgaaatgctcgtgcaggcaactcagatgccttgttccctggataagcctcacaggagctctcgactcgtgccggtgctgtaccacgtctactctttcaggaacgtccagcagatcggtattctgaaaccacaccccgcctacgttcagctgctcgagaaggctgccgaacctaccctgacttttgaagccgtagatgttccaatgctgtgcccccccctgccatggacctctccccacagcggcgcctttcttctgagcccgaccaagctgatgcgtacagtggagggggctactcagcaccaggagctgctggagacttgtccccccaccgcactccatggggcattagacgcactgactcagctagggaactgcgcctggcgtgtgaacggcagggtgctggatctggtgctacagttgtttcaggccaaaggttgcccacaattgggggtccccgcacctccaagcgaagcaccacagccacccgaagcgcacctcccgcatagtgcagctcccgctagaaaagctgagctccggcgcgaacttgctcattgtcagaaggttgcgagagagatgcattctctgcgtgcagaagctctctaccggctgtctctggcccagcacctcagggacagagtgttctggttgcctcataacatggactttaggggtaggacgtacccctgcccacctcactttaatcacctgggctccgatgtggccagggcccttctggagttcgctcaaggtaggccgctcggcccacacgggctcgattggttaaaaatacatctggtcaatttgactgggctgaagaagcgcgagcccttgcgcaaaagattggccttcgcagaggaggttatggacgatattttagactcagccgaccaacctctaacagggaggaagtggtggatgggggccgaggagccatggcagacgctcgcctgttgcatggaggtggccaacgcagttcgggctagcgatccggcagcatatgtttcccatctgcccgtgcatcaggacggctcttgcaacggacttcagcactatgccgcactggggagggactcagtcggtgcagccagtgtcaacctcgaaccttcagacgtaccacaggatgtctatagtggagtggcagcccaggtggaagtatttcggcggcaggacgcacagcgagggatgcgtgtggctcaagtgttagaggggtttatcacaagaaaagtcgtcaagcagaccgtgatgactgtggtttacggagtgacccgatacggcggcaggctacagatcgaaaagagactccgcgagctcagcgatttcccacaggaatttgtctgggaagccagccactatcttgttcgccaggtgtttaaatccttacaggagatgttttccggcaccagagccatccagcactggctcacggaaagcgccaggctgatttcccacatggggtcagtggtggaatgggtgactcctcttggcgtacccgtaatacaaccctaccgactagattctaaagtcaagcagattgggggaggtattcaaagcattacatacacccataacggagacattagccggaagcccaacacacgcaagcagaaaaacgggtttccccccaacttcatccacagcttagattcctcccatatgatgttgacggcgctgcactgttatcgcaaaggcctgacctttgtgtctgtacatgattgttactggactcatgccgcagacgtgagtgtgatgaaccaggtgtgccgtgagcaattcgtgcggctgcacagcgaacctatcctccaagacctgagtagattcctagtgaagaggttttgctctgaacctcagaagatccttgaggccagccagctcaaggagacactgcaggcggtaccaaagcccggtgcattcgacctcgagcaggtgaaaaggagcacttatttcttcagctag

SEQ ID NO: 152278 - DNA, 3693 bp, Artificial Sequence
  derived and/or modified sequence
atgtctgctctctgttgggggaggggagctgctggtctcaagagggcactccgaccttgtgggagacctgggctccctggaaaagaagggacggcaggcggtgtgtgcggcccaagacgctccagtagcgccagtccgcaagagcaggatcaggatcgccgaaaggattggggacacgtcgagctactcgaagtgcttcaagcacgagtgagacagctgcaggcagagtcggtgtccgaagtggtcgtgaacagagtcgacgtcgctcgccttcccgaatgtggttccggagacgggtcactgcagcctccaaggaaggtgcaaatgggagctaaagatgctacccccgttccgtgtggcagatgggccaagatcctggaaaaagataagcgaacccagcagatgaggatgcagagactgaaagccaaactgcagatgccgtttcagtccggagagtttaaggcactcacacgcagactccaggttgaacctagactgctgagcaaacagatggcagggtgcctcgaagattgcacgcgccaggcacctgagtcaccatgggaggaacagctcgctcgcctgctgcaagaggccccaggcaagctcagcctggacgtggaacaggcaccaagtggccaacatagccaggctcaactcagtgggcagcagcaacggctgctggcgtttttcaagtgttgtctactgacagaccaactgcccctggcccatcatttgctggtcgtacaccatggacagcggcagaagaggaaactactaactctcgatatgtacaacgcagtaatgctgggttgggctcgtcaaggtgccttcaaagagcttgtctatgtcctcttcatggtgaaagacgcgggactcacccccgacctactgagttacgccgctgctttacaatgtatgggccgacaggaccaagacgccggtaccatcgaacgatgcctggagcagatgagtcaggaaggacttaagctccaggccctgttcaccgctgttctgttatcagaggaggatcgagccaccgttctgaaggctgtgcataaggtcaagccaacattttcactcccccctcagctcccacctcctgttaacacttcaaaactgctgcgcgacgtgtacgccaaagatggtagagtctcttatcccaagctccacctccccctaaagaccctgcagtgtctgttcgaaaaacagctccatatggagctggcaagccgggtatgcgtggtgagcgtagagaaaccaaccttgcctagtaaggaggtaaaacacgctaggaaaaccctcaagaccctacgggaccaatgggagaaagctctgtgccgagctttgcgtgaaaccaagaaccgactcgagagagaggtttacgaagggaggttttccctgtacccctttctgtgtctgctcgacgagagggaagtcgtgagaatgctgctacaggtgctacaggctttaccagcacagggggaaagttttacgaccctggccagagaactgagtgctaggactttttctcggcacgtcgtgcagagacagagagtgtctggacaggtacaagccctgcagaaccattacaggaagtacctgtgtcttttagccagtgacgcagaagtgccagaaccctgccttccacgtcagtactgggaagagctgggagctcccgaggcgcttagagaacaaccatggcctttgcccgttcagatggagctgggtaagctccttgccgagatgctcgtgcaggccactcagatgccttgctctttggacaaacctcatcggtcttcccgtctggtacctgtcctttatcatgtgtatagcttccggaacgtgcagcagatcgggatcctgaaaccccacccagcctatgtgcagctgcttgagaaggcagccgagccaactctcactttcgaggccgttgatgttcctatgctatgcccaccgcttccttggactagcccacacagcggcgcatttttgctgtctcccacaaagctcatgcgcaccgtcgaaggggcaacccaacaccaggagctcctggagacatgtccacccacagcgttacacggggctctcgatgcactgacgcagttgggcaactgcgcctggcgtgtgaacgggagagtgctggatttagttcttcagctgtttcaggctaaaggctgtccccagctcggggtaccagcgccaccatctgaagcccctcagccgccagaagcgcacttaccccattccgccgcacccgcacggaaggcagaactgaggcgtgagctggctcattgccagaaggtggccagggagatgcattccctgcgcgctgaagcactgtatagactctccctagctcaacacctgagagatcgggtcttttggctcccgcacaacatggattttagaggacgaacttacccatgccccccacacttcaaccaccttggcagtgacgtcgccagggccttactagaattcgcccagggcaggccactcggccctcatggtctggattggctgaaaatccatctcgtgaacttgaccggcctgaaaaaacgtgaaccattaaggaaacgcctggccttcgcagaggaggtgatggatgacattttggactccgcagatcagcccttgacagggagaaagtggtggatgggagcggaggaaccttggcagacactcgcatgttgcatggaagtcgccaatgcggtacgggcttccgatcctgctgcctacgtttcacacttgcctgtccatcaggacggcagctgtaatggactccaacactatgccgctctgggcagggactctgtgggcgctgctagtgtcaatctggagccttccgatgtgccacaggacgtgtatagcggagtggcagctcaggtagaggttttccgaaggcaggacgcccagcgcggtatgagagttgcacaagtcttagaaggcttcatcacacgtaaagtggtgaagcaaacggttatgaccgtcgtttacggggtgaccaggtatggagggcgtctgcagattgagaaacgcctcagggagctgtcagacttccctcaagaattcgtatgggaagccagccattacctggtgcggcaggtgtttaaatccttgcaggaaatgtttagcggcactcgggcaatccaacactggctgaccgaatccgccagactgatttcacacatgggtagtgtggtggagtgggttacaccattaggagtgcccgtgatccagccgtacagactcgacagtaaggtgaagcagatcggtggtggcattcagagcattacctatacccacaacggggatatctctcgcaagcctaatacccgaaaacaaaaaaacggcttcccacctaacttcatccattccctggactcttctcatatgatgttgacagcattgcattgctaccggaaaggtcttacctttgtttccgtgcatgactgttactggacgcacgcagctgacgtctctgtgatgaatcaggtctgtcgggagcaattcgtaaggctccattctgaaccaatactccaggacctttcccgattcctggtgaagcgcttttgttccgagcctcagaagatattggaggcctcccaattgaaagagactttgcaggcggtgcccaagcctggagccttcgacttagagcaagttaagcggtccacctacttttttagttag

SEQ ID NO: 152279 - DNA, 2652 bp, Artificial Sequence
  derived and/or modified sequence
atgaacacgattaacatcgctaagaacgacttctctgacatcgaactggctgctatcccgttcaacactctggctgaccattacggtgagcgtttagctcgcgaacagttggcccttgagcatgagtcttacgagatgggtgaagcacgcttccgcaagatgtttgagcgtcaacttaaagctggtgaggttgcggataacgctgccgccaagcctctcatcactaccctactccctaagatgattgcacgcatcaacgactggtttgaggaagtgaaagctaagcgcggcaagcgcccgacagccttccagttcctgcaagaaatcaagccggaagccgtagcgtacatcaccattaagaccactctggcttgcctaaccagtgctgacaatacaaccgttcaggctgtagcaagcgcaatcggtcgggccattgaggacgaggctcgcttcggtcgtatccgtgaccttgaagctaagcacttcaagaaaaacgttgaggaacaactcaacaagcgcgtagggcacgtctacaagaaagcatttatgcaagttgtcgaggctgacatgctctctaagggtctactcggtggcgaggcgtggtcttcgtggcataaggaagactctattcatgtaggagtacgctgcatcgagatgctcattgagtcaaccggaatggttagcttacaccgccaaaatgctggcgtagtaggtcaagactctgagactatcgaactcgcacctgaatacgctgaggctatcgcaacccgtgcaggtgcgctggctggcatctctccgatgttccaaccttgcgtagttcctcctaagccgtggactggcattactggtggtggctattgggctaacggtcgtcgtcctctggcgctggtgcgtactcacagtaagaaagcactgatgcgctacgaagacgtttacatgcctgaggtgtacaaagcgattaacattgcgcaaaacaccgcatggaaaatcaacaagaaagtcctagcggtcgccaacgtaatcaccaagtggaagcattgtccggtcgaggacatccctgcgattgagcgtgaagaactcccgatgaaaccggaagacatcgacatgaatcctgaggctctcaccgcgtggaaacgtgctgccgctgctgtgtaccgcaaggacaaggctcgcaagtctcgccgtatcagccttgagttcatgcttgagcaagccaataagtttgctaaccataaggccatctggttcccttacaacatggactggcgcggtcgtgtttacgctgtgtcaatgttcaacccgcaaggtaacgatatgaccaaaggactgcttacgctggcgaaaggtaaaccaatcggtaaggaaggttactactggctgaaaatccacggtgcaaactgtgcgggtgtcgataaggttccgttccctgagcgcatcaagttcattgaggaaaaccacgagaacatcatggcttgcgctaagtctccactggagaacacttggtgggctgagcaagattctccgttctgcttccttgcgttctgctttgagtacgctggggtacagcaccacggcctgagctataactgctcccttccgctggcgtttgacgggtcttgctctggcatccagcacttctccgcgatgctccgagatgaggtaggtggtcgcgcggttaacttgcttcctagtgaaaccgttcaggacatctacgggattgttgctaagaaagtcaacgagattctacaagcagacgcaatcaatgggaccgataacgaagtagttaccgtgaccgatgagaacactggtgaaatctctgagaaagtcaagctgggcactaaggcactggctggtcaatggctggcttacggtgttactcgcagtgtgactaagcgttcagtcatgacgctggcttacgggtccaaagagttcggcttccgtcaacaagtgctggaagataccattcagccagctattgattccggcaagggtctgatgttcactcagccgaatcaggctgctggatacatggctaagctgatttgggaatctgtgagcgtgacggtggtagctgcggttgaagcaatgaactggcttaagtctgctgctaagctgctggctgctgaggtcaaagataagaagactggagagattcttcgcaagcgttgcgctgtgcattgggtaactcctgatggtttccctgtgtggcaggaatacaagaagcctattcagacgcgcttgaacctgatgttcctcggtcagttccgcttacagcctaccattaacaccaacaaagatagcgagattgatgcacacaaacaggagtctggtatcgctcctaactttgtacacagccaagacggtagccaccttcgtaagactgtagtgtgggcacacgagaagtacggaatcgaatcttttgcactgattcacgactccttcggtaccattccggctgacgctgcgaacctgttcaaagcagtgcgcgaaactatggttgacacatatgagtcttgtgatgtactggctgatttctacgaccagttcgctgaccagttgcacgagtctcaattggacaaaatgccagcacttccggctaaaggtaacttgaacctccgtgacatcttagagtcggacttcgcgttcgcgtaa

SEQ ID NO: 152280 - protein, 132 aa, Artificial Sequence
  derived and/or modified sequence
MTMVDTEMPFWPTNFGISSVDLSVMEDHSHSFDIKPFTTVDFSSISTPHYEDIPFTRTDPVVADYKYDLKLQEYQSAIKVEPASPPYYSEKTQLYNKPHEEPSNSLMAIECRVCGDKASGFHYGVHACEGCK

SEQ ID NO: 152281 - protein, 99 aa, Artificial Sequence
  derived and/or modified sequence
MTMVDTEMPFWPTNFGISSVDLSVMEDHSHSFDIKPFTTVDFSSISTPHYEDIPFTRTDPVVADYKYDLKLQEYQSAIKVEPASPPYYSEKTQLYNKPH

SEQ ID NO: 152282 - protein, 43 aa, Artificial Sequence
  derived and/or modified sequence
MTMVDTEMPFWPTNFGISSVDLSVMEDHSHSFDIKPFTTVDFS

SEQ ID NO: 152283 - DNA, 1434 bp, Artificial Sequence
  derived and/or modified sequence
atgaccatggtagacactgagatgccgttttggcccaccaactttggtatctcatctgtggacttgtctgtgatggaagatcacagccactctttcgatattaaaccgttcacgaccgtggactttagtagcataagcactccccattacgaggacatcccttttaccagaacagaccccgtagtcgccgattataagtacgacttaaaactccaggagtaccaaagcgccatcaaagtcgaacccgctagcccaccttactattcagagaagacacaattgtataacaagccccatgaagagccatccaacagtctaatggcaatcgaatgtcgcgtttgtggcgacaaagcttctgggtttcactatggggtccacgcttgcgaaggctgcaagggcttcttcagacgaactatcagactcaaattaatctacgatcgctgcgacttaaactgccgcatacataaaaaaagccggaataagtgccaatactgccggtttcagaagtgcctggctgtagggatgtcccacaacgccattaggttcggcagaatgccacaggcagagaaagaaaagctcctggctgaaatatccagcgacatcgatcagctgaatccagagagtgctgatttaagggcgctggctaagcacctgtatgatagctatataaagagttttcccttaacaaaggcaaaagccagggccatcctcacgggaaagaccactgataagtccccgttcgttatctacgacatgaattccctcatgatgggggaagataagatcaagttcaagcacatcactccactgcaggaacagtcaaaggaagtggcgatcaggatctttcagggttgccagtttcgcagcgtggaagcagtacaggaaataactgagtatgcgaagagcatccctggcttcgtgaaccttgatctgaatgaccaagtaacactgttaaaatacggggttcacgaaatcatctacaccatgctggcctctctgatgaacaaggatggcgtgctgatcagcgagggacaaggctttatgactcgcgaattcctcaagagtcttcgtaagccctttggcgatttcatggagcctaaattcgagtttgctgtgaaattcaacgcattggagttagatgattcggacttggctatctttatcgccgtgattatcctttccggggacaggccggggcttctcaacgtcaagccaatagaggacatccaggacaaccttctccaagcactggagttacaactcaaactcaatcatccagagtcttcccaactgtttgctaagctgctgcagaagatgaccgacctgcgacaaattgtcactgagcacgtacaactgctgcaagtgattaagaaaacagagacagatatgtctctgcaccctttgctgcaagagatttataaagacctgtactag

SEQ ID NO: 152284 - DNA, 1434 bp, Artificial Sequence
  derived and/or modified sequence
atgaccatggtcgacactgagatgcccttctggcctacgaacttcgggatttcctccgtcgatttgagcgtcatggaggaccatagccattccttcgacataaagccatttactacagtggactttagttccatctctacaccccactatgaggatatcccattcacacggactgaccctgttgttgcggactataagtacgacctgaaacttcaagagtatcagtccgcgattaaggtggaacccgcatcgcccccctattacagcgaaaaaactcagctctacaacaaaccccacgaggagccatctaattctctgatggcaattgagtgtagagtttgcggggataaagcatccggatttcactacggtgtccatgcttgtgagggatgcaaggggttttttaggcgcactattcgactgaagctgatttacgatagatgcgacttaaactgcagaatccacaagaaaagccgcaacaagtgtcagtattgccgtttccagaagtgtttggcagtggggatgagtcataatgctatccgcttcggcaggatgccccaggccgaaaaagagaagctgctggctgagatttcctccgacatcgatcagctcaatcccgaatctgctgacctacgcgccctcgccaaacacctctacgattcttacatcaagtcctttcctttaaccaaagctaaagctcgtgcaatcctgaccgggaagacaactgataaatctccctttgtcatttacgacatgaactccctgatgatgggggaagacaaaattaagttcaagcacataaccccccttcaggagcagagcaaggaggtggcgatccggattttccagggctgtcagtttcggagtgttgaagctgtgcaggaaatcacagagtacgctaagtctatcccgggatttgtgaacctcgacctgaatgatcaggtgacactcctgaaatatggggttcatgagatcatttacaccatgctagcaagcctgatgaataaagacggagtgttaattagtgagggccagggtttcatgacacgggagttcttgaaaagcttgcgcaagccattcggcgactttatggaacccaagttcgaatttgccgtcaaattcaatgccttagagcttgacgattcagacctagctatttttattgctgtcattatcttaagcggagaccgccccgggcttctgaatgttaagccaatcgaggatatccaggacaacctgctgcaagctttggagttgcagctgaagttgaaccaccccgagtccagtcaactgttcgccaagctgctacagaaaatgacagacctccggcagattgtcactgaacacgtccagctcctgcaggttattaagaagacagagacggacatgtccctgcatcctctgctgcaggaaatctacaaggacctgtactag

SEQ ID NO: 152285 - DNA, 1434 bp, Artificial Sequence
  derived and/or modified sequence
atgacgatggttgacactgaaatgccgttctggcccacaaatttcggcatctcctctgtggatctttctgtgatggaggaccattcccactccttcgatatcaagcccttcacaacggtcgactttagctcaatatccaccccacattatgaggacattcctttcacccgcactgatccagtagtggccgattacaaatatgatctgaaacttcaggagtaccagtctgctatcaaagtggaacctgcttcacccccttattacagtgagaaaacccagctctataacaagccccacgaggagccatccaattcactaatggcgatcgaatgccgcgtgtgcggggataaagcttcaggattccactacggtgtacatgcgtgtgaagggtgcaaaggtttctttagaagaaccataagattaaaattgatttacgataggtgtgacttgaactgccgcattcacaagaagagccggaacaagtgccaatactgtcgtttccaaaaatgcctggccgtgggtatgagtcataatgcgattcgatttgggcggatgccccaggcggaaaaggaaaagctactggccgaaatttcctcggacatcgatcagctgaatccggaatccgcagatctgagagccttggctaaacacttgtacgattcctatattaaatcttttccactgaccaaggcaaaggctagggccattcttaccggtaagacaacagacaaatctcctttcgtgatttacgatatgaacagcttgatgatgggcgaggataagatcaagttcaagcacatcacaccactacaggagcaatctaaggaggtggccattcgcatttttcagggatgccagtttcgtagtgtggaggctgtgcaggaaattaccgagtacgcgaaaagcattcctgggttcgtgaatctggaccttaatgatcaagtgaccttgctaaagtacggtgtgcacgagattatatacaccatgctcgcgagcttaatgaacaaagacggcgtgctcatcagcgagggacaagggtttatgacaagggaattcctgaagtcattaaggaagcctttcggcgacttcatggagcccaaattcgaatttgcagttaagtttaacgcgctcgaactggacgattcagatctggcgatatttatcgcagttataatcttgagcggtgacagacccggactgctgaatgtaaagcccatcgaggacatacaggataacctgctgcaggctcttgaactgcagctgaagctaaaccatccagagtcttcccaactcttcgccaaactactgcaaaagatgacagatctgcggcaaatcgtgacagagcacgtgcaactgctgcaagtgatcaaaaaaacagaaacagatatgtctttgcaccccttactgcaggagatctataaggacctttattag

SEQ ID NO: 152286 - DNA, 1434 bp, Artificial Sequence
  derived and/or modified sequence
atgactatggtcgatactgaaatgccattctggccaacaaacttcggaattagtagcgtggatctgtccgtgatggaggatcactctcacagcttcgacatcaagcccttcaccacggttgacttctcttccatcagcacacctcactacgaagacatccctttcactagaacagatccagtggttgccgattataagtatgacttgaagctccaggaatatcagtccgcaatcaaggtcgaacctgcatcccccccgtattactctgaaaaaacccaattgtataataagccacatgaggagcccagtaattcactcatggctattgagtgtcgggtttgcggcgacaaagctagtgggttccactacggagtccacgcctgtgaaggatgcaaaggtttttttagacgcacaattagactcaaactgatctacgatcgatgtgacctcaactgccggatccacaaaaagagccggaacaagtgccagtattgtagatttcagaagtgtctggccgtagggatgtcccacaatgccattagatttggtagaatgccccaggctgaaaaagaaaaactgttagccgagatatcaagcgatattgaccagctcaacccagagtctgcagacctaagagccctggccaagcatctgtatgactcgtatattaaaagtttccccctgactaaagcaaaggcacgcgccattctcacaggtaaaacaacggacaaatccccctttgttatttacgacatgaattcgctgatgatgggagaggacaaaatcaaattcaagcacatcacgccacttcaggaacagagcaaagaggtggcaatccgaatcttccagggctgccagttccgtagtgtggaggccgtgcaggaaattacggagtacgccaaatccattccgggtttcgtgaacctggacctcaacgaccaggtgactcttctcaagtatggggtccatgaaattatttacactatgctagcaagtctaatgaacaaggacggcgtccttatttcagaggggcagggatttatgacccgggagtttcttaaaagcctccggaaaccttttggagactttatggagccaaaattcgaattcgcggtgaaattcaatgccctggagctggacgacagcgaccttgccatctttatcgcagtcatcatcctgagcggtgaccgtccagggctgctaaatgttaaaccgatagaggacatccaggacaacctcctacaggctctcgagttacaactgaaactgaatcatcctgagtcctcccagcttttcgctaaactgctccagaaaatgacggacctgcgccagatcgtgaccgaacacgtccagctcctacaagtaatcaagaaaaccgagactgatatgtctttacaccccctcttacaggagatttataaggatctctattag

SEQ ID NO: 152287 - DNA, 1434 bp, Artificial Sequence
  derived and/or modified sequence
atgaccatggtggacacagagatgcccttctggcccaccaactttggcatcagctctgtggacctgtctgtgatggaggaccacagccacagctttgacatcaagcccttcaccaccgtggacttcagcagcatcagcaccccccactatgaggacatccccttcaccaggacagatcctgtggtggccgactacaagtatgacctgaagctgcaggagtaccagagcgccatcaaggtggagcccgccagccccccctactacagcgagaagacccagctgtacaacaagccccatgaggagcccagcaacagcctgatggccatcgagtgccgggtgtgtggggacaaggccagcggcttccactatggagtgcacgcctgtgagggctgcaagggcttcttccggaggaccatccggctgaagctgatctatgacagatgtgacctgaactgccgcatccacaagaagagcaggaacaagtgccagtactgccgcttccagaagtgcctggccgtgggcatgagccacaatgccatccgcttcggccgcatgccccaggccgagaaggagaagctgctggccgagatcagcagtgacatcgaccagctgaaccctgagagcgctgacctgcgggccctggccaagcacctgtatgacagctacatcaagagcttccccctgaccaaggccaaggcccgggccatcctgaccgggaagaccacagacaagagcccctttgtgatctatgacatgaacagcctgatgatgggagaggacaagatcaagttcaagcacatcacccccctgcaggagcagagcaaggaggtggccatccgcatcttccagggctgccagttccgctctgtggaggccgtgcaggagatcacagaatatgccaagagcatccctggctttgtgaacctggacctgaatgaccaggtgaccctgctgaagtatggagtgcatgagatcatctacaccatgctggccagcctgatgaacaaggatggagtgctgatcagcgagggccagggcttcatgacccgggagttcctgaagagcctgaggaagccctttggagacttcatggagcccaagtttgaatttgctgtgaagttcaatgccctggagctggatgacagcgacctggccatcttcatcgctgtgatcatcctgagcggggaccggcccggcctgctgaatgtgaagcccatcgaggacatccaggacaacctgctgcaggccctggagctgcagctgaagctgaaccaccctgagagcagccagctgtttgccaagctgctgcagaagatgacagacctgcggcagatcgtgacagaacatgtgcagctgctgcaggtgatcaagaagacagaaacagacatgagcctgcaccccctgctgcaggagatctacaaggacctgtactag

SEQ ID NO: 152288 - DNA, 1434 bp, Artificial Sequence
  derived and/or modified sequence
atgaccatggtggacaccgagatgcccttctggcccaccaacttcggtatttcttcagtagatctctccgtaatggaggatcattcacactcctttgatatcaagccatttacaaccgttgacttcagcagcatctcaacaccccactacgaagacatcccgttcactaggaccgacccggtcgtggccgattataagtatgatttgaagctgcaggaataccagtccgccatcaaggtggagccggcctcaccgccttactacagcgagaaaacacagctgtataataagccccacgaggaaccgagcaacagtctgatggcaattgaatgtcgcgtctgcggtgataaggctagtggattccattacggggtccacgcttgcgagggttgcaagggcttttttaggcgtacgatcaggttgaaactgatctatgaccgatgtgacctgaattgcaggatacacaaaaagtcacgtaacaaatgccagtactgccggttccagaagtgcctggccgtgggaatgtctcacaacgcaatacggttcgggcgcatgccccaggctgagaaagagaaattattggccgaaatcagcagcgacattgaccagctcaacccagagagcgcagacctccgcgcacttgccaaacacctgtatgacagctatataaagagtttccctcttacaaaggccaaggctagagccatcctcaccgggaagactacagacaaatcccccttcgtaatctacgacatgaacagcttgatgatgggcgaagataaaattaagttcaagcacatcactccactgcaggaacagagtaaggaggtggcaatacggatcttccagggatgtcagtttagaagcgtagaggctgtgcaggaaattacagagtacgcaaagagtatacccggtttcgtaaatcttgatctgaatgaccaggtgaccctgttgaagtacggggttcacgaaatcatttacacgatgttagcgtctcttatgaacaaagacggcgtgctcattagtgaggggcaaggctttatgaccagggagtttctcaagagcctaaggaagccctttggcgacttcatggagccaaagttcgagtttgctgtgaaatttaacgctctggaactggatgacagcgacctcgcgatctttatcgccgtgattatactctccggcgatagaccagggcttctgaatgtgaagcccattgaggacatccaggacaatctgctgcaggccctggagctgcagctaaaactgaatcaccccgagtcttctcagctctttgcaaagttactgcagaaaatgacagatctaaggcaaatcgtcacagaacacgtgcaactgctgcaggtgataaagaaaacagaaactgacatgagtttacaccccctacttcaggagatttacaaagatctgtattag

SEQ ID NO: 152289 - DNA, 1434 bp, Artificial Sequence
  derived and/or modified sequence
atgaccatggtggacaccgagatgcccttctggcccaccaacttcggaatttcctcggtcgatctgtctgtaatggaggaccacagccacagcttcgacattaagccctttaccacagttgatttctcaagcatctcaacaccgcactacgaagatatcccctttactcgtacagaccccgtggtagccgactataagtatgacctaaagctgcaagaataccagtccgccattaaggtagagccagcatcccctccttactactctgagaagacacagctgtacaataaaccacacgaggagccctccaactcgctgatggccatcgaatgcagagtgtgcggagacaaagcatccgggtttcactacggcgtgcacgcctgcgaagggtgcaagggcttcttccgccgtactatacggctgaagctcatctatgatcgatgcgacctcaactgtaggattcacaagaagtctcgaaacaagtgtcagtactgccgctttcagaagtgtctggcggtgggaatgagtcacaacgcgatacggttcggtcggatgcctcaagccgagaaggagaaactgctggctgagatctcatcagacatcgaccaactcaaccccgagtctgccgatctcagggccctagccaagcacctctatgatagctacatcaagtccttccctctgaccaaagctaaagcaagggcaatacttacaggaaagacaaccgacaaatccccatttgtaatttacgatatgaatagcttaatgatgggagaggataaaattaagttcaagcacattacaccactgcaagagcaatctaaagaggtggccatccggatctttcagggctgtcagtttcgaagcgtcgaagcagttcaggagatcactgagtacgctaaaagtattcctggtttcgtcaacctggatcttaacgaccaggttacactgctcaaatacggggttcatgaaataatctacaccatgcttgcttctctgatgaataaagacggggtgttgattagcgaaggccagggattcatgactcgggaattcctaaagagtctgagaaaaccattcggggatttcatggagccaaaattcgaattcgctgtgaaattcaacgccctggagctggacgacagtgatctggcaattttcattgcggtgattattctttcaggggaccggccaggactgctcaacgtaaagcctattgaagatatccaggacaacctactccaggcgctggagctgcagctgaaattgaatcatccagagagcagccagctgtttgccaagctcctgcagaagatgaccgatctgcgccagatcgtcactgagcacgtgcagctcctgcaggttataaaaaaaacagagacggacatgagtctgcatccattgctgcaagagatttacaaagatctctattag

SEQ ID NO: 152290 - DNA, 1434 bp, Artificial Sequence
  derived and/or modified sequence
atgaccatggtggacaccgagatgcccttctggcccaccaacttcggaataagctcggtcgatctgagtgttatggaggatcacagccactctttcgatattaagcccttcacaacggtagacttttcctcaatcagcacgccacattacgaagacatccccttcaccaggaccgacccggtggttgccgactataagtacgatctcaagttacaagagtaccagtccgccatcaaggtggaacccgcctcccctccatactactcagaaaaaacgcagttatacaataagccccatgaagagccaagcaacagcctgatggctatcgagtgtcgcgtttgtggggataaggccagcgggtttcattatggcgtccacgcctgcgagggttgcaaaggcttctttcgccgcacaattagacttaagctgatctatgacaggtgcgatttgaattgtagaatacataagaagtcccggaataagtgtcagtattgtagattccagaaatgtctggccgttgggatgagtcataatgccattcggtttggcagaatgcctcaggccgaaaaggaaaagttgttagcagagatatccagtgatatcgatcagttaaaccccgagtccgcggatcttcgggcgctcgcgaagcatctgtacgactcctacatcaaatcattccccctgacgaaggccaaagcacgggccattttgacaggcaaaacaacagacaaatcaccattcgtgatctacgacatgaatagcctgatgatgggtgaggataagatcaaatttaagcatatcacgccattgcaggagcagtccaaagaggtcgctattagaatattccagggatgtcagtttcgttccgtcgaggccgtgcaagaaatcacagagtacgccaagtccattccgggattcgtgaatcttgacctgaatgatcaagtcacccttctgaagtacggcgtgcacgaaattatttacaccatgcttgcttcccttatgaacaaggatggcgtcctgattagtgaaggccaaggcttcatgacccgtgaattcctgaagtctttgcggaaaccatttggcgatttcatggagcccaaattcgagttcgccgttaaattcaatgcattggagctggatgatagcgatttggctattttcatcgccgtgattatcctttctggcgataggccggggctcttgaatgtaaaaccgatcgaagatattcaagataacctgttacaagccctggaactgcagctcaaactgaatcaccctgagtcatctcagttatttgctaagctactgcagaagatgacggatctaagacagatcgtcacggaacacgtccaactgctgcaagtgattaaaaaaaccgaaactgacatgtctttgcatccgctgctgcaggagatctataaagatctttactag

SEQ ID NO: 152291 - DNA, 1434 bp, Artificial Sequence
  derived and/or modified sequence
atgaccatggtggacaccgagatgcccttctggcccaccaacttcggaatctcatcagtcgacttgtccgttatggaagaccactctcactccttcgacattaagccatttaccactgtggatttcagcagtatctcaactccccactatgaggacatcccttttacgcgaactgatcctgtggtcgctgactacaaatatgacctaaagctacaggagtaccagtccgccatcaaagtcgagcctgcctctcctccctactacagtgaaaagacccagctgtacaataaaccccacgaagaaccaagcaatagcctcatggccattgaatgtcgggtctgtggggacaaggcttcaggattccactacggagtgcacgcttgtgaggggtgcaagggcttcttccgtcggaccatccgcctgaagctcatttatgatcggtgcgatctgaactgccgtatccataagaaaagccgcaataagtgccagtactgtaggtttcaaaagtgtttagctgttggaatgtcccacaatgccattagatttggcaggatgcctcaggctgaaaaggagaagctgttggcagagatttcaagcgacattgaccagcttaatccagagagcgcagatctccgagccctcgccaagcacctctatgacagttacatcaaaagcttccctctgacaaaggccaaggctcgcgcaatcctaactggtaagacaactgataagtcaccatttgtgatctacgatatgaatagcctgatgatgggtgaggacaaaataaagttcaagcacataaccccattgcaagaacagtcgaaggaggttgccattaggattttccagggctgtcaattcaggtccgtggaagcagttcaggagattaccgagtacgctaaatcaatccccggcttcgtcaacctggatctgaacgaccaagtcacacttcttaagtacggcgtgcacgaaataatatataccatgttggcttccttaatgaacaaggacggcgtgcttattagtgagggccagggcttcatgacccgagagtttctcaaatctctgcggaagccgttcggcgatttcatggaacctaaattcgaattcgctgtgaagtttaacgcactggagctggacgactctgatttggccattttcatcgccgtaatcattttaagtggtgacagacccggcctcctgaatgtgaaacccatcgaggacatccaggataatctgctgcaggccctggaattacagctcaaactgaaccacccagaatcttctcagctattcgcaaagttgttacagaagatgactgatctgcggcaaatcgttacggaacacgttcagctcctccaagtcattaagaaaactgagacagacatgagcctacatcccctccttcaggaaatatacaaggacctctattag

SEQ ID NO: 152292 - DNA, 1434 bp, Artificial Sequence
  derived and/or modified sequence
atgaccatggttgacaccgaaatgccgttttggcctactaattttggcatcagttctgtcgatttatcagtcatggaggatcactcccatagctttgatattaagccgttcaccacagtcgacttttcgtctatttccacgcctcattatgaggatatacctttcaccagaactgaccccgtggtcgctgattataaatacgatctgaaattgcaggagtaccagagcgctatcaaagtagagcccgctagtcccccatattacagcgagaagactcagctttataacaagccacacgaggaacccagcaacagcttgatggctatcgagtgccgtgtgtgcggggataaggccagtgggttccactacggagttcatgcatgcgaaggctgcaagggattcttccggaggacgatccgcctcaagctgatttatgaccggtgcgatcttaattgccgtatccacaagaaaagtcgcaacaaatgtcagtattgtcggttccagaagtgcttagcagtgggcatgtcgcacaatgcaattcggttcggacgaatgccacaggccgagaaggaaaagctgcttgccgagatctcaagcgatatcgaccagctaaacccggagtccgcagacctccgggcactggcaaagcatctatatgatagttatattaaaagttttccattgaccaaagccaaggccagggcaatcctcaccgggaaaaccactgataaatctcctttcgtgatttacgatatgaactcactgatgatgggagaggacaagattaaattcaagcatattactcctctgcaggagcagtcaaaagaagtggccataaggatctttcaggggtgtcagtttagatccgtcgaagccgttcaagaaatcactgaatatgccaaaagcattccaggatttgtaaacttagatctaaacgaccaagttacactgctcaaatacggtgtgcacgaaattatctatactatgctagcatcccttatgaataaagacggcgtactcatttctgagggtcagggctttatgacacgggaattcctgaaatcattgcggaaaccgtttggagactttatggagccgaaattcgagttcgccgtgaagttcaacgccttggagctcgatgattctgatctggccatattcattgcagtgattatactgagcggcgacaggcccggactgcttaacgtgaagcccatcgaggacattcaagacaacctcctgcaggcactggagctgcagctcaaacttaatcaccctgaatcatctcagctttttgctaagcttctgcaaaagatgacagacctgaggcagattgtcacggagcatgttcagctgcttcaggtcatcaaaaaaaccgaaacagacatgagtcttcaccctctgctgcaggaaatatacaaggatctctactag

SEQ ID NO: 152293 - DNA, 1434 bp, Artificial Sequence
  derived and/or modified sequence
atgaccatggtggacaccgagatgcctttctggccgacaaattttgggatcagttccgtggatctgagtgtgatggaagaccacagtcactccttcgatatcaaaccttttaccacagtagacttttcttctatatccacgcctcattatgaagacattccatttactcgcacagaccctgtggtggctgattataagtatgacttaaagcttcaagaataccagagcgccattaaagtggaaccagcctcacctccatactactcagagaaaacgcaactgtacaataagccacacgaagagccatcaaacagcctgatggcaatcgaatgtcgcgtgtgcggcgacaaagccagcgggttccattatggcgtccatgcctgcgaagggtgcaaaggcttcttcaggaggactatccgcctgaaactaatctatgataggtgtgacttgaactgcagaatccacaaaaaatcgaggaacaaatgccagtactgtcggttccagaaatgtctagcggtgggaatgtctcacaatgcgatcagatttggccgtatgcctcaggcggaaaaggaaaagcttttggcggagatcagctccgatattgaccagctgaacccagagtccgctgacttgcgcgctctcgcaaaacacctatatgattcctacatcaagtcattccctctaactaaagctaaagcccgtgccattttgaccggcaagactactgataaatccccgttcgtgatttatgacatgaattccctcatgatgggagaggataagatcaagtttaaacacatcacccctctgcaggagcagagtaaggaggtggccatacgtattttccagggttgtcagttccgtagtgttgaagccgtgcaggagatcactgagtatgcgaagagcatacctggattcgtcaacctggatctaaatgatcaggtgacacttctgaaatatggagtccacgaaataatttataccatgcttgccagcctgatgaataaggatggggtcctcatctccgaaggccagggattcatgactcgggaatttctgaaatctttaagaaagccttttggcgatttcatggaacctaaattcgaattcgcagttaaatttaacgccctcgagctcgatgactctgatctggccatctttatagccgtgatcattctctcgggggatcggcctggccttctcaatgtgaagcctatcgaagacatccaggacaatctgttgcaggcactagaactgcagctgaaactaaatcacccggagagcagtcagctcttcgctaaattactccagaagatgactgacctaaggcaaattgtgactgagcacgtgcaactcctgcaggtgatcaagaagactgagaccgacatgagcctgcaccctttgctgcaagagatctacaaggacctgtattag

SEQ ID NO: 152294 - DNA, 1434 bp, Artificial Sequence
  derived and/or modified sequence
atgactatggtcgatactgaaatgcctttttggccgaccaatttcggtatcagttcagttgacctaagcgttatggaagatcattctcactcattcgatatcaagccttttacaaccgtggatttttctagcatcagtaccccccactacgaggacatcccttttacccggacagatcccgttgtggcagattacaagtatgatctcaaactgcaggagtaccagtccgctataaaggtggaacctgcctcacctccatattactctgagaagacgcaattgtataacaagcctcacgaggagccgtcaaacagcctgatggctatcgagtgtagggtttgcggagataaggctagcggctttcattacggtgtccacgcttgtgagggctgtaagggtttcttccgacgcactatccgactgaaactcatttacgatcggtgtgatttgaactgtcggatccacaagaagtcccgaaataagtgtcagtattgtaggttccagaaatgtttagccgttgggatgtcacataacgccatcagattcggcaggatgccccaagccgagaaagaaaagctgctggccgaaatttctagcgacatagatcagttgaatcccgagtccgccgacctccgagcactggccaagcatctgtatgattcctacatcaagtctttcccgcttacaaaggctaaggcccgagctatcttaaccggcaagacgacagacaagtcccctttcgtcatctatgacatgaatagtttgatgatgggcgaggataaaattaagttcaagcacatcacgccactccaggaacagagtaaagaggttgccatacgcattttccaagggtgtcagtttaggtccgtcgaagcagtgcaggagatcacagagtatgccaaatctattccagggttcgtgaacctggatttgaacgaccaagtgactctgcttaaatacggggtgcacgagatcatttacacaatgcttgcctcactcatgaacaaagacggcgtgctgatatctgaaggtcaggggttcatgacccgcgaattcctgaaaagtctgaggaagccctttggcgattttatggagcctaagttcgagtttgccgttaagtttaacgcgttagagctggacgatagcgatctcgcaatctttatcgctgtgatcatcctgtctggagatcgtcccggtctgctaaatgtgaagccaatagaagatatccaggataatctgctgcaggctttagagttacagctgaagcttaatcatccagagagctctcagctgttcgccaagcttctccagaagatgaccgatctgcgacagatcgtgacagaacacgtacagctgttgcaggtaattaaaaaaactgagaccgacatgagcctgcaccccctactgcaagagatttataaagacctgtactag

SEQ ID NO: 152295 - DNA, 1434 bp, Artificial Sequence
  derived and/or modified sequence
atgaccatggttgataccgaaatgcctttctggccgactaacttcggaatttcttccgtagacttgtccgtcatggaagaccactcccacagctttgacattaagcctttcaccaccgtcgatttctcctccattagcactccccattatgaagatattccatttactaggactgatccagtcgtagccgactacaagtatgacctgaaactacaggaataccaaagcgcaattaaagtcgaacccgcatcccctccttactactctgagaagacccagctatataacaagccacacgaggagccttcgaactcattgatggcgatcgaatgccgagtttgcggggataaagcctcgggatttcactacggggtacacgcctgtgagggctgcaagggcttcttcagacggacaattaggctgaagcttatctatgatcggtgtgacttgaactgccgaatccacaagaagtctcgaaacaaatgccaatattgtcgattccagaagtgtctggctgtcggcatgagccataatgctatcaggttcggcaggatgccacaagcagaaaaggagaagttgctcgctgagatctcctctgacatcgatcagttgaaccctgagtctgcagatctgagggccctggccaaacatctatacgactcatatatcaagtcattccctctcacaaaggccaaggccagggccatactcacaggtaaaaccaccgataagtcaccattcgtaatttatgacatgaactcactaatgatgggcgaggacaagattaagttcaagcacatcactcctctgcaagaacagtccaaggaagtggctatcagaatattccagggatgccagttcaggagtgtggaagccgtgcaggagattacagaatacgcaaagagtattccaggatttgtgaacctggacctgaatgatcaagtgaccttgctaaagtacggcgtgcacgaaataatttacacaatgctggcgtccctgatgaacaaggacggcgttctgattagtgaggggcaggggttcatgactcgcgagtttctcaaatccttaaggaaaccgttcggcgactttatggaaccgaagtttgaattcgccgtgaaattcaacgctttggagctggacgattccgatctggcaatcttcatcgctgtgattatcctgtctggagacaggccaggcctgctgaacgtgaaacccatagaagacatccaggataatctactccaggccctggaattgcagctgaagttgaaccaccctgagagctcccagctgttcgcgaaactgctgcaaaagatgacggacctccgtcagatcgtcacagagcacgtccaacttttgcaagtgatcaagaaaacggagactgatatgtcactgcaccccctgctgcaggagatctataaagacctgtattag

SEQ ID NO: 152296 - DNA, 1434 bp, Artificial Sequence
  derived and/or modified sequence
atgaccatggtggacaccgagatgcccttctggcccaccaacttcggcatcagcagcgtggacctgagcgtgatggaggaccacagccacagcttcgacatcaagcccttcaccaccgtggacttcagcagcatcagcaccccccactacgaggacatccccttcaccagaaccgaccccgtggtggccgactacaagtacgacctgaagctgcaggagtaccagagcgccatcaaggtggagcccgccagccccccctactacagcgagaagacccagctgtacaacaagccccacgaggagcccagcaacagcctgatggccatcgagtgcagagtgtgcggcgacaaggccagcggcttccactacggcgtgcacgcctgcgagggctgcaagggcttcttcagaagaaccatcagactgaagctgatctacgacagatgcgacctgaactgcagaatccacaagaagagcagaaacaagtgccagtactgcagattccagaagtgcctggccgtgggcatgagccacaacgccatcagattcggcagaatgccccaggccgagaaggagaagctgctggccgagatcagcagcgacatcgaccagctgaaccccgagagcgccgacctgagagccctggccaagcacctgtacgacagctacatcaagagcttccccctgaccaaggccaaggccagagccatcctgaccggcaagaccaccgacaagagccccttcgtgatctacgacatgaacagcctgatgatgggcgaggacaagatcaagttcaagcacatcacccccctgcaggagcagagcaaggaggtggccatcagaatcttccagggctgccagttcagaagcgtggaggccgtgcaggagatcaccgagtacgccaagagcatccccggcttcgtgaacctggacctgaacgaccaggtgaccctgctgaagtacggcgtgcacgagatcatctacaccatgctggccagcctgatgaacaaggacggcgtgctgatcagcgagggccagggcttcatgaccagagagttcctgaagagcctgagaaagcccttcggcgacttcatggagcccaagttcgagttcgccgtgaagttcaacgccctggagctggacgacagcgacctggccatcttcatcgccgtgatcatcctgagcggcgacagacccggcctgctgaacgtgaagcccatcgaggacatccaggacaacctgctgcaggccctggagctgcagctgaagctgaaccaccccgagagcagccagctgttcgccaagctgctgcagaagatgaccgacctgagacagatcgtgaccgagcacgtgcagctgctgcaggtgatcaagaagaccgagaccgacatgagcctgcaccccctgctgcaggagatctacaaggacctgtactag

SEQ ID NO: 152297 - protein, 370 aa, Artificial Sequence
  derived and/or modified sequence
MSHPSPQAKPSNPSNPRVFFDVDIGGERVGRIVLELFADIVPKTAENFRALCTGEKGIGHTTGKPLHFKGCPFHRIIKKFMIQGGDFSNQNGTGGESIYGEKFEDENFHYKHDREGLLSMANAGRNTNGSQFFITTVPTPHLDGKHVVFGQVIKGIGVARILENVEVKGEKPAKLCVIAECGELKEGDDGGIFPKDGSGDSHPDFPEDADIDLKDVDKILLITEDLKNIGNTFFKSQNWEMAIKKYAEVLRYVDSSKAVIETADRAKLQPIALSCVLNIGACKLKMSNWQGAIDSCLEALELDPSNTKALYRRAQGWQGLKEYDQALADLKKAQGIAPEDKAIQAELLKVKQKIKAQKDKEKAVYAKMFA

SEQ ID NO: 152298 - DNA, 1113 bp, Artificial Sequence
  derived and/or modified sequence
atgagccatcccagtccgcaggcaaaaccatccaacccgagcaacccacgcgtgtttttcgacgttgacattggcggcgagcgggtggggagaattgtattagagttgttcgccgatattgtcccgaagaccgcagaaaattttagagccctgtgtaccggtgagaagggcatcggacatacaactggcaagcccctgcattttaagggctgtccgtttcacagaatcatcaagaagtttatgatccaggggggggatttcagcaaccagaacgggaccggcggtgaatccatctacggagaaaaattcgaagatgaaaacttccactacaaacatgacagggaaggactcctgtccatggcaaatgccggacgcaatactaacgggtctcagttctttattactacagtccctactccacacctcgacggaaaacacgtagtgttcggtcaggttataaagggtatcggcgtagcaaggattttggagaatgtggaggtcaagggagagaagcccgctaaattgtgtgttattgccgagtgtggcgagctgaaggaaggggatgacggcggaatttttccaaaggacggatcaggggatagccaccccgattttcctgaagatgcagacatcgacctgaaggatgtggataagatccttcttatcacagaggacctaaaaaacatcggcaacactttcttcaaaagtcagaactgggagatggcgatcaagaaatacgctgaggttctgcgatatgtggatagcagcaaggcagtgatcgaaaccgcagatagggccaaacttcagcctatcgccctctcatgcgtgctcaacattggggcttgcaaacttaagatgtcaaattggcaaggagcgatcgactcttgtctggaggcgctggagctggatccctcgaataccaaagccctgtatcgcagggcccagggatggcagggcctgaaagaatacgatcaggcattagccgacctgaaaaaagcccaagggattgccccagaagacaaggccatccaggcggaactgctgaaggttaagcaaaaaattaaggcgcagaaagataaagagaaagccgtctacgcaaaaatgttcgcctag

SEQ ID NO: 152299 - DNA, 1113 bp, Artificial Sequence
  derived and/or modified sequence
atgagccaccccagcccccaggccaagcccagcaaccccagcaaccccagggtcttctttgatgtggacatcggcggggagcgggtgggccgcatcgtgctggagctgtttgctgacatcgtgcccaagacagctgagaacttccgggccctgtgcacaggagagaagggcatcggccacaccaccgggaagcccctgcacttcaagggctgccccttccaccgcatcatcaagaagttcatgatccagggcggggacttcagcaaccagaatggaactggaggagagagcatctatggagagaagtttgaagatgagaacttccactacaagcatgaccgggagggcctgctgtccatggccaatgccggcaggaacaccaacggcagccagttcttcatcaccaccgtgcccaccccccacctggatggcaagcacgtggtgtttggccaggtgatcaagggcatcggcgtggcccgcatcctggagaatgtggaggtgaagggggagaagccagccaagctgtgtgtgattgctgaatgtggggagctgaaggagggagatgatggcggcatcttccccaaggatggcagcggggacagccacccagacttcccagaagatgctgacatcgacctgaaggatgtggacaagatcctgctgatcacagaggacctgaagaacatcggcaacaccttcttcaagagccagaactgggagatggccatcaagaagtatgcagaggtgctgcgctacgtggacagcagcaaggccgtcatcgagacagctgaccgggccaagctgcagcccatcgccctgagctgtgtgctgaacattggagcctgcaagctgaagatgagcaactggcagggcgccatcgacagctgcctggaggccctggagctggaccccagcaacaccaaggccctgtaccgccgggcccagggctggcagggcctgaaggagtatgaccaggccctggccgacctgaagaaggcccagggcatcgcccctgaggacaaggccatccaggccgagctgctgaaggtgaagcagaagatcaaggcccagaaggacaaggagaaggctgtgtatgccaagatgtttgcctag

SEQ ID NO: 152300 - DNA, 1113 bp, Artificial Sequence
  derived and/or modified sequence
atgagccaccccagcccccaggccaagcccagcaaccccagcaacccaagggtgttttttgatgtagatataggcggggaaagggtaggccggattgtgcttgagctcttcgcagatatcgtccctaagactgcagagaattttcgcgcactctgcacaggggagaaggggattggccatacaaccggcaagcccctgcatttcaaaggttgtccttttcatcgcattatcaagaaattcatgatccagggcggcgacttctcaaaccagaatgggaccgggggggaaagcatatatggggagaaatttgaggatgagaactttcactataaacacgatagagaaggactgttgtccatggcgaacgccggacgcaataccaacggatctcaattcttcattacaaccgtgccaacaccacacttggacgggaagcatgttgtctttggacaagtgatcaaaggcattggcgtcgctcgtattctggaaaatgtcgaggtgaagggcgagaaacccgcgaagctgtgcgtaatcgccgagtgtggggagttgaaagagggtgacgacggggggatcttccctaaggacggttccggtgactcacaccccgactttcctgaggacgcggacatcgacctgaaggacgtggacaaaattctattgataacagaggatctgaaaaatattggcaacacctttttcaaatctcagaattgggagatggccatcaaaaagtacgcagaggtcctgcgctatgtggattcctcaaaagcggtgatcgagacggcagacagagcaaagctgcagcctatcgcattgagctgtgtactgaatataggggcctgtaagttaaagatgtctaattggcagggagcaatagacagctgtctggaggcccttgaattggacccaagcaacactaaagcgctctacaggagggctcagggctggcaaggacttaaggagtatgatcaggctctggccgaccttaagaaagcacaaggcattgcaccagaagacaaggccattcaggcagagctgctgaaggtgaagcagaaaatcaaagcacagaaggacaaagaaaaggccgtgtacgctaagatgtttgcctag

SEQ ID NO: 152301 - DNA, 1823 bp, Artificial Sequence
  derived and/or modified sequence
ggtcagcgtcgctgccggtctccggcggagacggactctggagtttgggcggcccgggcggccactaggtactctgatattccgtactaaacacgtctgcaagtcaagatgtcgcacccgtccccccaagccaagccctccaaccccagtaaccctcgagtcttctttgacgtggacatcggaggggagcgagttggtcgaattgtcttagaattgtttgcagatatcgtacccaaaactgcggaaaattttcgtgcactgtgtacaggagaaaaaggcattggacacacgactgggaaacctctccatttcaaaggatgcccttttcatcgaattattaagaaatttatgattcagggtggagacttctcaaatcagaatgggacaggtggagaaagtatttatggtgaaaaatttgaagatgaaaatttccattacaagcatgatcgggagggtttactgagcatggcaaatgcaggccgcaacacaaacggttctcagttttttatcacaacagttccaactcctcatttggatgggaaacatgtggtgtttggccaagtaattaaaggaataggagtggcaaggatattggaaaatgtggaagtgaaaggtgaaaaacctgctaaattgtgcgttattgcagaatgtggagaattgaaggaaggagatgacgggggaatattcccaaaagatggctctggcgacagtcatccagatttccctgaggatgcggatatagatttaaaagatgtagataaaattttattaataacagaagacttaaaaaacattggaaatacttttttcaaatcccagaactgggagatggctattaaaaaatatgcagaagttttaagatacgtggacagttcaaaggctgttattgagacagcagatagagccaagctgcaacctatagctttaagctgtgtactgaatattggtgcttgtaaactgaagatgtcaaattggcagggagcaattgacagttgtttagaggctcttgaactagacccatcaaataccaaagcattgtaccgcagagctcaaggatggcaaggattaaaagaatatgatcaagcattggctgatcttaagaaagctcaggggatagcaccagaagataaagctatccaggcagaattgctgaaagtcaaacaaaagataaaggcacagaaagataaagagaaggcagtatatgcaaaaatgtttgcttagaaaggattcagttttgcttattgtgtgttgattgtataaatgcaataagaaaatgtaaaggtttttgtctatgaatatgatccctaatgtgtttcttttgacaccttagttccttactgtttacagtttaggagtactgataggggttcatgcttaataaacatgtcacaatacagtaagtaaagtggttttgtttgtttctttgagatggagtcttgctctgtcacccaggctggagtgcggtggcgcaatctcggctcactgcatcctctgcctcccgggttcaagcaattctcctgcctcagcttcccaagtagctgggattacaggcacgtgccaccacgcccagctaatttttgtatttttagtagagatggggtttcaccatattggtcacgtcacgttggtcttgaactcctgaccttgtgatccaccccgccttggcctcccaaagtgctgggattacaggtgtgagccaccgtgcccggccaagtaaaatgttttttaaaatggttatgtgcattattcataaaaaataatggtgtccagtctttttaaacttgtaaagacacatcttattgaataaagagatgagagcttaa

SEQ ID NO: 152302 - DNA, 1113 bp, Artificial Sequence
  derived and/or modified sequence
atgagccatcctagcccgcaagccaaaccatcaaatccttcgaacccccgagtgttctttgatgtcgacatcgggggtgaaagagtggggcgaatcgtgctagagctctttgcagacatagtgcccaaaaccgccgagaattttcgggctctgtgcaccggtgaaaagggcataggccacaccaccgggaaacccctacacttcaagggctgtccatttcacaggattataaagaaattcatgatccagggcggtgactttagcaatcaaaatgggacagggggagagagcatttatggcgagaagtttgaggatgaaaacttccactacaaacacgaccgtgaagggctgctgtctatggctaatgccggacgcaacacgaatgggtcccagttcttcatcaccacagtcccgacccctcacctcgatggtaagcatgtggtgtttggacaagtgatcaagggtatcggcgtcgcgagaatcctggaaaacgtggaagtgaaaggcgaaaagccagccaaactgtgtgtgattgccgagtgcggggaactgaaggaaggtgatgacggtggcatttttccgaaagacgggtctggcgatagccacccagacttcccagaggacgctgacatcgacttgaaagatgtcgacaagatactgctcataacagaagatctgaaaaacatcgggaacaccttcttcaagagccagaactgggagatggctattaagaaatatgcagaagtcctccgttatgtggattcgtctaaggctgttatcgagacagccgatagagctaaactgcagccaatagctctgagctgcgtcctgaacattggcgcatgcaaactgaaaatgagcaactggcagggagccatcgactcttgcctggaggctctggagctggacccttcaaataccaaggccctgtacaggcgcgcacaggggtggcagggcctgaaagagtacgaccaggctctcgcggacctgaagaaagcccaaggcattgcgcctgaggacaaggccatacaggctgagctgttgaaggtgaaacagaaaattaaggctcaaaaagacaaggaaaaagccgtctacgcgaaaatgttcgcttag

SEQ ID NO: 152303 - DNA, 1113 bp, Artificial Sequence
  derived and/or modified sequence
atgagccaccccagcccccaggccaagcccagcaaccccagcaaccccagagtgttcttcgacgtggacatcggcggcgagagagtgggcagaatcgtgctggagctgttcgccgacatcgtgcccaagaccgccgagaacttcagagccctgtgcaccggcgagaagggcatcggccacaccaccggcaagcccctgcacttcaagggctgccccttccacagaatcatcaagaagttcatgatccagggcggcgacttcagcaaccagaacggcaccggcggcgagagcatctacggcgagaagttcgaggacgagaacttccactacaagcacgacagagagggcctgctgagcatggccaacgccggcagaaacaccaacggcagccagttcttcatcaccaccgtgcccaccccccacctggacggcaagcacgtggtgttcggccaggtgatcaagggcatcggcgtggccagaatcctggagaacgtggaggtgaagggcgagaagcccgccaagctgtgcgtgatcgccgagtgcggcgagctgaaggagggcgacgacggcggcatcttccccaaggacggcagcggcgacagccaccccgacttccccgaggacgccgacatcgacctgaaggacgtggacaagatcctgctgatcaccgaggacctgaagaacatcggcaacaccttcttcaagagccagaactgggagatggccatcaagaagtacgccgaggtgctgagatacgtggacagcagcaaggccgtgatcgagaccgccgacagagccaagctgcagcccatcgccctgagctgcgtgctgaacatcggcgcctgcaagctgaagatgagcaactggcagggcgccatcgacagctgcctggaggccctggagctggaccccagcaacaccaaggccctgtacagaagagcccagggctggcagggcctgaaggagtacgaccaggccctggccgacctgaagaaggcccagggcatcgcccccgaggacaaggccatccaggccgagctgctgaaggtgaagcagaagatcaaggcccagaaggacaaggagaaggccgtgtacgccaagatgttcgcctag

SEQ ID NO: 152304 - DNA, 618 bp, Artificial Sequence
  derived and/or modified sequence
atgaacagctggccctggctgttcgacagcaacttctgcagcgccgtggagatcatcctggaacctgagaaaaagattcccaatagcaccctccacttctgtgaggaactagtgcctaactctggatcgcttttcggaaaaaacatttgttgtggcaaacagtgttgtatatgtgacctcaaatcactcctggagctggacagagacggtgagttccagccagagagaccaaagaatagttgtcctgcgttactcaacgctatctctagaaggacctccatatttccacctcccacatcactacttctgcccgtgaccctggccagtagccaatgttgctgggcaaccagcggtagtgccggcggacgaggcatagcccccacgcccggaggtcagccctgtggctccagtaggaagtccgggtcatcatgcgcctggagatggagcccttcagggggttctccttggccttgctcccgggctggcggcgcatggagaagattggggacctcgctagatacccacccagcggggtccagagcttgtagagctgtccaccagttagctggggaatctccaactcccaggcaggcccggcgacctcccttccccacatag

SEQ ID NO: 152305 - DNA, 597 bp, Artificial Sequence
  derived and/or modified sequence
atgctgctgatcctgctgtctgtggccctgctggccctgagcagcgcccagaacctgaatgaagatgtgtcccaggaggagagccccagcctgattgctggcaacccccagggccccagcccccagggcggcaacaagccccagggccccccacctcctcctgggaagccccagggccccccaccccagggcggcaacaagccccagggccccccacctcctgggaagccccagggccccccaccccagggcgacaagagccgcagccccaggagccccccaggcaagccccagggccccccaccccagggcggcaagccccagggccccccaccccagggcggcaacaagccccagggccccccacctcctgggaagccccagggccccccagcccagggcggcagcaagagccagagcgcccggagccccccaggcaagccccagggccccccccagcaggagggcaacaacccccagggccccccacctcctgctgggggcaacccccagcagccccaggcccccccagctggccagccccagggcccccccaggcctccccagggcggccggcccagccggcccccccagtag

SEQ ID NO: 152306 - DNA, 537 bp, Artificial Sequence
  derived and/or modified sequence
atgctgctgatcctgctgtctgtggccctgctggccctgagcagcgcccagaacctgaatgaagatgtgtcccaggaggagagccccagcctgattgctggcaacccccagggccccagcccccagggcggcaacaagccccagggccccccacctcctcctgggaagccccagggccccccaccccagggcggcaacaagccccagggccccccacctcctgggaagccccagggccccccaccccagggcgacaagagccgcagccccaggagccccccaggcaagccccagggccccccaccccagggcggcaagccccagggccccccagcccagggcggcagcaagagccagagcgcccggagccccccaggcaagccccagggccccccccagcaggagggcaacaacccccagggccccccacctcctgctgggggcaacccccagcagccccaggcccccccagctggccagccccagggcccccccaggcctccccagggcggccggcccagccggcccccccagtag

SEQ ID NO: 152307 - DNA, 1251 bp, Artificial Sequence
  derived and/or modified sequence
atgctgctgatcctgctgtctgtggccctgctggccctgagcagcgcccagaacctgaatgaagatgtgtcccaggaggagagccccagcctgattgctggcaacccccagggcgccccaccccagggcggcaacaagccccagggcccccccagccccccaggcaagccccagggccccccaccccagggcggcaaccagccccagggccccccacctcctcctgggaagccccagggccccccaccccagggcggcaacaagccccagggccccccacctcctgggaagccccagggccccccaccccagggcgacaagagccgcagccccaggagccccccaggcaagccccagggccccccaccccagggcggcaaccagccccagggccccccacctcctcctgggaagccccagggccccccaccccagggcggcaacaagccccagggccccccacctcctgggaagccccagggccccccaccccagggcgacaacaagagccgcagcagccgcagccccccaggcaagccccagggccccccaccccagggcggcaaccagccccagggccccccacctcctcctgggaagccccagggccccccaccccagggcggcaacaagccccagggccccccacctcctgggaagccccagggccccccaccccagggcgacaacaagagccagagcgcccggagccccccaggcaagccccagggccccccaccccagggcggcaaccagccccagggccccccacctcctcctgggaagccccagggccccccaccccagggcggcaacaagccccagggccccccacctcctgggaagccccagggccccccaccccagggcggcagcaagagccgcagcagccgcagccccccaggcaagccccagggccccccaccccagggcggcaaccagccccagggccccccacctcctcctgggaagccccagggccccccaccccagggcggcaacaagccccagggccccccacctcctgggaagccccagggccccccaccccagggcggcagcaagagccgcagcgcccggagccccccaggcaagccccagggccccccccagcaggagggcaacaacccccagggccccccacctcctgctgggggcaacccccagcagccccaggcccccccagctggccagccccagggcccccccaggcctccccagggcggccggcccagccggcccccccagtag

SEQ ID NO: 152308 - DNA, 537 bp, Artificial Sequence
  derived and/or modified sequence
atgctgctgatcctgctgagcgtggccctgctggccctgagcagcgcgcagaatctgaacgaagatgtctcccaagaagaaagtccctcgttaatcgcaggcaatccacagggcccgagcccccagggaggcaacaaaccccagggaccacctcctccacctgggaagccacaaggcccaccaccccaaggcggaaataagccacagggacctccacccccgggcaaacctcagggtcccccccctcaaggggacaagagcagaagtcccagatctcctccagggaagccacaaggccctccacctcagggcggcaagcctcagggccctcctgcacagggagggagtaaaagccagtctgctcgcagcccccctgggaaaccacagggaccaccacagcaggaaggcaataacccccagggacccccccccccagcaggaggcaatccacagcagccgcaggctcctccagctggtcagccacaagggccgccccgccccccgcagggaggtcgaccgagcagacctccacagtag

SEQ ID NO: 152309 - DNA, 744 bp, Artificial Sequence
  derived and/or modified sequence
atgctgctgattctcctctccgtcgccctgctcgctctgtcctcagcggagagtagtagcgaggacgtaagccaagaggagtccctgttcctaatttctggaaagcctgagggcaggcggccacagggaggaaaccagccacagagacctcctccgccaccaggcaagccacagggacctcctccccagggcggaaatcaaagtcaggggcctcccccacctccaggcaaacccgagggtaggcccccacagggaggcaaccagagccaaggccctccaccacacccaggcaaacccgaacgtccaccgcctcaggggggtaaccaaagtcagggcaccccgcctcctccaggcaagcccgaacgccctccaccacaggggggaaaccagagccaccgcccaccgccaccaccaggaaaacccgagagaccccctccccaagggggaaatcagtcacagggacccccaccccacccaggaaaacctgagggcccaccacctcaggaggggaacaaatccagatcagcgagatctccccctggaaagccacagggccctccacagcaggagggaaacaaacctcagggccctcccccaccagggaagccacaaggaccccctccagctgggggaaacccccagcagcctcaggctcccccagctgggaaaccacagggtccccctccgccaccacagggaggcaggcctcctagaccggctcagggtcagcagccaccacagtag

SEQ ID NO: 152310 - DNA, 1848 bp, Artificial Sequence
  derived and/or modified sequence
tatatgattttctccatttgtcatcgttccccaccccttcgacatgctgccaggaaacaagggaaggggcctccctccgagtgagtcagtgatgaggccgcggcctccccgaggttgtggggaggctgcactggagccacaggcaggggtgagagcacccactgaattgacatgaccctctgtccccaggcctggctccccgagggctcagaagagcagcttcggtgtgcagatcatccgtcttgtggggttctcagtgccggaccttggggtgggggccaggcctcgcacttgcagaggagcccagtgggctgcacgctcccctccatccccatcggccctgtcccctggagtgtgtcagagcccaggggagaatgcagcccaccaggagcacctggaccccctgcccgccacatggtgtggccatcactcagcccctacccctgccctgctcctaagggtagaaaactccagggtcccctgccaccgactgcccagccactccaagccccctggcagctgcccctcctggagcagaaagtgcctttatctcagccatccgcagactgctggccagatgcggggacaggctggaatgagggaggcgtcttcatctccctgccatccccctctcacgccacccccgcccccaccgggctgcaggtgctgctgatgcgctgggatctgattgaggataaaaaggaaggagagatgacccctaccccctcatcccccagttttgaaaaggtctaagcaagtgagtctggtggaggagctgagggagggagccatggaaggtgccagaaggaaggttggcgggggcacgtgtgggccgtggcttgggctggtcagagtggcgtgagctgcccggcgcctgccctgcccaagtgaccagggaagtgtgtgtgtgtccatgtgtatgcgtgtccgtctgtctgtctagtgtctgggtttggcccaagactgggctgtagttacattaatgcccagccagccacccctgccactcacccttcctggcccaggccttgctgactctctgagctggggaggtgggaggccaggcgagcctgactctgttgatctacccgtgcctgggcccctcccctcagagcccatggtaacgaacccctagaaaggagagaacgggcgtcaggggtgcacagtccacagctgaagagcaaggtttcgtggcagcacggcccggcccctcaccctctgtccccacgaggggacccatgggggctgtctttgcagggcacagatgaccaaagtcccttcctgcttcctgttacctgtcttgctcctggggagaaagaggggcctgatgagactccactcaggtgcacacatcaccaggtgcatctgcaggcaccgggctggctgcttgcagccaggagaaggtcagcgagaaggagtgtatgagtgtgagtgtgtgtgcatggaagttggggcactgggcgtctgactccctccccacccaagagaggaaggacccctcaccacccccactggtgagacagtttactttgccaacttgccatgtttttgccaaaaccaagattttgaaggaaatgagtggccagcgccagggcccaggccatgtggcctgcccagcctcaatgtcacttggtggcggggtggggtgggggtgggcagcagcatcccagccttgagatgcttcactttccttctctgtaaccagactttgaaaaattgttcgtttcatcaggctctgttcctcaatggccttttgctacgtgcctcccgagaaatttgtctttttgtataaatgacaaagtgttgaaaatgtatttcctgaaataaatgtttcaaatgcagaaaccc

SEQ ID NO: 152311 - protein, 496 aa, Artificial Sequence
  derived and/or modified sequence
MGRRALLLLLLSFLAPWATIALRPALRALGSLHLPTNPTSLPAVAKNYSVLYFQQKVDHFGFNTVKTFNQRYLVADKYWKKNGGSILFYTGNEGDIIWFCNNTGFMWDVAEELKAMLVFAEHRYYGESLPFGDNSFKDSRHLNFLTSEQALADFAELIKHLKRTIPGAENQPVIAIGGSYGGMLAAWFRMKYPHMVVGALAASAPIWQFEDLVPCGVFMKIVTTDFRKSGPHCSESIHRSWDAINRLSNTGSGLQWLTGALHLCSPLTSQDIQHLKDWISETWVNLAMVDYPYASNFLQPLPAWPIKVVCQYLKNPNVSDSLLLQNIFQALNVYYNYSGQVKCLNISETATSSLGTLGWSYQACTEVVMPFCTNGVDDMFEPHSWNLKELSDDCFQQWGVRPRPSWITTMYGGKNISSHTNIVFSNGELDPWSGGGVTKDITDTLVAVTISEGAHHLDLRTKNALDPMSVLLARSLEVRHMKNWIRDFYDSAGKQH

SEQ ID NO: 152312 - DNA, 1491 bp, Artificial Sequence
  derived and/or modified sequence
atgggtcgcagagctttgctgcttctgctgctgtccttcctggctccctgggcaaccatcgcactgcgccctgctctacgggctctggggtctttacacctgcctacgaaccccacaagtctgcccgctgtggccaagaactatagcgtcttgtactttcaacagaaagttgatcactttggattcaatactgttaaaaccttcaatcaaagatatttggtcgcagacaaatattggaagaaaaacggcgggtccattcttttttacactggaaacgaaggggacataatatggttctgtaataataccggcttcatgtgggatgtcgccgaggagctgaaggcgatgttggttttcgccgagcatcggtactacggggagtcattacccttcggggataactcttttaaagattcccggcacctgaacttcctgacaagtgagcaggccctggccgacttcgcagaattgattaagcacctgaagcgcaccatacctggcgcagagaaccagccagtgattgcaatcggcggttcctatgggggcatgcttgctgcatggtttagaatgaagtaccctcatatggtggtcggtgcactggcggcctctgctcctatttggcagttcgaggatttagtgccatgtggggtgtttatgaagatcgtcactaccgacttccggaaaagcggaccgcattgttctgaaagcatccatcgtagttgggacgctattaatcggctgagcaataccgggtcagggttacagtggctgaccggggccctccacctgtgttctcccctcactagccaggatatacagcatctaaaagattggatctcggagacatgggtaaatctggccatggtggactacccttacgcatcgaatttcctgcagccgcttccggcatggcccatcaaagtggtgtgccagtatctcaaaaatcccaacgtaagtgatagcctcttacttcagaatatctttcaagccctgaacgtgtactacaactacagcggacaggtgaaatgcctgaacatttccgagacagctaccagctcactcgggacactgggatggtcgtatcaggcttgtactgaggtggtgatgcctttctgtacgaatggggtagatgatatgttcgagccccactcttggaacctgaaagagctgtccgatgactgctttcagcaatggggcgttaggccacgaccctcatggattacaacaatgtatggcggaaagaatatttcatctcatactaacatcgtgttttcaaacggcgaactggatccttggagcggcggcggtgtgacaaaggatattacagataccctggtcgcggtgactataagcgagggagcgcaccacttggacttgagaactaaaaacgcactggacccaatgtctgtcctgctggcccggtcactggaggtcaggcatatgaagaactggatcagggatttctacgatagcgccggtaaacagcattag

SEQ ID NO: 152313 - DNA, 1491 bp, Artificial Sequence
  derived and/or modified sequence
atgggcagaagagccctgctgctgctgctgctgtccttcctggccccctgggccaccatcgccctgcggcctgccctgcgggccctgggcagcctgcacctgcccaccaaccccaccagcctgcctgctgtggccaagaactacagcgtgctgtacttccagcagaaggtggaccacttcggcttcaacacagtgaagaccttcaaccagcgctacctggtggccgacaagtactggaagaagaatggaggcagcatcctcttctacacaggaaatgaaggagacatcatctggttctgcaacaacacaggcttcatgtgggatgtggccgaggagctgaaggccatgctggtgtttgctgagcaccgctactatggagagagcctgccctttggagacaacagcttcaaggacagccgccacctgaacttcctgaccagcgagcaggccctggccgactttgctgagctgatcaagcacctgaagaggaccatccctggagctgagaaccagcccgtcatcgccatcggcggcagctatggaggcatgctggccgcctggttcaggatgaagtacccccacatggtggtgggcgccctggccgccagcgcccccatctggcagtttgaggacctggtgccctgtggggtcttcatgaagatcgtgaccacagacttcaggaagagcggcccccactgcagcgagagcatccaccgctcctgggatgccatcaaccggctgagcaacacaggcagcggcctgcagtggctgaccggggccctgcacctgtgcagccccctgaccagccaggacatccagcacctgaaggactggatcagcgagacctgggtgaacctggccatggtggactacccctatgccagcaacttcctgcagcccctgcctgcctggcccatcaaggtggtgtgccagtacctgaagaaccccaacgtgtctgacagcctgctgctgcagaacatcttccaggccctgaatgtgtactacaactacagcggccaggtgaagtgcctgaacatcagcgagacagccaccagcagcctgggcaccctgggctggagctaccaggcctgcacagaggtggtgatgcccttctgcaccaacggggtggatgacatgtttgagccccacagctggaacctgaaggagctgagtgatgactgcttccagcagtggggcgtgcggccccggcccagctggatcaccaccatgtatggaggcaagaacatcagcagccacaccaacatcgtgttcagcaatggagagctggacccctggagcggcggcggcgtgaccaaggacatcacagacaccctggtggccgtgaccatcagcgagggcgcccaccacctggacctgcggaccaagaatgccctggaccccatgtctgtgctgctggcccggagcctggaggtgcgccacatgaagaactggatccgggacttctatgattctgctgggaagcagcactag

SEQ ID NO: 152314 - DNA, 1491 bp, Artificial Sequence
  derived and/or modified sequence
atgggccggcgggccctgctgctgctgctgctgagcttcctggccccctgggctacaattgccctgcgacctgctctgcgcgcacttggatccctgcacctgccaacaaacccgacctcactgcccgcagttgctaaaaactactccgttctttacttccagcaaaaagtcgaccactttggattcaataccgtaaagaccttcaaccagagatacctagtggctgataaatactggaagaagaatgggggcagcatactgttttacaccggcaacgagggggatattatctggttctgtaataataccgggttcatgtgggatgtggccgaagagctgaaggccatgctggtgtttgcagagcatcgttattatggggagagtctcccttttggggataattcattcaaggattctagacacctgaatttcttaactagcgaacaggccctcgcagactttgctgagctgatcaagcacttgaaaaggacgataccaggagccgagaaccagccagtgattgcaatcggaggaagctacggggggatgttagcagcctggttccgcatgaagtacccgcacatggtagtaggagcgctggccgcgtccgccccaatctggcagttcgaagacctggtaccttgtggcgtgtttatgaagatcgtgaccacggatttcagaaagtccgggccccactgttctgagtctatacaccgctcctgggatgctattaacagactaagcaatactggatcagggttgcaatggctgaccggtgcattacatctctgtagcccattgaccagccaggacatacagcatctgaaagactggatctcggaaacatgggtgaatttagctatggtggattacccatatgcctcgaacttcctgcagccattaccggcttggcccattaaggtggtttgtcagtacctaaagaaccctaacgtctctgattccctactccttcagaatatattccaggcactgaacgtttattataattactccggacaggtgaagtgcctcaatatttctgaaaccgcaacgagctctctgggaacactgggctggagctatcaagcgtgtacagaggtggtcatgcccttctgcaccaatggtgtcgatgacatgttcgagccccactcttggaacctgaaggagttaagcgacgattgttttcagcaatggggcgtaagaccacgaccatcatggatcaccactatgtacggtgggaagaacatttcttctcacaccaatattgttttttcaaatggggaactggatccgtggagcggaggtggggtaaccaaagacataactgatacccttgttgccgtcaccattagtgaaggggcgcaccatctcgacctcagaaccaaaaacgcactagatcccatgagcgttctgttggctcgctctcttgaggtgcggcacatgaagaattggatccgagacttctatgactctgccggcaaacagcactag

SEQ ID NO: 152315 - DNA, 1491 bp, Artificial Sequence
  derived and/or modified sequence
atgggcagaagggccctactgttactcctactgagttttctcgcaccctgggctactattgcacttcgcccagccctgcgcgctctcgggagtttgcacctaccgacgaaccctacctctctcccggctgttgccaaaaactatagcgtgctatacttccaacaaaaggtggatcactttgggtttaatacagtaaagaccttcaaccagcgctaccttgtagctgacaagtattggaagaagaacggcggatcaatactcttctacacagggaacgagggcgacatcatttggttctgcaacaacacaggcttcatgtgggatgttgcggaagagctaaaggcgatgctggtgtttgccgaacatcgatattacggagaatccttaccctttggcgacaactcgtttaaagattcacggcacctcaatttcttgacgtctgagcaggcattagcagatttcgccgaacttattaagcatcttaaacgcacaatccccggagcggaaaaccagcctgtcatcgcaataggagggtcgtatgggggtatgctcgccgcttggttcagaatgaagtacccccacatggtagttggggctctggcagcatccgcccctatctggcagtttgaggatctagtgccttgtggagttttcatgaagatagtgactacggacttccggaaaagcgggccacattgcagcgagtctattcacaggagctgggacgccataaacaggctcagcaacactggttctggcctacagtggctcactggggcattgcacctgtgtagccccctgacctctcaggacattcagcacctcaaggattggatatctgagacctgggtgaatctcgccatggttgattacccctacgctagtaattttctccagccactacctgcatggcccataaaggtggtctgtcagtatctgaagaacccaaatgtgagcgacagcctgttactgcagaacatttttcaggcactgaacgtttactacaactattcagggcaagttaaatgtctgaacatctctgaaacagctacttcttccctcggcacactaggctggtcctaccaggcttgcaccgaagtggtaatgcccttctgcaccaatggggttgacgatatgttcgaaccgcacagttggaacttaaaggaactgagtgacgattgcttccagcaatggggtgtgcgacctcgcccatcctggataaccacaatgtacggcggaaaaaacattagttcccatactaacatagtgttttccaatggcgagctagatccctggagtggcggtggcgtcacaaaggatatcacggacaccctggtggctgtcacaatcagcgaaggagcccaccaccttgatctgaggaccaagaatgctctagaccccatgagcgtgttactggctcgcagcttagaggtccgccacatgaaaaactggatccgcgatttctacgacagcgctggaaagcagcactag

SEQ ID NO: 152316 - DNA, 3090 bp, Artificial Sequence
  derived and/or modified sequence
ctcggggatgggggcggagtggctgtggtgacctggcttgggcggcgtctctgaggagctggctggctttgggtttcccctgggaggagctgttttgcggcgggcggagctgcaggctgggcagggcttagcctgtgcgcttctgctggcctccttttcgccctcccacccgcactgcagtctccagcctgagccatgggccgccgagccctcctgctcctgcttctgtcttttctggcgccctgggccaccatagccctccggccggccttaagggccctcggcagcctacacttgccaaccaaccccacatccctcccggctgtagccaagaactattcggttctctacttccaacagaaggttgatcattttggatttaatactgtgaaaacttttaatcagcggtacctagtagctgataaatactggaagaaaaatggtggatcaatacttttctacactggtaatgaaggggacattatctggttttgtaataacacggggttcatgtgggatgtggctgaggaactgaaagctatgttggtgtttgctgaacatcgatactatggagagtctctcccctttggtgacaactcattcaaggattccagacacttgaatttcctgacatcagaacaagctctggctgattttgcagagttaatcaaacacttgaaaagaacaatcccaggagctgaaaatcaacctgtcattgccataggaggctcctatggtggcatgcttgccgcctggtttaggatgaaatatcctcatatggtagttggagctcttgcagcttctgcccctatctggcagtttgaggatttagtaccttgtggtgtatttatgaagatcgtaactacagattttaggaaaagcggtccacattgttcagagagcatccacaggtcctgggatgccattaatcgactctcaaatactggcagtggtttgcagtggcttactggagcccttcacttatgcagcccattaacttctcaggacatccaacatttgaaagactggatctctgaaacctgggtgaatctggcaatggtggactatccttatgcctctaactttttacagcctttgcctgcttggcctatcaaggtagtgtgccagtatttgaaaaatcccaatgtatctgattcactgctgctgcagaatattttccaagctctgaatgtatattacaattattcgggccaggtgaaatgcctgaatatttcagagacagcaactagcagtctgggaacactgggttggagctatcaggcctgcacagaagtagtcatgcccttttgtactaatggtgtcgatgacatgtttgaacctcactcatggaacttaaaggaactttctgatgactgttttcaacagtggggtgtgagaccaaggccctcctggatcactactatgtatggaggcaaaaacattagttcacacacaaacattgttttcagcaatggtgaactagacccctggtcaggaggtggagtaactaaggatatcacagacactctggttgcagtcaccatctcagagggggcccaccacttagatctccgcaccaagaatgccttggatcctatgtctgtgctgttagcccgctccttggaagttagacatatgaagaattggatcagagatttctatgacagtgcgggaaagcagcactgagaaacttttgattgttttcaatttcttcttttatgttcacaccaccacattcccattcactttgattttctacatgtaattaccttcttttgtttatcattagatttgatggggccaaagttgagatagaatagagggtgatgacggtaagagcaagtgtcccatgaatgtgatttcctgggttctcactgtctttgcaccacgtctaggaagaatcttcttgatagctctcccacaccatcagtggccctcataactggagtagagttcctggttgcttttcataagagggagagttactttctttgtatctctgcaagcagagatttctctttggttttgaggttgaagtgtctttggcccatttgtaagtccccatccctaccctacacaaagtaaaagcagaagatagataaaaaatgatgtaattgcagctggtaggatgtctggtgccaatccaggaagtgagagccatttcttttgtaccggatttaatgactttgaactgtgctgtaaataaataatacagctggaccttatacctgtgtgttgcttctgaagctcacttcaactccggctgatggaaatgctgtgtgcactgggcttagctgtttttggaaagtcctttaattttttctcttccacttggcagcttttcttagttctgggatgttggccactgtggtactgccagtaagaaatctggcctttttctgctccatttctctttgtttctaaggtcagttttaatttgtttgaattctgccagtttaggaaaatgactctgttttgtctttttaaatctgagcaagctttatgctgtagtcactaattatatttcagtaagaagcctttaaaaattgatgaatcagctattccaaaagtagaatatagtaatattcagcttttaaatttttaaaattttattttctgatagttgttactgctgtcattaaaaccagaagtgttagacactaacaggcaggtgcacaagaacttttctgtatgacttccaaaagacaagctgactaattcatgcaggcagcatatttgacattaataaatggccaagccattcctatttccaaggggttggcttctttcaagcagttcttacactgagacctttcttcagagagcttttctaggataacaaatagggttggatcaaaacctttcagggacacagagagacagagagagagagactaacagtttctactctgttgaaagatttcttcctccttgtttcttttcattttctctcaataatttttttttcttcaccctgccttgggaacattttctgcttttaaaaaactgtaccttgagcttgatcatttttatggcattttttttttttaagggcatatatagagttcattcttgggatggaaagctgaa

SEQ ID NO: 152317 - DNA, 1397 bp, Artificial Sequence
  derived and/or modified sequence
gattactcagagccaatcagaagaaggcgccgcagagggtggagcttagcgaggaaatcctacaagcatctggaaacgaccattttcgtcaaactgcgggggttcatgtgggatgtggctgaggaactgaaagctatgttggtgtttgctgaacatcgatactatggagagtctctcccctttggtgacaactcattcaaggattccagacacttgaatttcctgacatcagaacaagctctggctgattttgcagagttaatcaaacacttgaaaagaacaatcccaggagctgaaaatcaacctgtcattgccataggaggctcctatggtggcatgcttgccgcctggtttaggatgaaatatcctcatatggtagttggagctcttgcagcttctgcccctatctggcagtttgaggatttagtaccttgtggtgtatttatgaagatcgtaactacagattttaggaaaagcggtccacattgttcagagagcatccacaggtcctgggatgccattaatcgactctcaaatactggcagtggtttgcagtggcttactggagcccttcacttatgcagcccattaacttctcaggacatccaacatttgaaagactggatctctgaaacctgggtgaatctggcaatggtggactatccttatgcctctaactttttacagcctttgcctgcttggcctatcaaggtagtgtgccagtatttgaaaaatcccaatgtatctgattcactgctgctgcagaatattttccaagctctgaatgtatattacaattattcgggccaggtgaaatgcctgaatatttcagagacagcaactagcagtctgggaacactgggttggagctatcaggcctgcacagaagtagtcatgcccttttgtactaatggtgtcgatgacatgtttgaacctcactcatggaacttaaaggaactttctgatgactgttttcaacagtggggtgtgagaccaaggccctcctggatcactactatgtatggaggcaaaaacattagttcacacacaaacattgttttcagcaatggtgaactagacccctggtcaggaggtggagtaactaaggatatcacagacactctggttgcagtcaccatctcagagggggcccaccacttagatctccgcaccaagaatgccttggatcctatgtctgtgctgttagcccgctccttggaagttagacatatgaagaattggatcagagatttctatgacagtgcgggaaagcagcactgagaaacttttgattgttttcaatttcttcttttatgttcacaccaccacattcccattcactttgattttctacatgtaattaccttcttttgtttatcattagatttgatggggcc

SEQ ID NO: 152318 - DNA, 1491 bp, Artificial Sequence
  derived and/or modified sequence
atgggcagaagagccctgctgctgctgctgctgagcttcctggccccctgggccaccatcgccctgagacccgccctgagagccctgggcagcctgcacctgcccaccaaccccaccagcctgcccgccgtggccaagaactacagcgtgctgtacttccagcagaaggtggaccacttcggcttcaacaccgtgaagaccttcaaccagagatacctggtggccgacaagtactggaagaagaacggcggcagcatcctgttctacaccggcaacgagggcgacatcatctggttctgcaacaacaccggcttcatgtgggacgtggccgaggagctgaaggccatgctggtgttcgccgagcacagatactacggcgagagcctgcccttcggcgacaacagcttcaaggacagcagacacctgaacttcctgaccagcgagcaggccctggccgacttcgccgagctgatcaagcacctgaagagaaccatccccggcgccgagaaccagcccgtgatcgccatcggcggcagctacggcggcatgctggccgcctggttcagaatgaagtacccccacatggtggtgggcgccctggccgccagcgcccccatctggcagttcgaggacctggtgccctgcggcgtgttcatgaagatcgtgaccaccgacttcagaaagagcggcccccactgcagcgagagcatccacagaagctgggacgccatcaacagactgagcaacaccggcagcggcctgcagtggctgaccggcgccctgcacctgtgcagccccctgaccagccaggacatccagcacctgaaggactggatcagcgagacctgggtgaacctggccatggtggactacccctacgccagcaacttcctgcagcccctgcccgcctggcccatcaaggtggtgtgccagtacctgaagaaccccaacgtgagcgacagcctgctgctgcagaacatcttccaggccctgaacgtgtactacaactacagcggccaggtgaagtgcctgaacatcagcgagaccgccaccagcagcctgggcaccctgggctggagctaccaggcctgcaccgaggtggtgatgcccttctgcaccaacggcgtggacgacatgttcgagccccacagctggaacctgaaggagctgagcgacgactgcttccagcagtggggcgtgagacccagacccagctggatcaccaccatgtacggcggcaagaacatcagcagccacaccaacatcgtgttcagcaacggcgagctggacccctggagcggcggcggcgtgaccaaggacatcaccgacaccctggtggccgtgaccatcagcgagggcgcccaccacctggacctgagaaccaagaacgccctggaccccatgagcgtgctgctggccagaagcctggaggtgagacacatgaagaactggatcagagacttctacgacagcgccggcaagcagcactag

SEQ ID NO: 152319 - protein, 358 aa, Artificial Sequence
  derived and/or modified sequence
MEAPGLAQAAAAESDSRKVAEETPDGAPALCPSPEALSPEPPVYSLQDFDTLATVGTGTFGRVHLVKEKTAKHFFALKVMSIPDVIRLKQEQHVHNEKSVLKEVSHPFLIRLFWTWHDERFLYMLMEYVPGGELFSYLRNRGRFSSTTGLFYSAEIICAIEYLHSKEIVYRDLKPENILLDRDGHIKLTDFGFAKKLVDRTWTLCGTPEYLAPEVIQSKGHGRAVDWWALGILIFEMLSGFPPFFDDNPFGIYQKILAGKIDFPRHLDFHVKDLIKKLLVVDRTRRLGNMKNGANDVKHHRWFRSVDWEAVPQRKLKPPIVPKIAGDGDTSNFETYPENDWDTAAPVPQKDLEIFKNF

SEQ ID NO: 152320 - DNA, 1077 bp, Artificial Sequence
  derived and/or modified sequence
atggaggccccagggttggctcaggccgccgctgccgaatcagactctaggaaggtcgcagaggaaacgccagatggcgctcccgctctgtgtccatcgcctgaagcattgagtcctgaacctcccgtctattcactccaggatttcgatacactcgccacagtgggaacaggtactttcggcagagtgcacctggtaaaggaaaaaaccgctaagcacttcttcgcgctcaaagtaatgtcaatacccgacgttatccgcctgaagcaggaacagcatgtgcacaacgaaaaatccgttcttaaagaggtttcccatccattcctgatccggcttttctggacctggcatgatgaaagattcctctacatgctgatggaatacgtccccggtggtgagcttttcagttatcttagaaatcgaggaagattcagctctactactggccttttctactcagcggaaattatttgcgccatcgaatacttgcactcaaaggagatcgtctaccgcgacctgaaacccgagaacattctgctggacagggatggacacatcaagctaacggactttggctttgccaaaaaactggtggaccggacatggacgttgtgtggaacgccagagtaccttgcccccgaagtcattcaatccaagggacacggccgggctgtagactggtgggctctaggaattctcatatttgagatgctgtctggctttccacccttcttcgatgataacccattcgggatatatcaaaaaatcctggctgggaaaattgactttcctcgccatcttgattttcatgtgaaggatctaatcaaaaaattgctggtagtggatcgaacaagaagactgggcaacatgaagaacggcgcaaacgacgttaagcaccaccgctggttccgctctgtggactgggaggcggtgccacagagaaagctcaagccccccattgtccccaaaattgcaggcgacggggatacctccaacttcgaaacatacccagagaatgactgggacaccgctgcccccgtgcctcagaaggatctggaaatcttcaagaatttttag

SEQ ID NO: 152321 - DNA, 1077 bp, Artificial Sequence
  derived and/or modified sequence
atggaggcccctggcctggcccaggccgctgctgctgagagtgacagcaggaaggtggccgaggagaccccagatggagccccagccctgtgccccagccctgaggccctgagccctgagccccctgtgtacagcctgcaggactttgacaccctggccaccgtgggcaccggcaccttcggccgggtgcacctggtgaaggagaagacagccaagcacttctttgccctgaaggtgatgagcatcccagatgtgatccggctgaagcaggagcagcacgtgcacaatgagaagtctgtgctgaaggaggtgagccaccccttcctgatccgcctcttctggacctggcatgatgagcgcttcctgtacatgctgatggagtatgtgcctggaggagagctgttctcctacctgaggaacagaggccgcttcagcagcaccaccggcctcttctacagcgctgagatcatctgtgccatcgagtacctgcacagcaaggagatcgtgtacagagacctgaagccagagaacatcctgctggacagagatggccacatcaagctgacagactttggatttgccaagaagctggtggacaggacctggaccctgtgtggcaccccagagtacctggcccctgaggtgatccagagcaaaggacatggccgggctgtggactggtgggccctgggcatcctgatctttgagatgctgagcggcttcccccccttctttgatgacaaccccttcggcatctaccagaagatcctggccggcaagattgacttccccaggcacctggacttccacgtgaaggacctgatcaagaagctgctggtggtggacaggacccggcggctgggcaacatgaagaatggagccaatgatgtgaagcaccaccgctggttccgctctgtggactgggaggccgtgccccagaggaagctgaagccacccatcgtgcccaagattgctggagatggagacaccagcaactttgagacctacccagaaaatgactgggacacagctgcccctgtgccccagaaggacctggagatcttcaagaacttctag

SEQ ID NO: 152322 - DNA, 1077 bp, Artificial Sequence
  derived and/or modified sequence
atggaggcccccggcctggcccaggccgccgccgccgagagcgacagccgaaaggtcgctgaggagacccccgacggagcacccgctctctgcccgagccccgaagccttgtcacccgaacccccagtatacagtttgcaggacttcgacacactggccacagtgggcaccggaacatttggacgagtgcatctggttaaagagaagactgcgaagcacttctttgcgctcaaagtgatgtctatccctgatgtcatcaggctgaagcaagagcagcacgttcataatgagaaatcagtgctgaaggaagtatcccatccattcctgatccggctgttttggacatggcatgatgagaggtttttgtacatgctcatggaatatgtcccaggaggggaactgttctcctacttacggaatcggggcaggttctcgagcacaacagggttattctattcggctgaaattatttgcgctatcgagtacttgcactctaaggaaattgtgtacagggacctgaagcccgaaaacattctgttagacagagacgggcacatcaaattaaccgacttcgggtttgccaagaaacttgtcgatcgcacgtggacactgtgcggcactccagagtacctagccccagaggtgatacagtcaaagggtcacggccgggcagtagactggtgggcactgggcatcctgatcttcgaaatgctgtccggtttccccccatttttcgacgacaacccatttggaatatatcagaaaatcctggcgggcaaaatcgactttccacgacacttagattttcatgtcaaggacctgatcaaaaagcttctggtggtggataggacccggcgacttggaaacatgaaaaacggcgcaaacgacgttaaacatcacagatggttccggtcagtggattgggaggctgttccacagcgcaaattaaagcctccaattgtacccaagattgccggcgatggagacacttccaacttcgaaacctacccggagaacgattgggacacagcggctcccgtcccacaaaaggacctagaaatctttaagaacttttag

SEQ ID NO: 152323 - DNA, 1077 bp, Artificial Sequence
  derived and/or modified sequence
atggaagctcctggcttggcacaggccgctgccgctgagagcgactcaaggaaagtggcagaggagactcctgacggggctcctgcgctctgcccctccccagaggcactgagtccagagcccccagtgtactcgctgcaggactttgacactcttgccactgtcggaactggcaccttcggtcgggtacacctggtcaaagaaaagacagcgaaacacttcttcgccttaaaggtcatgtctatccctgatgtgattaggctgaaacaagaacagcacgtgcataacgaaaaatccgtattaaaagaggtcagtcatcctttcctgattagattattttggacttggcatgatgaaaggtttctatatatgctgatggagtatgtgccaggcggtgagctgttctcttatctgcgtaatagggggcgtttcagtagcaccactggcctgttctactccgccgagatcatatgcgccatcgaatacctccattccaaagaaatagtttacagagacctgaaaccagagaatattctgctggatagggacggccacatcaagctgactgacttcgggttcgcaaagaaactcgttgataggacctggacactttgcggaacccccgaatacctggcacccgaggtgatccagtccaaaggtcacggaagagccgttgactggtgggccttgggaattctcatctttgagatgttgagtggattcccgccattcttcgatgacaatccctttgggatctaccagaagatcctcgcgggtaaaatagacttcccacgccacctggatttccacgtgaaagatctaatcaaaaagttattagtggttgacaggacccgacgcctagggaacatgaaaaacggagccaacgatgtaaaacaccatcggtggttcagaagcgtggactgggaggcagtgcctcagcgcaagctgaaacctccaatcgtaccaaaaatagccggagacggggatactagcaactttgagacatacccagagaatgattgggacacagccgctcccgtgccccagaaagatctggaaattttcaagaatttctag

SEQ ID NO: 152324 - DNA, 6031 bp, Artificial Sequence
  derived and/or modified sequence
gagctggaggaggcggcgggcgcgagacccggaatgcgcagggcccccgcctcgccccccccagcccgggccgcggcccccgccttccccgcagtcgtcccgcactcggtgcccgccccccgaggccggcggctgctcccactcggggccgttgctgcttgtgccgtgagcgccgcccagccattgtccccgtcgctccgtcagccgcgccggaccgcgcaccaggaggcgagagcgcgcatggggagcctctgttgatgccgccgccgcgccgccctccgaggctgcgtcccgggaagcccggctccccgagcgctccggcctggcccggtgccccggacctgagtgcgtccccatggaggcgcccgggctggcccaggcggccgcggcggagagcgactcccgcaaggtggcggaggagacccccgacggggcgcccgcgctctgccccagccctgaggcgctgtcgccggagccgcctgtgtacagcctgcaggactttgacacgctggccaccgtgggcactgggacgttcgggcgggtgcacctggtgaaggagaagacagccaagcatttcttcgccctcaaggtgatgagcattcccgacgtcatccgcctaaagcaggagcaacacgtacacaatgagaagtctgtcctgaaggaagtcagccacccgttcctcatcaggctgttctggacgtggcatgacgagcgcttcctctacatgctcatggagtacgtgccgggcggcgagctcttcagctacctgcgcaaccgggggcgcttctccagcaccacggggctcttctactctgcagagatcatctgtgccatcgagtacctgcactccaaagagatcgtctacagggacttgaagccagagaacatcctgctggatagggatggccacattaagctcacggactttgggttcgccaagaagctggtagacaggacttggaccctctgtggaacacccgagtacctagcccccgaagtcattcagagcaagggccacggaagggccgtggactggtgggccctcggcatcctgatattcgagatgctttcggggtttcctccgttttttgatgacaacccgtttggcatttatcagaaaattcttgcaggcaaaatagatttccccagacatttggatttccatgtaaaagacctcattaagaaactgctcgtggttgacagaacaaggcgattaggaaacatgaagaacggggcgaatgatgtgaagcatcatcggtggttccgctccgtggactgggaagctgttccgcagagaaaactgaagcctcccatcgtgcccaagatagctggtgacggcgacacttccaacttcgaaacttaccctgagaatgactgggacacagccgcgcccgtgccgcagaaggatttagaaatcttcaagaatttctgaggacaggagctcacatctggaagaaacaggaagattggaatctgcctggaacaaagaactgcacctaagcagaccagaagcaaaatgtcttcttcacggcataaggacatctccacttttctctgtacctgtgtgtatagaaatagattagagcacagttgaaattcatggaactggcattatttaagcaactggaattccacactgtaggaaggttttgaaaattgtttggttgtagattttatcttatcctttagtgttgtgttcctactgtgatgtcttggtttttgtcatagacttaagtttataagtttgaactggacttgttcgattataaccacaaattgtgtgtgtgtgtgtgtgtgtgtgtgtgtgtgtgtgtgtgtgtgtatgcctgtgtgtatatatagaagtcattatggcagatgcacagaaattgtgcagtgatgtaaatgttcatactttacagagcctataatttttatttttcaatttgttttttcaaaaatctcttctcggggacaacatctgaagggtatgttgcatgcattaaaaaaaatcatctcacatgcattttatagttttggggaagaaaatatcatggggaggtctaccttcagtatctttagtgcttcttacctggtaacttgagactttaaaagaagaaacaaagaggggaagatatgggagcgaatttattccaagaatctacaatgacattgaagttgttggaggaatgtactgtatttaaaaaaaccttctgtgacacattcaaaaatttcatctgagctggatgcagtggcttgttcctatagtcccagcactttgggaggctgaggtgggtggattgcttgagcccaggagttggagaccagtctgggaaacgtggtgagacctcatctctacaaaatacaaaaaaattagccgggcatggtggcacgtgagtgtagtctcagctactcaggaggctgagatgagaggatcacttgagcctggggaggtccaggccgcagtgatccgagatcacaccactgcattccagcctgggtgacagagtgagaccctgtccaaaaaaaaaaaaaaaaaaaaagaaggcaatggctttgtgcttttgaagatggattgaagagaacgtccaccttaaggctttaaaagacagtgaagctgggtgcggtggtgcactcctgtaaccctgggactttgggaagctgaggcaggaagattgagcctaggagttcgagaccgacctgggcagcatagcgagaccccatctctatataaaaaaaaagatgttaaaacagtgaaattacagaaacagaacatagccaccctttttcatcagtgaccttttcttcacgtggaggtcaactcagtaggtgagaataattagtaggttcagcagaataaactctttacaattaataactcagtggaaaatgatgttcagatggtgaaatgtggaaatgttttagacaactctattttcagcctgtgcttctcactcaccatcctgttgggattaacagttgagggccatcgctgcctaaacatttagcgtgcggtttcccatcagttttaccgtgaatgtgaaaaggtgaaactggtgctgacttcggcagcaggtatactaaaattggaatgacacagaggagattagcatggccccctgcgcgaggaagatctgcagattcatgcagcattccatatttttttaagaaaaggttacactgtgcaccgacatgtggagctagaaggaaaagcttttaagtctcatgtttgctgactataaaaataaatcatagtaataatattgaacattctactttaaaaattattaataaaaccataaatgaaacacttgagcacactttaaaaagtacataaatccatgagtccatatgcctatttttaggttgtctgttttattatccaggatttcatactcagatgagaattagcatcaggaaagcctgaaatgccttaattgtgaactgatatgcaggaaaatgaaatatgcaagcacattggtgaccttgttctttacagacgtcgtgatcagcctccagccatacagaacaaatgagaaattagaagcgattccaagaacgtgtgatggtgtgaaacccactttggaccatcacacacatttcagcatttgaagtgacacaagctacctggtaactgcccatggcggggtcatagtttaaatggcccaatgtcatgtagaggttaatttaatcaaaatgagctataaacatggagcaatcactgtataattttaaaatagtttacctggccaggcatggtggctcacgcctgtaatcccagcactttgggaggccgaggcaggtggatcacctgaggtcaggagttcgagaccagcctggccaacatggcaaaacccccatctctactaaaatacaaaaattaggtgtggtggcgggcacctgtaatcctggctactcgggaggctgaggcaggagaatcgcttgaacccgggaggcagaggctgcagtaagccgagatcgtgccactgcactccagcctgggccacagagcaagactccgtctcaaaacataaaaataaaaaaaatacaaatagctgacccgggtgggcattccaaaatgtccgcatggacgatcacgaaacaatcacggtgcgaaatgtccgcatggatgatcacgaaacaatcacggtgcagaatgtccgtatggatgatcatgacaaacaatcactgcgcaaaatgtggaggaaaattcattaccataatcacaacatttgtatcagaaaaacattacaaatttactttgcttcatgtaattttacgagttggcaatattttcttaaattggaatactctaagagaataggacatggatatgttacaagaagaagtgtattggggcaagtcttgtttttctgaagggaaatgccaccggcctgctttcataggcattgataaagccaggaaggaaataaagtcacaaccaaatagtatacactgtctctactgaattcttctaattccttcgcaacagaagtctaaatcctgcttagcctaaacatatctatagccagcgatgggcaaattatatttgctgtcagcatgatagaataagaagcagaaaccccccagcagtggggtaagattgcgcgcttcatcccctcaaaatgcagttcagccccactccctctccatgcccatcaaacaactgcacaatcacttgttactgaatttcccattcagcgttttgtttctttctgtccatacttaaagaccaaatcatttgtttgctttgaagaaaaagcaaaaacaagaacaaaaacaccaaatcatttgaaatcactgtccattaaaaaaaatcaccagtggaactaaacagttgagtggtttgggatgtgttcgccatttctgtgtttgacctacatggcctctaattctttggaccattgtaactgtgaaactatggcttaatactgttaaagaccccaaggctccactctgtagccaggtgcacctcaggctgcacaaataccccaccagaatgtcacaatcattcattgctccagctactgagtgaacagggtgcaagacagcactggcttgggttgtatttttgcagccagttaactttgcatcaggtctacacagtccttgcagcctttgatttctccagttgtagagatttgaaatggggtgcccgggttcctctcgtttttccttcaatctacctagcatgcattttacacacattggaggagtcgtatgcactgtttttctgttgctgatggaggcaagcaggccttctaattagtctaacttaaacggatgggattcacttaacaaaagcaagaagaaaagcacacgaacaggtgtcttaatgcatttggatagtttctttgcggggtgtgtgtgtgtgtgtgtgtgtgtgtgtgtgtgtgtgtgtgtgtgtgtcttggtgaaggtgaggggctgtattttcaccaagccttttcataatcaagtttgctttgcaaaccttatggccttgcaccccgcagaacagtcccttcctaatagcagggatgctctgtcatggttttctgtaaattatcgtgtgttgggaagttctgttgaggcttagtttgatcttccatggtggacacgtctgttctgtatgtaaaaggcattacaattgtgttttagcagatgagacttgaagcctttccacagtccttgtgctctgagatggctgttgagctctgctcaactgtcgtagctgaattctttctttgcgctgaacactgggcagcctcaccatgttgccaacgtgcttctggggcccctgtcactgccgccggatgccgcgcacacaggcagagtgccttggcaggtttgtgcaccccttggcgagccagaactgggaaccccgcggggtgaccccttctcatggggggtcggggaggggagtgcctatttttaatcctgtctgtttgttgcacaatggaaatcactgtgatttgtacatatgccctaggaaaattttactgctgtctaatttatgtaataatactgttgattccaggtttgtttaataaaactttgtatcttttcagaa

SEQ ID NO: 152325 - DNA, 1077 bp, Artificial Sequence
  derived and/or modified sequence
atggaggcccccggcctggcccaggccgccgccgccgagagcgacagcagaaaggtggccgaggagacccccgacggcgcccccgccctgtgccccagccccgaggccctgagccccgagccccccgtgtacagcctgcaggacttcgacaccctggccaccgtgggcaccggcaccttcggcagagtgcacctggtgaaggagaagaccgccaagcacttcttcgccctgaaggtgatgagcatccccgacgtgatcagactgaagcaggagcagcacgtgcacaacgagaagagcgtgctgaaggaggtgagccaccccttcctgatcagactgttctggacctggcacgacgagagattcctgtacatgctgatggagtacgtgcccggcggcgagctgttcagctacctgagaaacagaggcagattcagcagcaccaccggcctgttctacagcgccgagatcatctgcgccatcgagtacctgcacagcaaggagatcgtgtacagagacctgaagcccgagaacatcctgctggacagagacggccacatcaagctgaccgacttcggcttcgccaagaagctggtggacagaacctggaccctgtgcggcacccccgagtacctggcccccgaggtgatccagagcaagggccacggcagagccgtggactggtgggccctgggcatcctgatcttcgagatgctgagcggcttcccccccttcttcgacgacaaccccttcggcatctaccagaagatcctggccggcaagatcgacttccccagacacctggacttccacgtgaaggacctgatcaagaagctgctggtggtggacagaaccagaagactgggcaacatgaagaacggcgccaacgacgtgaagcaccacagatggttcagaagcgtggactgggaggccgtgccccagagaaagctgaagccccccatcgtgcccaagatcgccggcgacggcgacaccagcaacttcgagacctaccccgagaacgactgggacaccgccgcccccgtgccccagaaggacctggagatcttcaagaacttctag

SEQ ID NO: 152326 - protein, 3460 aa, Artificial Sequence [sequence omitted]

SEQ ID NO: 152327 - protein, 977 aa, Artificial Sequence
  derived and/or modified sequence
MCSGHGRCIQGNCVCDEQWGGLYCDDPETSLPTQLKDNFNRAPSSQNWLTVNGGKLSTVCGAVASGMALHFSGGCSRLLVTVDLNLTNAEFIQFYFMYGCLITPNNRNQGVLLEYSVNGGITWNLLMEIFYDQYSKPGFVNILLPPDAKEIATRFRWWQPRHDGLDQNDWAIDNVLISGSADQRTVMLDTFSSAPVPQHERSPADAGPVGRIAFDMFMEDKTSVNEHWLFHDDCTVERFCDSPDGVMLCGSHDGREVYAVTHDLTPTEGWIMQFKISVGCKVSEKIAQNQIHVQYSTDFGVSWNYLVPQCLPADPKCSGSVSQPSVFFPTKGWKRITYPLPESLVGNPVRFRFYQKYSDMQWAIDNFYLGPGCLDNCRGHGDCLREQCICDPGYSGPNCYLTHTLKTFLKERFDSEEIKPDLWMSLEGGSTCTECGILAEDTALYFGGSTVRQAVTQDLDLRGAKFLQYWGRIGSENNMTSCHRPICRKEGVLLDYSTDGGITWTLLHEMDYQKYISVRHDYILLPEDALTNTTRLRWWQPFVISNGIVVSGVERAQWALDNILIGGAEINPSQLVDTFDDEGTSHEENWSFYPNAVRTAGFCGNPSFHLYWPNKKKDKTHNALSSRELIIQPGYMMQFKIVVGCEATSCGDLHSVMLEYTKDARSDSWQLVQTQCLPSSSNSIGCSPFQFHEATIYNSVNSSSWKRITIQLPDHVSSSATQFRWIQKGEETEKQSWAIDHVYIGEACPKLCSGHGYCTTGAICICDESFQGDDCSVFSHDLPSYIKDNFESARVTEANWETIQGGVIGSGCGQLAPYAHGDSLYFNGCQIRQAATKPLDLTRASKIMFVLQIGSMSQTDSCNSDLSGPHAVDKAVLLQYSVNNGITWHVIAQHQPKDFTQAQRVSYNVPLEARMKGVLLRWWQPRHNGTGHDQWALDHVEVVLVTTRKQNYMMNFSRQHGLRHFYNRRRRSLRRYP

SEQ ID NO: 152328 - protein, 3460 aa, Artificial Sequence
  derived and/or modified sequence
MERSGWARQTFLLALLLGATLRARAAAGYYPRFSPFFFLCTHHGELEGDGEQGEVLISLHIAGNPTYYVPGQEYHVTISTSTFFDGLLVTGLYTSTSVQASQSIGGSSAFGFGIMSDHQFGNQFMCSVVASHVSHLPTTNLSFIWIAPPAGTGCVNFMATATHRGQVIFKDALAQQLCEQGAPTDVTVHPHLAEIHSDSIILRDDFDSYHQLQLNPNIWVECNNCETGEQCGAIMHGNAVTFCEPYGPRELITTGLNTTTASVLQFSIGSGSCRFSYSDPSIIVLYAKNNSADWIQLEKIRAPSNVSTIIHILYLPEDAKGENVQFQWKQENLRVGEVYEACWALDNILIINSAHRQVVLEDSLDPVDTGNWLFFPGATVKHSCQSDGNSIYFHGNEGSEFNFATTRDVDLSTEDIQEQWSEEFESQPTGWDVLGAVIGTECGTIESGLSMVFLKDGERKLCTPSMDTTGYGNLRFYFVMGGICDPGNSHENDIILYAKIEGRKEHITLDTLSYSSYKVPSLVSVVINPELQTPATKFCLRQKNHQGHNRNVWAVDFFHVLPVLPSTMSHMIQFSINLGCGTHQPGNSVSLEFSTNHGRSWSLLHTECLPEICAGPHLPHSTVYSSENYSGWNRITIPLPNAALTRNTRIRWRQTGPILGNMWAIDNVYIGPSCLKFCSGRGQCTRHGCKCDPGFSGPACEMASQTFPMFISESFGSSRLSSYHNFYSIRGAEVSFGCGVLASGKALVFNKDGRRQLITSFLDSSQSRFLQFTLRLGSKSVLSTCRAPDQPGEGVLLHYSYDNGITWKLLEHYSYLSYHEPRIISVELPGDAKQFGIQFRWWQPYHSSQREDVWAIDEIIMTSVLFNSISLDFTNLVEVTQSLGFYLGNVQPYCGHDWTLCFTGDSKLASSMRYVETQSMQIGASYMIQFSLVMGCGQKYTPHMDNQVKLEYSTNHGLTWHLVQEECLPSMPSCQEFTSASIYHASEFTQWRRVIVLLPQKTWSSATRFRWSQSYYTAQDEWALDSIYIGQQCPNMCSGHGSCDHGICRCDQGYQGTECHPEAALPSTIMSDFENQNGWESDWQEVIGGEIVKPEQGCGVISSGSSLYFSKAGKRQLVSWDLDTSWVDFVQFYIQIGGESASCNKPDSREEGVLLQYSNNGGIQWHLLAEMYFSDFSKPRFVYLELPAAAKTPCTRFRWWQPVFSGEDYDQWAVDDIIILSEKQKQIIPVINPTLPQNFYEKPAFDYPMNQMSVWLMLANEGMVKNETFCAATPSAMIFGKSDGDRFAVTRDLTLKPGYVLQFKLNIGCANQFSSTAPVLLQYSHDAGMSWFLVKEGCYPASAGKGCEGNSRELSEPTMYHTGDFEEWTRITIVIPRSLASSKTRFRWIQESSSQKNVPPFGLDGVYISEPCPSYCSGHGDCISGVCFCDLGYTAAQGTCVSNVPNHNEMFDRFEGKLSPLWYKITGAQVGTGCGTLNDGKSLYFNGPGKREARTVPLDTRNIRLVQFYIQIGSKTSGITCIKPRTRNEGLIVQYSNDNGILWHLLRELDFMSFLEPQIISIDLPQDAKTPATAFRWWQPQHGKHSAQWALDDVLIGMNDSSQTGFQDKFDGSIDLQANWYRIQGGQVDIDCLSMDTALIFTENIGKPRYAETWDFHVSASTFLQFEMSMGCSKPFSNSHSVQLQYSLNNGKDWHLVTEECVPPTIGCLHYTESSIYTSERFQNWKRITVYLPLSTISPRTRFRWIQANYTVGADSWAIDNVVLASGCPWMCSGRGICDAGRCVCDRGFGGPYCVPVVPLPSILKDDFNGNLHPDLWPEVYGAERGNLNGETIKSGTSLIFKGEGLRMLISRDLDCTNTMYVQFSLRFIAKSTPERSHSILLQFSISGGITWHLMDEFYFPQTTNILFINVPLPYTAQTNATRFRLWQPYNNGKKEEIWIVDDFIIDGNNVNNPVMLLDTFDFGPREDNWFFYPGGNIGLYCPYSSKGAPEEDSAMVFVSNEVGEHSITTRDLNVNENTIIQFEINVGCSTDSSSADPVRLEFSRDFGATWHLLLPLCYHSSSHVSSLCSTEHHPSSTYYAGTMQGWRREVVHFGKLHLCGSVRFRWYQGFYPAGSQPVTWAIDNVYIGPQCEEMCNGQGSCINGTKCICDPGYSGPTCKISTKNPDFLKDDFEGQLESDRFLLMSGGKPSRKCGILSSGNNLFFNEDGLRMLMTRDLDLSHARFVQFFMRLGCGKGVPDPRSQPVLLQYSLNGGLSWSLLQEFLFSNSSNVGRYIALEIPLKARSGSTRLRWWQPSENGHFYSPWVIDQILIGGNISGNTVLEDDFTTLDSRKWLLHPGGTKMPVCGSTGDALVFIEKASTRYVVSTDVAVNEDSFLQIDFAASCSVTDSCYAIELEYSVDLGLSWHPLVRDCLPTNVECSRYHLQRILVSDTFNKWTRITLPLPPYTRSQATRFRWHQPAPFDKQQTWAIDNVYIGDGCIDMCSGHGRCIQGNCVCDEQWGGLYCDDPETSLPTQLKDNFNRAPSSQNWLTVNGGKLSTVCGAVASGMALHFSGGCSRLLVTVDLNLTNAEFIQFYFMYGCLITPNNRNQGVLLEYSVNGGITWNLLMEIFYDQYSKPGFVNILLPPDAKEIATRFRWWQPRHDGLDQNDWAIDNVLISGSADQRTVMLDTFSSAPVPQHERSPADAGPVGRIAFDMFMEDKTSVNEHWLFHDDCTVERFCDSPDGVMLCGSHDGREVYAVTHDLTPTEGWIMQFKISVGCKVSEKIAQNQIHVQYSTDFGVSWNYLVPQCLPADPKCSGSVSQPSVFFPTKGWKRITYPLPESLVGNPVRFRFYQKYSDMQWAIDNFYLGPGCLDNCRGHGDCLREQCICDPGYSGPNCYLTHTLKTFLKERFDSEEIKPDLWMSLEGGSTCTECGILAEDTALYFGGSTVRQAVTQDLDLRGAKFLQYWGRIGSENNMTSCHRPICRKEGVLLDYSTDGGITWTLLHEMDYQKYISVRHDYILLPEDALTNTTRLRWWQPFVISNGIVVSGVERAQWALDNILIGGAEINPSQLVDTFDDEGTSHEENWSFYPNAVRTAGFCGNPSFHLYWPNKKKDKTHNALSSRELIIQPGYMMQFKIVVGCEATSCGDLHSVMLEYTKDARSDSWQLVQTQCLPSSSNSIGCSPFQFHEATIYNSVNSSSWKRITIQLPDHVSSSATQFRWIQKGEETEKQSWAIDHVYIGEACPKLCSGHGYCTTGAICICDESFQGDDCSVFSHDLPSYIKDNFESARVTEANWETIQGGVIGSGCGQLAPYAHGDSLYFNGCQIRQAATKPLDLTRASKIMFVLQIGSMSQTDSCNSDLSGPHAVDKAVLLQYSVNNGITWHVIAQHQPKDFTQAQRVSYNVPLEARMKGVLLRWWQPRHNGTGHDQWALDHVEVVLVSTRKQNYMMNFSRQHGLRHFYNRRRRSLRRYP

SEQ ID NO: 152329 - protein, 3427 aa, Artificial Sequence
  derived and/or modified sequence
MERSGWARQTFLLALLLGATLRARAAAGYYPRFSPFFFLCTHHGELEGDGEQGEVLISLHIAGNPTYYVPGQEYHVTISTSTFFDGLLVTGLYTSTSVQASQSIGGSSAFGFGIMSDHQFGNQFMCSVVASHVSHLPTTNLSFIWIAPPAGTGCVNFMATATHRGQVIFKDALAQQLCEQGAPTDVTVHPHLAEIHSDSIILRDDFDSYHQLQLNPNIWVECNNCETGEQCGAIMHGNAVTFCEPYGPRELITTGLNTTTASVLQFSIGSGSCRFSYSDPSIIVLYAKNNSADWIQLEKIRAPSNVSTIIHILYLPEDAKGENVQFQWKQENLRVGEVYEACWALDNILIINSAHRQVVLEDSLDPVDTGNWLFFPGATVKHSCQSDGNSIYFHGNEGSEFNFATTRDVDLSTEDIQEQWSEEFESQPTGWDVLGAVIGTECGTIESGLSMVFLKDGERKLCTPSMDTTGYGNLRFYFVMGGICDPGNSHENDIILYAKIEGRKEHITLDTLSYSSYKVPSLVSVVINPELQTPATKFCLRQKNHQGHNRNVWAVDFFHVLPVLPSTMSHMIQFSINLGCGTHQPGNSVSLEFSTNHGRSWSLLHTECLPEICAGPHLPHSTVYSSENYSGWNRITIPLPNAALTRNTRIRWRQTGPILGNMWAIDNVYIGPSCLKFCSGRGQCTRHGCKCDPGFSGPACEMASQTFPMFISESFGSSRLSSYHNFYSIRGAEVSFGCGVLASGKALVFNKDGRRQLITSFLDSSQSRFLQFTLRLGSKSVLSTCRAPDQPGEGVLLHYSYDNGITWKLLEHYSYLSYHEPRIISVELPGDAKQFGIQFRWWQPYHSSQREDVWAIDEIIMTSVLFNSISLDFTNLVEVTQSLGFYLGNVQPYCGHDWTLCFTGDSKLASSMRYVETQSMQIGASYMIQFSLVMGCGQKYTPHMDNQVKLEYSTNHGLTWHLVQEECLPSMPSCQEFTSASIYHASEFTQWRRVIVLLPQKTWSSATRFRWSQSYYTAQDEWALDSIYIGQQCPNMCSGHGSCDHGICRCDQGYQGTECHPEAALPSTIMSDFENQNGWESDWQEVIGGEIVKPEQGCGVISSGSSLYFSKAGKRQLVSWDLDTSWVDFVQFYIQIGGESASCNKPDSREEGVLLQYSNNGGIQWHLLAEMYFSDFSKPRFVYLELPAAAKTPCTRFRWWQPVFSGEDYDQWAVDDIIILSEKQKQIIPVINPTLPQNFYEKPAFDYPMNQMSVWLMLANEGMVKNETFCAATPSAMIFGKSDGDRFAVTRDLTLKPGYVLQFKLNIGCANQFSSTAPVLLQYSHDAGMSWFLVKEGCYPASAGKGCEGNSRELSEPTMYHTGDFEEWTRITIVIPRSLASSKTRFRWIQESSSQKNVPPFGLDGVYISEPCPSYCSGHGDCISGVCFCDLGYTAAQGTCVSNVPNHNEMFDRFEGKLSPLWYKITGAQVGTGCGTLNDGKSLYFNGPGKREARTVPLDTRNIRLVQFYIQIGSKTSGITCIKPRTRNEGLIVQYSNDNGILWHLLRELDFMSFLEPQIISIDLPQDAKTPATAFRWWQPQHGKHSAQWALDDVLIGMNDSSQTGFQDKFDGSIDLQANWYRIQGGQVDIDCLSMDTALIFTENIGKPRYAETWDFHVSASTFLQFEMSMGCSKPFSNSHSVQLQYSLNNGKDWHLVTEECVPPTIGCLHYTESSIYTSERFQNWKRITVYLPLSTISPRTRFRWIQANYTVGADSWAIDNVVLASGCPWMCSGRGICDAGRCVCDRGFGGPYCVPVVPLPSILKDDFNGNLHPDLWPEVYGAERGNLNGETIKSGTSLIFKGEGLRMLISRDLDCTNTMYVQFSLRFIAKSTPERSHSILLQFSISGGITWHLMDEFYFPQTTNILFINVPLPYTAQTNATRFRLWQPYNNGKKEEIWIVDDFIIDGNNVNNPVMLLDTFDFGPREDNWFFYPGGNIGLYCPYSSKGAPEEDSAMVFVSNEVGEHSITTRDLNVNENTIIQFEINVGCSTDSSSADPVRLEFSRDFGATWHLLLPLCYHSSSHVSSLCSTEHHPSSTYYAGTMQGWRREVVHFGKLHLCGSVRFRWYQGFYPAGSQPVTWAIDNVYIGPQCEEMCNGQGSCINGTKCICDPGYSGPTCKISTKNPDFLKDDFEGQLESDRFLLMSGGKPSRKCGILSSGNNLFFNEDGLRMLMTRDLDLSHARFVQFFMRLGCGKGVPDPRSQPVLLQYSLNGGLSWSLLQEFLFSNSSNVGRYIALEIPLKARSGSTRLRWWQPSENGHFYSPWVIDQILIGGNISGNTVLEDDFTTLDSRKWLLHPGGTKMPVCGSTGDALVFIEKASTRYVVSTDVAVNEDSFLQIDFAASCSVTDSCYAIELEYSVDLGLSWHPLVRDCLPTNVECSRYHLQRILVSDTFNKWTRITLPLPPYTRSQATRFRWHQPAPFDKQQTWAIDNVYIGDGCIDMCSGHGRCIQGNCVCDEQWGGLYCDDPETSLPTQLKDNFNRAPSSQNWLTVNGGKLSTVCGAVASGMALHFSGGCSRLLVTVDLNLTNAEFIQFYFMYGCLITPNNRNQGVLLEYSVNGGITWNLLMEIFYDQYSKPGFVNILLPPDAKEIATRFRWWQPRHDGLDQNDWAIDNVLISGSADQRTVMLDTFSSAPVPQHERSPADAGPVGRIAFDMFMEDKTSVNEHWLFHDDCTVERFCDSPDGVMLCGSHDGREVYAVTHDLTPTEGWIMQFKISVGCKVSEKIAQNQIHVQYSTDFGVSWNYLVPQCLPADPKCSGSVSQPSVFFPTKGWKRITYPLPESLVGNPVRFRFYQKYSDMQWAIDNFYLGPGCLDNCRGHGDCLREQCICDPGYSGPNCYLTHTLKTFLKERFDSEEIKPDLWMSLEGGSTCTECGILAEDTALYFGGSTVRQAVTQDLDLRGAKFLQYWGRIGSENNMTSCHRPICRKEGVLLDYSTDGGITWTLLHEMDYQKYISVRHDYILLPEDALTNTTRLRWWQPFVISNGIVVSGVERAQWALDNILIGGAEINPSQLVDTFDDEGTSHEENWSFYPNAVRTAGFCGNPSFHLYWPNKKKDKTHNALSSRELIIQPGYMMQFKIVVGCEATSCGDLHSVMLEYTKDARSDSWQLVQTQCLPSSSNSIGCSPFQFHEATIYNSVNSSSWKRITIQLPDHVSSSATQFRWIQKGEETEKQSWAIDHVYIGEACPKLCSGHGYCTTGAICICDESFQGDDCSVFSHDLPSYIKDNFESARVTEANWETIQGGVIGSGCGQLAPYAHGDSLYFNGCQIRQAATKPLDLTRASKIMFVLQIGSMSQTDSCNSDLSGPHAVDKAVLLQYSVNNGITWHVIAQHQPKDFTQAQRVSYNVPLEARMKGVLLRWWQPRHNGTGHDQWALDHVEVVL

SEQ ID NO: 152330 - DNA, 10383 bp, Artificial Sequence
  derived and/or modified sequence
atggagagaagcggctgggccagacagaccttcctgctggccctgctgctgggcgccaccctgagagccagagccgccgccggctactaccccagattcagccccttcttcttcctgtgcacccaccacggcgagctggagggcgacggcgagcagggcgaggtgctgatcagcctgcacatcgccggcaaccccacctactacgtgcccggccaggagtaccacgtgaccatcagcaccagcaccttcttcgacggcctgctggtgaccggcctgtacaccagcaccagcgtgcaggccagccagagcatcggcggcagcagcgccttcggcttcggcatcatgagcgaccaccagttcggcaaccagttcatgtgcagcgtggtggccagccacgtgagccacctgcccaccaccaacctgagcttcatctggatcgccccccccgccggcaccggctgcgtgaacttcatggccaccgccacccacagaggccaggtgatcttcaaggacgccctggcccagcagctgtgcgagcagggcgcccccaccgacgtgaccgtgcacccccacctggccgagatccacagcgacagcatcatcctgagagacgacttcgacagctaccaccagctgcagctgaaccccaacatctgggtggagtgcaacaactgcgagaccggcgagcagtgcggcgccatcatgcacggcaacgccgtgaccttctgcgagccctacggccccagagagctgatcaccaccggcctgaacaccaccaccgccagcgtgctgcagttcagcatcggcagcggcagctgcagattcagctacagcgaccccagcatcatcgtgctgtacgccaagaacaacagcgccgactggatccagctggagaagatcagagcccccagcaacgtgagcaccatcatccacatcctgtacctgcccgaggacgccaagggcgagaacgtgcagttccagtggaagcaggagaacctgagagtgggcgaggtgtacgaggcctgctgggccctggacaacatcctgatcatcaacagcgcccacagacaggtggtgctggaggacagcctggaccccgtggacaccggcaactggctgttcttccccggcgccaccgtgaagcacagctgccagagcgacggcaacagcatctacttccacggcaacgagggcagcgagttcaacttcgccaccaccagagacgtggacctgagcaccgaggacatccaggagcagtggagcgaggagttcgagagccagcccaccggctgggacgtgctgggcgccgtgatcggcaccgagtgcggcaccatcgagagcggcctgagcatggtgttcctgaaggacggcgagagaaagctgtgcacccccagcatggacaccaccggctacggcaacctgagattctacttcgtgatgggcggcatctgcgaccccggcaacagccacgagaacgacatcatcctgtacgccaagatcgagggcagaaaggagcacatcaccctggacaccctgagctacagcagctacaaggtgcccagcctggtgagcgtggtgatcaaccccgagctgcagacccccgccaccaagttctgcctgagacagaagaaccaccagggccacaacagaaacgtgtgggccgtggacttcttccacgtgctgcccgtgctgcccagcaccatgagccacatgatccagttcagcatcaacctgggctgcggcacccaccagcccggcaacagcgtgagcctggagttcagcaccaaccacggcagaagctggagcctgctgcacaccgagtgcctgcccgagatctgcgccggcccccacctgccccacagcaccgtgtacagcagcgagaactacagcggctggaacagaatcaccatccccctgcccaacgccgccctgaccagaaacaccagaatcagatggagacagaccggccccatcctgggcaacatgtgggccatcgacaacgtgtacatcggccccagctgcctgaagttctgcagcggcagaggccagtgcaccagacacggctgcaagtgcgaccccggcttcagcggccccgcctgcgagatggccagccagaccttccccatgttcatcagcgagagcttcggcagcagcagactgagcagctaccacaacttctacagcatcagaggcgccgaggtgagcttcggctgcggcgtgctggccagcggcaaggccctggtgttcaacaaggacggcagaagacagctgatcaccagcttcctggacagcagccagagcagattcctgcagttcaccctgagactgggcagcaagagcgtgctgagcacctgcagagcccccgaccagcccggcgagggcgtgctgctgcactacagctacgacaacggcatcacctggaagctgctggagcactacagctacctgagctaccacgagcccagaatcatcagcgtggagctgcccggcgacgccaagcagttcggcatccagttcagatggtggcagccctaccacagcagccagagagaggacgtgtgggccatcgacgagatcatcatgaccagcgtgctgttcaacagcatcagcctggacttcaccaacctggtggaggtgacccagagcctgggcttctacctgggcaacgtgcagccctactgcggccacgactggaccctgtgcttcaccggcgacagcaagctggccagcagcatgagatacgtggagacccagagcatgcagatcggcgccagctacatgatccagttcagcctggtgatgggctgcggccagaagtacaccccccacatggacaaccaggtgaagctggagtacagcaccaaccacggcctgacctggcacctggtgcaggaggagtgcctgcccagcatgcccagctgccaggagttcaccagcgccagcatctaccacgccagcgagttcacccagtggagaagagtgatcgtgctgctgccccagaagacctggagcagcgccaccagattcagatggagccagagctactacaccgcccaggacgagtgggccctggacagcatctacatcggccagcagtgccccaacatgtgcagcggccacggcagctgcgaccacggcatctgcagatgcgaccagggctaccagggcaccgagtgccaccccgaggccgccctgcccagcaccatcatgagcgacttcgagaaccagaacggctgggagagcgactggcaggaggtgatcggcggcgagatcgtgaagcccgagcagggctgcggcgtgatcagcagcggcagcagcctgtacttcagcaaggccggcaagagacagctggtgagctgggacctggacaccagctgggtggacttcgtgcagttctacatccagatcggcggcgagagcgccagctgcaacaagcccgacagcagagaggagggcgtgctgctgcagtacagcaacaacggcggcatccagtggcacctgctggccgagatgtacttcagcgacttcagcaagcccagattcgtgtacctggagctgcccgccgccgccaagaccccctgcaccagattcagatggtggcagcccgtgttcagcggcgaggactacgaccagtgggccgtggacgacatcatcatcctgagcgagaagcagaagcagatcatccccgtgatcaaccccaccctgccccagaacttctacgagaagcccgccttcgactaccccatgaaccagatgagcgtgtggctgatgctggccaacgagggcatggtgaagaacgagaccttctgcgccgccacccccagcgccatgatcttcggcaagagcgacggcgacagattcgccgtgaccagagacctgaccctgaagcccggctacgtgctgcagttcaagctgaacatcggctgcgccaaccagttcagcagcaccgcccccgtgctgctgcagtacagccacgacgccggcatgagctggttcctggtgaaggagggctgctaccccgccagcgccggcaagggctgcgagggcaacagcagagagctgagcgagcccaccatgtaccacaccggcgacttcgaggagtggaccagaatcaccatcgtgatccccagaagcctggccagcagcaagaccagattcagatggatccaggagagcagcagccagaagaacgtgccccccttcggcctggacggcgtgtacatcagcgagccctgccccagctactgcagcggccacggcgactgcatcagcggcgtgtgcttctgcgacctgggctacaccgccgcccagggcacctgcgtgagcaacgtgcccaaccacaacgagatgttcgacagattcgagggcaagctgagccccctgtggtacaagatcaccggcgcccaggtgggcaccggctgcggcaccctgaacgacggcaagagcctgtacttcaacggccccggcaagagagaggccagaaccgtgcccctggacaccagaaacatcagactggtgcagttctacatccagatcggcagcaagaccagcggcatcacctgcatcaagcccagaaccagaaacgagggcctgatcgtgcagtacagcaacgacaacggcatcctgtggcacctgctgagagagctggacttcatgagcttcctggagccccagatcatcagcatcgacctgccccaggacgccaagacccccgccaccgccttcagatggtggcagccccagcacggcaagcacagcgcccagtgggccctggacgacgtgctgatcggcatgaacgacagcagccagaccggcttccaggacaagttcgacggcagcatcgacctgcaggccaactggtacagaatccagggcggccaggtggacatcgactgcctgagcatggacaccgccctgatcttcaccgagaacatcggcaagcccagatacgccgagacctgggacttccacgtgagcgccagcaccttcctgcagttcgagatgagcatgggctgcagcaagcccttcagcaacagccacagcgtgcagctgcagtacagcctgaacaacggcaaggactggcacctggtgaccgaggagtgcgtgccccccaccatcggctgcctgcactacaccgagagcagcatctacaccagcgagagattccagaactggaagagaatcaccgtgtacctgcccctgagcaccatcagccccagaaccagattcagatggatccaggccaactacaccgtgggcgccgacagctgggccatcgacaacgtggtgctggccagcggctgcccctggatgtgcagcggcagaggcatctgcgacgccggcagatgcgtgtgcgacagaggcttcggcggcccctactgcgtgcccgtggtgcccctgcccagcatcctgaaggacgacttcaacggcaacctgcaccccgacctgtggcccgaggtgtacggcgccgagagaggcaacctgaacggcgagaccatcaagagcggcaccagcctgatcttcaagggcgagggcctgagaatgctgatcagcagagacctggactgcaccaacaccatgtacgtgcagttcagcctgagattcatcgccaagagcacccccgagagaagccacagcatcctgctgcagttcagcatcagcggcggcatcacctggcacctgatggacgagttctacttcccccagaccaccaacatcctgttcatcaacgtgcccctgccctacaccgcccagaccaacgccaccagattcagactgtggcagccctacaacaacggcaagaaggaggagatctggatcgtggacgacttcatcatcgacggcaacaacgtgaacaaccccgtgatgctgctggacaccttcgacttcggccccagagaggacaactggttcttctaccccggcggcaacatcggcctgtactgcccctacagcagcaagggcgcccccgaggaggacagcgccatggtgttcgtgagcaacgaggtgggcgagcacagcatcaccaccagagacctgaacgtgaacgagaacaccatcatccagttcgagatcaacgtgggctgcagcaccgacagcagcagcgccgaccccgtgagactggagttcagcagagacttcggcgccacctggcacctgctgctgcccctgtgctaccacagcagcagccacgtgagcagcctgtgcagcaccgagcaccaccccagcagcacctactacgccggcaccatgcagggctggagaagagaggtggtgcacttcggcaagctgcacctgtgcggcagcgtgagattcagatggtaccagggcttctaccccgccggcagccagcccgtgacctgggccatcgacaacgtgtacatcggcccccagtgcgaggagatgtgcaacggccagggcagctgcatcaacggcaccaagtgcatctgcgaccccggctacagcggccccacctgcaagatcagcaccaagaaccccgacttcctgaaggacgacttcgagggccagctggagagcgacagattcctgctgatgagcggcggcaagcccagcagaaagtgcggcatcctgagcagcggcaacaacctgttcttcaacgaggacggcctgagaatgctgatgaccagagacctggacctgagccacgccagattcgtgcagttcttcatgagactgggctgcggcaagggcgtgcccgaccccagaagccagcccgtgctgctgcagtacagcctgaacggcggcctgagctggagcctgctgcaggagttcctgttcagcaacagcagcaacgtgggcagatacatcgccctggagatccccctgaaggccagaagcggcagcaccagactgagatggtggcagcccagcgagaacggccacttctacagcccctgggtgatcgaccagatcctgatcggcggcaacatcagcggcaacaccgtgctggaggacgacttcaccaccctggacagcagaaagtggctgctgcaccccggcggcaccaagatgcccgtgtgcggcagcaccggcgacgccctggtgttcatcgagaaggccagcaccagatacgtggtgagcaccgacgtggccgtgaacgaggacagcttcctgcagatcgacttcgccgccagctgcagcgtgaccgacagctgctacgccatcgagctggagtacagcgtggacctgggcctgagctggcaccccctggtgagagactgcctgcccaccaacgtggagtgcagcagataccacctgcagagaatcctggtgagcgacaccttcaacaagtggaccagaatcaccctgcccctgcccccctacaccagaagccaggccaccagattcagatggcaccagcccgcccccttcgacaagcagcagacctgggccatcgacaacgtgtacatcggcgacggctgcatcgacatgtgcagcggccacggcagatgcatccagggcaactgcgtgtgcgacgagcagtggggcggcctgtactgcgacgaccccgagaccagcctgcccacccagctgaaggacaacttcaacagagcccccagcagccagaactggctgaccgtgaacggcggcaagctgagcaccgtgtgcggcgccgtggccagcggcatggccctgcacttcagcggcggctgcagcagactgctggtgaccgtggacctgaacctgaccaacgccgagttcatccagttctacttcatgtacggctgcctgatcacccccaacaacagaaaccagggcgtgctgctggagtacagcgtgaacggcggcatcacctggaacctgctgatggagatcttctacgaccagtacagcaagcccggcttcgtgaacatcctgctgccccccgacgccaaggagatcgccaccagattcagatggtggcagcccagacacgacggcctggaccagaacgactgggccatcgacaacgtgctgatcagcggcagcgccgaccagagaaccgtgatgctggacaccttcagcagcgcccccgtgccccagcacgagagaagccccgccgacgccggccccgtgggcagaatcgccttcgacatgttcatggaggacaagaccagcgtgaacgagcactggctgttccacgacgactgcaccgtggagagattctgcgacagccccgacggcgtgatgctgtgcggcagccacgacggcagagaggtgtacgccgtgacccacgacctgacccccaccgagggctggatcatgcagttcaagatcagcgtgggctgcaaggtgagcgagaagatcgcccagaaccagatccacgtgcagtacagcaccgacttcggcgtgagctggaactacctggtgccccagtgcctgcccgccgaccccaagtgcagcggcagcgtgagccagcccagcgtgttcttccccaccaagggctggaagagaatcacctaccccctgcccgagagcctggtgggcaaccccgtgagattcagattctaccagaagtacagcgacatgcagtgggccatcgacaacttctacctgggccccggctgcctggacaactgcagaggccacggcgactgcctgagagagcagtgcatctgcgaccccggctacagcggccccaactgctacctgacccacaccctgaagaccttcctgaaggagagattcgacagcgaggagatcaagcccgacctgtggatgagcctggagggcggcagcacctgcaccgagtgcggcatcctggccgaggacaccgccctgtacttcggcggcagcaccgtgagacaggccgtgacccaggacctggacctgagaggcgccaagttcctgcagtactggggcagaatcggcagcgagaacaacatgaccagctgccacagacccatctgcagaaaggagggcgtgctgctggactacagcaccgacggcggcatcacctggaccctgctgcacgagatggactaccagaagtacatcagcgtgagacacgactacatcctgctgcccgaggacgccctgaccaacaccaccagactgagatggtggcagcccttcgtgatcagcaacggcatcgtggtgagcggcgtggagagagcccagtgggccctggacaacatcctgatcggcggcgccgagatcaaccccagccagctggtggacaccttcgacgacgagggcaccagccacgaggagaactggagcttctaccccaacgccgtgagaaccgccggcttctgcggcaaccccagcttccacctgtactggcccaacaagaagaaggacaagacccacaacgccctgagcagcagagagctgatcatccagcccggctacatgatgcagttcaagatcgtggtgggctgcgaggccaccagctgcggcgacctgcacagcgtgatgctggagtacaccaaggacgccagaagcgacagctggcagctggtgcagacccagtgcctgcccagcagcagcaacagcatcggctgcagccccttccagttccacgaggccaccatctacaacagcgtgaacagcagcagctggaagagaatcaccatccagctgcccgaccacgtgagcagcagcgccacccagttcagatggatccagaagggcgaggagaccgagaagcagagctgggccatcgaccacgtgtacatcggcgaggcctgccccaagctgtgcagcggccacggctactgcaccaccggcgccatctgcatctgcgacgagagcttccagggcgacgactgcagcgtgttcagccacgacctgcccagctacatcaaggacaacttcgagagcgccagagtgaccgaggccaactgggagaccatccagggcggcgtgatcggcagcggctgcggccagctggccccctacgcccacggcgacagcctgtacttcaacggctgccagatcagacaggccgccaccaagcccctggacctgaccagagccagcaagatcatgttcgtgctgcagatcggcagcatgagccagaccgacagctgcaacagcgacctgagcggcccccacgccgtggacaaggccgtgctgctgcagtacagcgtgaacaacggcatcacctggcacgtgatcgcccagcaccagcccaaggacttcacccaggcccagagagtgagctacaacgtgcccctggaggccagaatgaagggcgtgctgctgagatggtggcagcccagacacaacggcaccggccacgaccagtgggccctggaccacgtggaggtggtgctgttcagcaccagaaagcagaactacatgatgaacttcagcagacagcacggcctgagacacttctacaacagaagaagaagaagcctgagaagatacccctag

SEQ ID NO: 152331 - DNA, 2934 bp, Artificial Sequence
  derived and/or modified sequence
atgtgcagcggccacggcagatgcatccagggcaactgcgtgtgcgacgagcagtggggcggcctgtactgcgacgaccccgagaccagcctgcccacccagctgaaggacaacttcaacagagcccccagcagccagaactggctgaccgtgaacggcggcaagctgagcaccgtgtgcggcgccgtggccagcggcatggccctgcacttcagcggcggctgcagcagactgctggtgaccgtggacctgaacctgaccaacgccgagttcatccagttctacttcatgtacggctgcctgatcacccccaacaacagaaaccagggcgtgctgctggagtacagcgtgaacggcggcatcacctggaacctgctgatggagatcttctacgaccagtacagcaagcccggcttcgtgaacatcctgctgccccccgacgccaaggagatcgccaccagattcagatggtggcagcccagacacgacggcctggaccagaacgactgggccatcgacaacgtgctgatcagcggcagcgccgaccagagaaccgtgatgctggacaccttcagcagcgcccccgtgccccagcacgagagaagccccgccgacgccggccccgtgggcagaatcgccttcgacatgttcatggaggacaagaccagcgtgaacgagcactggctgttccacgacgactgcaccgtggagagattctgcgacagccccgacggcgtgatgctgtgcggcagccacgacggcagagaggtgtacgccgtgacccacgacctgacccccaccgagggctggatcatgcagttcaagatcagcgtgggctgcaaggtgagcgagaagatcgcccagaaccagatccacgtgcagtacagcaccgacttcggcgtgagctggaactacctggtgccccagtgcctgcccgccgaccccaagtgcagcggcagcgtgagccagcccagcgtgttcttccccaccaagggctggaagagaatcacctaccccctgcccgagagcctggtgggcaaccccgtgagattcagattctaccagaagtacagcgacatgcagtgggccatcgacaacttctacctgggccccggctgcctggacaactgcagaggccacggcgactgcctgagagagcagtgcatctgcgaccccggctacagcggccccaactgctacctgacccacaccctgaagaccttcctgaaggagagattcgacagcgaggagatcaagcccgacctgtggatgagcctggagggcggcagcacctgcaccgagtgcggcatcctggccgaggacaccgccctgtacttcggcggcagcaccgtgagacaggccgtgacccaggacctggacctgagaggcgccaagttcctgcagtactggggcagaatcggcagcgagaacaacatgaccagctgccacagacccatctgcagaaaggagggcgtgctgctggactacagcaccgacggcggcatcacctggaccctgctgcacgagatggactaccagaagtacatcagcgtgagacacgactacatcctgctgcccgaggacgccctgaccaacaccaccagactgagatggtggcagcccttcgtgatcagcaacggcatcgtggtgagcggcgtggagagagcccagtgggccctggacaacatcctgatcggcggcgccgagatcaaccccagccagctggtggacaccttcgacgacgagggcaccagccacgaggagaactggagcttctaccccaacgccgtgagaaccgccggcttctgcggcaaccccagcttccacctgtactggcccaacaagaagaaggacaagacccacaacgccctgagcagcagagagctgatcatccagcccggctacatgatgcagttcaagatcgtggtgggctgcgaggccaccagctgcggcgacctgcacagcgtgatgctggagtacaccaaggacgccagaagcgacagctggcagctggtgcagacccagtgcctgcccagcagcagcaacagcatcggctgcagccccttccagttccacgaggccaccatctacaacagcgtgaacagcagcagctggaagagaatcaccatccagctgcccgaccacgtgagcagcagcgccacccagttcagatggatccagaagggcgaggagaccgagaagcagagctgggccatcgaccacgtgtacatcggcgaggcctgccccaagctgtgcagcggccacggctactgcaccaccggcgccatctgcatctgcgacgagagcttccagggcgacgactgcagcgtgttcagccacgacctgcccagctacatcaaggacaacttcgagagcgccagagtgaccgaggccaactgggagaccatccagggcggcgtgatcggcagcggctgcggccagctggccccctacgcccacggcgacagcctgtacttcaacggctgccagatcagacaggccgccaccaagcccctggacctgaccagagccagcaagatcatgttcgtgctgcagatcggcagcatgagccagaccgacagctgcaacagcgacctgagcggcccccacgccgtggacaaggccgtgctgctgcagtacagcgtgaacaacggcatcacctggcacgtgatcgcccagcaccagcccaaggacttcacccaggcccagagagtgagctacaacgtgcccctggaggccagaatgaagggcgtgctgctgagatggtggcagcccagacacaacggcaccggccacgaccagtgggccctggaccacgtggaggtggtgctggtgaccaccagaaagcagaactacatgatgaacttcagcagacagcacggcctgagacacttctacaacagaagaagaagaagcctgagaagatacccctag

SEQ ID NO: 152332 - DNA, 10383 bp, Artificial Sequence
  derived and/or modified sequence
atggagagaagcggctgggccagacagaccttcctgctggccctgctgctgggcgccaccctgagagccagagccgccgccggctactaccccagattcagccccttcttcttcctgtgcacccaccacggcgagctggagggcgacggcgagcagggcgaggtgctgatcagcctgcacatcgccggcaaccccacctactacgtgcccggccaggagtaccacgtgaccatcagcaccagcaccttcttcgacggcctgctggtgaccggcctgtacaccagcaccagcgtgcaggccagccagagcatcggcggcagcagcgccttcggcttcggcatcatgagcgaccaccagttcggcaaccagttcatgtgcagcgtggtggccagccacgtgagccacctgcccaccaccaacctgagcttcatctggatcgccccccccgccggcaccggctgcgtgaacttcatggccaccgccacccacagaggccaggtgatcttcaaggacgccctggcccagcagctgtgcgagcagggcgcccccaccgacgtgaccgtgcacccccacctggccgagatccacagcgacagcatcatcctgagagacgacttcgacagctaccaccagctgcagctgaaccccaacatctgggtggagtgcaacaactgcgagaccggcgagcagtgcggcgccatcatgcacggcaacgccgtgaccttctgcgagccctacggccccagagagctgatcaccaccggcctgaacaccaccaccgccagcgtgctgcagttcagcatcggcagcggcagctgcagattcagctacagcgaccccagcatcatcgtgctgtacgccaagaacaacagcgccgactggatccagctggagaagatcagagcccccagcaacgtgagcaccatcatccacatcctgtacctgcccgaggacgccaagggcgagaacgtgcagttccagtggaagcaggagaacctgagagtgggcgaggtgtacgaggcctgctgggccctggacaacatcctgatcatcaacagcgcccacagacaggtggtgctggaggacagcctggaccccgtggacaccggcaactggctgttcttccccggcgccaccgtgaagcacagctgccagagcgacggcaacagcatctacttccacggcaacgagggcagcgagttcaacttcgccaccaccagagacgtggacctgagcaccgaggacatccaggagcagtggagcgaggagttcgagagccagcccaccggctgggacgtgctgggcgccgtgatcggcaccgagtgcggcaccatcgagagcggcctgagcatggtgttcctgaaggacggcgagagaaagctgtgcacccccagcatggacaccaccggctacggcaacctgagattctacttcgtgatgggcggcatctgcgaccccggcaacagccacgagaacgacatcatcctgtacgccaagatcgagggcagaaaggagcacatcaccctggacaccctgagctacagcagctacaaggtgcccagcctggtgagcgtggtgatcaaccccgagctgcagacccccgccaccaagttctgcctgagacagaagaaccaccagggccacaacagaaacgtgtgggccgtggacttcttccacgtgctgcccgtgctgcccagcaccatgagccacatgatccagttcagcatcaacctgggctgcggcacccaccagcccggcaacagcgtgagcctggagttcagcaccaaccacggcagaagctggagcctgctgcacaccgagtgcctgcccgagatctgcgccggcccccacctgccccacagcaccgtgtacagcagcgagaactacagcggctggaacagaatcaccatccccctgcccaacgccgccctgaccagaaacaccagaatcagatggagacagaccggccccatcctgggcaacatgtgggccatcgacaacgtgtacatcggccccagctgcctgaagttctgcagcggcagaggccagtgcaccagacacggctgcaagtgcgaccccggcttcagcggccccgcctgcgagatggccagccagaccttccccatgttcatcagcgagagcttcggcagcagcagactgagcagctaccacaacttctacagcatcagaggcgccgaggtgagcttcggctgcggcgtgctggccagcggcaaggccctggtgttcaacaaggacggcagaagacagctgatcaccagcttcctggacagcagccagagcagattcctgcagttcaccctgagactgggcagcaagagcgtgctgagcacctgcagagcccccgaccagcccggcgagggcgtgctgctgcactacagctacgacaacggcatcacctggaagctgctggagcactacagctacctgagctaccacgagcccagaatcatcagcgtggagctgcccggcgacgccaagcagttcggcatccagttcagatggtggcagccctaccacagcagccagagagaggacgtgtgggccatcgacgagatcatcatgaccagcgtgctgttcaacagcatcagcctggacttcaccaacctggtggaggtgacccagagcctgggcttctacctgggcaacgtgcagccctactgcggccacgactggaccctgtgcttcaccggcgacagcaagctggccagcagcatgagatacgtggagacccagagcatgcagatcggcgccagctacatgatccagttcagcctggtgatgggctgcggccagaagtacaccccccacatggacaaccaggtgaagctggagtacagcaccaaccacggcctgacctggcacctggtgcaggaggagtgcctgcccagcatgcccagctgccaggagttcaccagcgccagcatctaccacgccagcgagttcacccagtggagaagagtgatcgtgctgctgccccagaagacctggagcagcgccaccagattcagatggagccagagctactacaccgcccaggacgagtgggccctggacagcatctacatcggccagcagtgccccaacatgtgcagcggccacggcagctgcgaccacggcatctgcagatgcgaccagggctaccagggcaccgagtgccaccccgaggccgccctgcccagcaccatcatgagcgacttcgagaaccagaacggctgggagagcgactggcaggaggtgatcggcggcgagatcgtgaagcccgagcagggctgcggcgtgatcagcagcggcagcagcctgtacttcagcaaggccggcaagagacagctggtgagctgggacctggacaccagctgggtggacttcgtgcagttctacatccagatcggcggcgagagcgccagctgcaacaagcccgacagcagagaggagggcgtgctgctgcagtacagcaacaacggcggcatccagtggcacctgctggccgagatgtacttcagcgacttcagcaagcccagattcgtgtacctggagctgcccgccgccgccaagaccccctgcaccagattcagatggtggcagcccgtgttcagcggcgaggactacgaccagtgggccgtggacgacatcatcatcctgagcgagaagcagaagcagatcatccccgtgatcaaccccaccctgccccagaacttctacgagaagcccgccttcgactaccccatgaaccagatgagcgtgtggctgatgctggccaacgagggcatggtgaagaacgagaccttctgcgccgccacccccagcgccatgatcttcggcaagagcgacggcgacagattcgccgtgaccagagacctgaccctgaagcccggctacgtgctgcagttcaagctgaacatcggctgcgccaaccagttcagcagcaccgcccccgtgctgctgcagtacagccacgacgccggcatgagctggttcctggtgaaggagggctgctaccccgccagcgccggcaagggctgcgagggcaacagcagagagctgagcgagcccaccatgtaccacaccggcgacttcgaggagtggaccagaatcaccatcgtgatccccagaagcctggccagcagcaagaccagattcagatggatccaggagagcagcagccagaagaacgtgccccccttcggcctggacggcgtgtacatcagcgagccctgccccagctactgcagcggccacggcgactgcatcagcggcgtgtgcttctgcgacctgggctacaccgccgcccagggcacctgcgtgagcaacgtgcccaaccacaacgagatgttcgacagattcgagggcaagctgagccccctgtggtacaagatcaccggcgcccaggtgggcaccggctgcggcaccctgaacgacggcaagagcctgtacttcaacggccccggcaagagagaggccagaaccgtgcccctggacaccagaaacatcagactggtgcagttctacatccagatcggcagcaagaccagcggcatcacctgcatcaagcccagaaccagaaacgagggcctgatcgtgcagtacagcaacgacaacggcatcctgtggcacctgctgagagagctggacttcatgagcttcctggagccccagatcatcagcatcgacctgccccaggacgccaagacccccgccaccgccttcagatggtggcagccccagcacggcaagcacagcgcccagtgggccctggacgacgtgctgatcggcatgaacgacagcagccagaccggcttccaggacaagttcgacggcagcatcgacctgcaggccaactggtacagaatccagggcggccaggtggacatcgactgcctgagcatggacaccgccctgatcttcaccgagaacatcggcaagcccagatacgccgagacctgggacttccacgtgagcgccagcaccttcctgcagttcgagatgagcatgggctgcagcaagcccttcagcaacagccacagcgtgcagctgcagtacagcctgaacaacggcaaggactggcacctggtgaccgaggagtgcgtgccccccaccatcggctgcctgcactacaccgagagcagcatctacaccagcgagagattccagaactggaagagaatcaccgtgtacctgcccctgagcaccatcagccccagaaccagattcagatggatccaggccaactacaccgtgggcgccgacagctgggccatcgacaacgtggtgctggccagcggctgcccctggatgtgcagcggcagaggcatctgcgacgccggcagatgcgtgtgcgacagaggcttcggcggcccctactgcgtgcccgtggtgcccctgcccagcatcctgaaggacgacttcaacggcaacctgcaccccgacctgtggcccgaggtgtacggcgccgagagaggcaacctgaacggcgagaccatcaagagcggcaccagcctgatcttcaagggcgagggcctgagaatgctgatcagcagagacctggactgcaccaacaccatgtacgtgcagttcagcctgagattcatcgccaagagcacccccgagagaagccacagcatcctgctgcagttcagcatcagcggcggcatcacctggcacctgatggacgagttctacttcccccagaccaccaacatcctgttcatcaacgtgcccctgccctacaccgcccagaccaacgccaccagattcagactgtggcagccctacaacaacggcaagaaggaggagatctggatcgtggacgacttcatcatcgacggcaacaacgtgaacaaccccgtgatgctgctggacaccttcgacttcggccccagagaggacaactggttcttctaccccggcggcaacatcggcctgtactgcccctacagcagcaagggcgcccccgaggaggacagcgccatggtgttcgtgagcaacgaggtgggcgagcacagcatcaccaccagagacctgaacgtgaacgagaacaccatcatccagttcgagatcaacgtgggctgcagcaccgacagcagcagcgccgaccccgtgagactggagttcagcagagacttcggcgccacctggcacctgctgctgcccctgtgctaccacagcagcagccacgtgagcagcctgtgcagcaccgagcaccaccccagcagcacctactacgccggcaccatgcagggctggagaagagaggtggtgcacttcggcaagctgcacctgtgcggcagcgtgagattcagatggtaccagggcttctaccccgccggcagccagcccgtgacctgggccatcgacaacgtgtacatcggcccccagtgcgaggagatgtgcaacggccagggcagctgcatcaacggcaccaagtgcatctgcgaccccggctacagcggccccacctgcaagatcagcaccaagaaccccgacttcctgaaggacgacttcgagggccagctggagagcgacagattcctgctgatgagcggcggcaagcccagcagaaagtgcggcatcctgagcagcggcaacaacctgttcttcaacgaggacggcctgagaatgctgatgaccagagacctggacctgagccacgccagattcgtgcagttcttcatgagactgggctgcggcaagggcgtgcccgaccccagaagccagcccgtgctgctgcagtacagcctgaacggcggcctgagctggagcctgctgcaggagttcctgttcagcaacagcagcaacgtgggcagatacatcgccctggagatccccctgaaggccagaagcggcagcaccagactgagatggtggcagcccagcgagaacggccacttctacagcccctgggtgatcgaccagatcctgatcggcggcaacatcagcggcaacaccgtgctggaggacgacttcaccaccctggacagcagaaagtggctgctgcaccccggcggcaccaagatgcccgtgtgcggcagcaccggcgacgccctggtgttcatcgagaaggccagcaccagatacgtggtgagcaccgacgtggccgtgaacgaggacagcttcctgcagatcgacttcgccgccagctgcagcgtgaccgacagctgctacgccatcgagctggagtacagcgtggacctgggcctgagctggcaccccctggtgagagactgcctgcccaccaacgtggagtgcagcagataccacctgcagagaatcctggtgagcgacaccttcaacaagtggaccagaatcaccctgcccctgcccccctacaccagaagccaggccaccagattcagatggcaccagcccgcccccttcgacaagcagcagacctgggccatcgacaacgtgtacatcggcgacggctgcatcgacatgtgcagcggccacggcagatgcatccagggcaactgcgtgtgcgacgagcagtggggcggcctgtactgcgacgaccccgagaccagcctgcccacccagctgaaggacaacttcaacagagcccccagcagccagaactggctgaccgtgaacggcggcaagctgagcaccgtgtgcggcgccgtggccagcggcatggccctgcacttcagcggcggctgcagcagactgctggtgaccgtggacctgaacctgaccaacgccgagttcatccagttctacttcatgtacggctgcctgatcacccccaacaacagaaaccagggcgtgctgctggagtacagcgtgaacggcggcatcacctggaacctgctgatggagatcttctacgaccagtacagcaagcccggcttcgtgaacatcctgctgccccccgacgccaaggagatcgccaccagattcagatggtggcagcccagacacgacggcctggaccagaacgactgggccatcgacaacgtgctgatcagcggcagcgccgaccagagaaccgtgatgctggacaccttcagcagcgcccccgtgccccagcacgagagaagccccgccgacgccggccccgtgggcagaatcgccttcgacatgttcatggaggacaagaccagcgtgaacgagcactggctgttccacgacgactgcaccgtggagagattctgcgacagccccgacggcgtgatgctgtgcggcagccacgacggcagagaggtgtacgccgtgacccacgacctgacccccaccgagggctggatcatgcagttcaagatcagcgtgggctgcaaggtgagcgagaagatcgcccagaaccagatccacgtgcagtacagcaccgacttcggcgtgagctggaactacctggtgccccagtgcctgcccgccgaccccaagtgcagcggcagcgtgagccagcccagcgtgttcttccccaccaagggctggaagagaatcacctaccccctgcccgagagcctggtgggcaaccccgtgagattcagattctaccagaagtacagcgacatgcagtgggccatcgacaacttctacctgggccccggctgcctggacaactgcagaggccacggcgactgcctgagagagcagtgcatctgcgaccccggctacagcggccccaactgctacctgacccacaccctgaagaccttcctgaaggagagattcgacagcgaggagatcaagcccgacctgtggatgagcctggagggcggcagcacctgcaccgagtgcggcatcctggccgaggacaccgccctgtacttcggcggcagcaccgtgagacaggccgtgacccaggacctggacctgagaggcgccaagttcctgcagtactggggcagaatcggcagcgagaacaacatgaccagctgccacagacccatctgcagaaaggagggcgtgctgctggactacagcaccgacggcggcatcacctggaccctgctgcacgagatggactaccagaagtacatcagcgtgagacacgactacatcctgctgcccgaggacgccctgaccaacaccaccagactgagatggtggcagcccttcgtgatcagcaacggcatcgtggtgagcggcgtggagagagcccagtgggccctggacaacatcctgatcggcggcgccgagatcaaccccagccagctggtggacaccttcgacgacgagggcaccagccacgaggagaactggagcttctaccccaacgccgtgagaaccgccggcttctgcggcaaccccagcttccacctgtactggcccaacaagaagaaggacaagacccacaacgccctgagcagcagagagctgatcatccagcccggctacatgatgcagttcaagatcgtggtgggctgcgaggccaccagctgcggcgacctgcacagcgtgatgctggagtacaccaaggacgccagaagcgacagctggcagctggtgcagacccagtgcctgcccagcagcagcaacagcatcggctgcagccccttccagttccacgaggccaccatctacaacagcgtgaacagcagcagctggaagagaatcaccatccagctgcccgaccacgtgagcagcagcgccacccagttcagatggatccagaagggcgaggagaccgagaagcagagctgggccatcgaccacgtgtacatcggcgaggcctgccccaagctgtgcagcggccacggctactgcaccaccggcgccatctgcatctgcgacgagagcttccagggcgacgactgcagcgtgttcagccacgacctgcccagctacatcaaggacaacttcgagagcgccagagtgaccgaggccaactgggagaccatccagggcggcgtgatcggcagcggctgcggccagctggccccctacgcccacggcgacagcctgtacttcaacggctgccagatcagacaggccgccaccaagcccctggacctgaccagagccagcaagatcatgttcgtgctgcagatcggcagcatgagccagaccgacagctgcaacagcgacctgagcggcccccacgccgtggacaaggccgtgctgctgcagtacagcgtgaacaacggcatcacctggcacgtgatcgcccagcaccagcccaaggacttcacccaggcccagagagtgagctacaacgtgcccctggaggccagaatgaagggcgtgctgctgagatggtggcagcccagacacaacggcaccggccacgaccagtgggccctggaccacgtggaggtggtgctggtgagcaccagaaagcagaactacatgatgaacttcagcagacagcacggcctgagacacttctacaacagaagaagaagaagcctgagaagatacccctag

SEQ ID NO: 152333 - DNA, 10284 bp, Artificial Sequence
  derived and/or modified sequence
atggagagaagcggctgggccagacagaccttcctgctggccctgctgctgggcgccaccctgagagccagagccgccgccggctactaccccagattcagccccttcttcttcctgtgcacccaccacggcgagctggagggcgacggcgagcagggcgaggtgctgatcagcctgcacatcgccggcaaccccacctactacgtgcccggccaggagtaccacgtgaccatcagcaccagcaccttcttcgacggcctgctggtgaccggcctgtacaccagcaccagcgtgcaggccagccagagcatcggcggcagcagcgccttcggcttcggcatcatgagcgaccaccagttcggcaaccagttcatgtgcagcgtggtggccagccacgtgagccacctgcccaccaccaacctgagcttcatctggatcgccccccccgccggcaccggctgcgtgaacttcatggccaccgccacccacagaggccaggtgatcttcaaggacgccctggcccagcagctgtgcgagcagggcgcccccaccgacgtgaccgtgcacccccacctggccgagatccacagcgacagcatcatcctgagagacgacttcgacagctaccaccagctgcagctgaaccccaacatctgggtggagtgcaacaactgcgagaccggcgagcagtgcggcgccatcatgcacggcaacgccgtgaccttctgcgagccctacggccccagagagctgatcaccaccggcctgaacaccaccaccgccagcgtgctgcagttcagcatcggcagcggcagctgcagattcagctacagcgaccccagcatcatcgtgctgtacgccaagaacaacagcgccgactggatccagctggagaagatcagagcccccagcaacgtgagcaccatcatccacatcctgtacctgcccgaggacgccaagggcgagaacgtgcagttccagtggaagcaggagaacctgagagtgggcgaggtgtacgaggcctgctgggccctggacaacatcctgatcatcaacagcgcccacagacaggtggtgctggaggacagcctggaccccgtggacaccggcaactggctgttcttccccggcgccaccgtgaagcacagctgccagagcgacggcaacagcatctacttccacggcaacgagggcagcgagttcaacttcgccaccaccagagacgtggacctgagcaccgaggacatccaggagcagtggagcgaggagttcgagagccagcccaccggctgggacgtgctgggcgccgtgatcggcaccgagtgcggcaccatcgagagcggcctgagcatggtgttcctgaaggacggcgagagaaagctgtgcacccccagcatggacaccaccggctacggcaacctgagattctacttcgtgatgggcggcatctgcgaccccggcaacagccacgagaacgacatcatcctgtacgccaagatcgagggcagaaaggagcacatcaccctggacaccctgagctacagcagctacaaggtgcccagcctggtgagcgtggtgatcaaccccgagctgcagacccccgccaccaagttctgcctgagacagaagaaccaccagggccacaacagaaacgtgtgggccgtggacttcttccacgtgctgcccgtgctgcccagcaccatgagccacatgatccagttcagcatcaacctgggctgcggcacccaccagcccggcaacagcgtgagcctggagttcagcaccaaccacggcagaagctggagcctgctgcacaccgagtgcctgcccgagatctgcgccggcccccacctgccccacagcaccgtgtacagcagcgagaactacagcggctggaacagaatcaccatccccctgcccaacgccgccctgaccagaaacaccagaatcagatggagacagaccggccccatcctgggcaacatgtgggccatcgacaacgtgtacatcggccccagctgcctgaagttctgcagcggcagaggccagtgcaccagacacggctgcaagtgcgaccccggcttcagcggccccgcctgcgagatggccagccagaccttccccatgttcatcagcgagagcttcggcagcagcagactgagcagctaccacaacttctacagcatcagaggcgccgaggtgagcttcggctgcggcgtgctggccagcggcaaggccctggtgttcaacaaggacggcagaagacagctgatcaccagcttcctggacagcagccagagcagattcctgcagttcaccctgagactgggcagcaagagcgtgctgagcacctgcagagcccccgaccagcccggcgagggcgtgctgctgcactacagctacgacaacggcatcacctggaagctgctggagcactacagctacctgagctaccacgagcccagaatcatcagcgtggagctgcccggcgacgccaagcagttcggcatccagttcagatggtggcagccctaccacagcagccagagagaggacgtgtgggccatcgacgagatcatcatgaccagcgtgctgttcaacagcatcagcctggacttcaccaacctggtggaggtgacccagagcctgggcttctacctgggcaacgtgcagccctactgcggccacgactggaccctgtgcttcaccggcgacagcaagctggccagcagcatgagatacgtggagacccagagcatgcagatcggcgccagctacatgatccagttcagcctggtgatgggctgcggccagaagtacaccccccacatggacaaccaggtgaagctggagtacagcaccaaccacggcctgacctggcacctggtgcaggaggagtgcctgcccagcatgcccagctgccaggagttcaccagcgccagcatctaccacgccagcgagttcacccagtggagaagagtgatcgtgctgctgccccagaagacctggagcagcgccaccagattcagatggagccagagctactacaccgcccaggacgagtgggccctggacagcatctacatcggccagcagtgccccaacatgtgcagcggccacggcagctgcgaccacggcatctgcagatgcgaccagggctaccagggcaccgagtgccaccccgaggccgccctgcccagcaccatcatgagcgacttcgagaaccagaacggctgggagagcgactggcaggaggtgatcggcggcgagatcgtgaagcccgagcagggctgcggcgtgatcagcagcggcagcagcctgtacttcagcaaggccggcaagagacagctggtgagctgggacctggacaccagctgggtggacttcgtgcagttctacatccagatcggcggcgagagcgccagctgcaacaagcccgacagcagagaggagggcgtgctgctgcagtacagcaacaacggcggcatccagtggcacctgctggccgagatgtacttcagcgacttcagcaagcccagattcgtgtacctggagctgcccgccgccgccaagaccccctgcaccagattcagatggtggcagcccgtgttcagcggcgaggactacgaccagtgggccgtggacgacatcatcatcctgagcgagaagcagaagcagatcatccccgtgatcaaccccaccctgccccagaacttctacgagaagcccgccttcgactaccccatgaaccagatgagcgtgtggctgatgctggccaacgagggcatggtgaagaacgagaccttctgcgccgccacccccagcgccatgatcttcggcaagagcgacggcgacagattcgccgtgaccagagacctgaccctgaagcccggctacgtgctgcagttcaagctgaacatcggctgcgccaaccagttcagcagcaccgcccccgtgctgctgcagtacagccacgacgccggcatgagctggttcctggtgaaggagggctgctaccccgccagcgccggcaagggctgcgagggcaacagcagagagctgagcgagcccaccatgtaccacaccggcgacttcgaggagtggaccagaatcaccatcgtgatccccagaagcctggccagcagcaagaccagattcagatggatccaggagagcagcagccagaagaacgtgccccccttcggcctggacggcgtgtacatcagcgagccctgccccagctactgcagcggccacggcgactgcatcagcggcgtgtgcttctgcgacctgggctacaccgccgcccagggcacctgcgtgagcaacgtgcccaaccacaacgagatgttcgacagattcgagggcaagctgagccccctgtggtacaagatcaccggcgcccaggtgggcaccggctgcggcaccctgaacgacggcaagagcctgtacttcaacggccccggcaagagagaggccagaaccgtgcccctggacaccagaaacatcagactggtgcagttctacatccagatcggcagcaagaccagcggcatcacctgcatcaagcccagaaccagaaacgagggcctgatcgtgcagtacagcaacgacaacggcatcctgtggcacctgctgagagagctggacttcatgagcttcctggagccccagatcatcagcatcgacctgccccaggacgccaagacccccgccaccgccttcagatggtggcagccccagcacggcaagcacagcgcccagtgggccctggacgacgtgctgatcggcatgaacgacagcagccagaccggcttccaggacaagttcgacggcagcatcgacctgcaggccaactggtacagaatccagggcggccaggtggacatcgactgcctgagcatggacaccgccctgatcttcaccgagaacatcggcaagcccagatacgccgagacctgggacttccacgtgagcgccagcaccttcctgcagttcgagatgagcatgggctgcagcaagcccttcagcaacagccacagcgtgcagctgcagtacagcctgaacaacggcaaggactggcacctggtgaccgaggagtgcgtgccccccaccatcggctgcctgcactacaccgagagcagcatctacaccagcgagagattccagaactggaagagaatcaccgtgtacctgcccctgagcaccatcagccccagaaccagattcagatggatccaggccaactacaccgtgggcgccgacagctgggccatcgacaacgtggtgctggccagcggctgcccctggatgtgcagcggcagaggcatctgcgacgccggcagatgcgtgtgcgacagaggcttcggcggcccctactgcgtgcccgtggtgcccctgcccagcatcctgaaggacgacttcaacggcaacctgcaccccgacctgtggcccgaggtgtacggcgccgagagaggcaacctgaacggcgagaccatcaagagcggcaccagcctgatcttcaagggcgagggcctgagaatgctgatcagcagagacctggactgcaccaacaccatgtacgtgcagttcagcctgagattcatcgccaagagcacccccgagagaagccacagcatcctgctgcagttcagcatcagcggcggcatcacctggcacctgatggacgagttctacttcccccagaccaccaacatcctgttcatcaacgtgcccctgccctacaccgcccagaccaacgccaccagattcagactgtggcagccctacaacaacggcaagaaggaggagatctggatcgtggacgacttcatcatcgacggcaacaacgtgaacaaccccgtgatgctgctggacaccttcgacttcggccccagagaggacaactggttcttctaccccggcggcaacatcggcctgtactgcccctacagcagcaagggcgcccccgaggaggacagcgccatggtgttcgtgagcaacgaggtgggcgagcacagcatcaccaccagagacctgaacgtgaacgagaacaccatcatccagttcgagatcaacgtgggctgcagcaccgacagcagcagcgccgaccccgtgagactggagttcagcagagacttcggcgccacctggcacctgctgctgcccctgtgctaccacagcagcagccacgtgagcagcctgtgcagcaccgagcaccaccccagcagcacctactacgccggcaccatgcagggctggagaagagaggtggtgcacttcggcaagctgcacctgtgcggcagcgtgagattcagatggtaccagggcttctaccccgccggcagccagcccgtgacctgggccatcgacaacgtgtacatcggcccccagtgcgaggagatgtgcaacggccagggcagctgcatcaacggcaccaagtgcatctgcgaccccggctacagcggccccacctgcaagatcagcaccaagaaccccgacttcctgaaggacgacttcgagggccagctggagagcgacagattcctgctgatgagcggcggcaagcccagcagaaagtgcggcatcctgagcagcggcaacaacctgttcttcaacgaggacggcctgagaatgctgatgaccagagacctggacctgagccacgccagattcgtgcagttcttcatgagactgggctgcggcaagggcgtgcccgaccccagaagccagcccgtgctgctgcagtacagcctgaacggcggcctgagctggagcctgctgcaggagttcctgttcagcaacagcagcaacgtgggcagatacatcgccctggagatccccctgaaggccagaagcggcagcaccagactgagatggtggcagcccagcgagaacggccacttctacagcccctgggtgatcgaccagatcctgatcggcggcaacatcagcggcaacaccgtgctggaggacgacttcaccaccctggacagcagaaagtggctgctgcaccccggcggcaccaagatgcccgtgtgcggcagcaccggcgacgccctggtgttcatcgagaaggccagcaccagatacgtggtgagcaccgacgtggccgtgaacgaggacagcttcctgcagatcgacttcgccgccagctgcagcgtgaccgacagctgctacgccatcgagctggagtacagcgtggacctgggcctgagctggcaccccctggtgagagactgcctgcccaccaacgtggagtgcagcagataccacctgcagagaatcctggtgagcgacaccttcaacaagtggaccagaatcaccctgcccctgcccccctacaccagaagccaggccaccagattcagatggcaccagcccgcccccttcgacaagcagcagacctgggccatcgacaacgtgtacatcggcgacggctgcatcgacatgtgcagcggccacggcagatgcatccagggcaactgcgtgtgcgacgagcagtggggcggcctgtactgcgacgaccccgagaccagcctgcccacccagctgaaggacaacttcaacagagcccccagcagccagaactggctgaccgtgaacggcggcaagctgagcaccgtgtgcggcgccgtggccagcggcatggccctgcacttcagcggcggctgcagcagactgctggtgaccgtggacctgaacctgaccaacgccgagttcatccagttctacttcatgtacggctgcctgatcacccccaacaacagaaaccagggcgtgctgctggagtacagcgtgaacggcggcatcacctggaacctgctgatggagatcttctacgaccagtacagcaagcccggcttcgtgaacatcctgctgccccccgacgccaaggagatcgccaccagattcagatggtggcagcccagacacgacggcctggaccagaacgactgggccatcgacaacgtgctgatcagcggcagcgccgaccagagaaccgtgatgctggacaccttcagcagcgcccccgtgccccagcacgagagaagccccgccgacgccggccccgtgggcagaatcgccttcgacatgttcatggaggacaagaccagcgtgaacgagcactggctgttccacgacgactgcaccgtggagagattctgcgacagccccgacggcgtgatgctgtgcggcagccacgacggcagagaggtgtacgccgtgacccacgacctgacccccaccgagggctggatcatgcagttcaagatcagcgtgggctgcaaggtgagcgagaagatcgcccagaaccagatccacgtgcagtacagcaccgacttcggcgtgagctggaactacctggtgccccagtgcctgcccgccgaccccaagtgcagcggcagcgtgagccagcccagcgtgttcttccccaccaagggctggaagagaatcacctaccccctgcccgagagcctggtgggcaaccccgtgagattcagattctaccagaagtacagcgacatgcagtgggccatcgacaacttctacctgggccccggctgcctggacaactgcagaggccacggcgactgcctgagagagcagtgcatctgcgaccccggctacagcggccccaactgctacctgacccacaccctgaagaccttcctgaaggagagattcgacagcgaggagatcaagcccgacctgtggatgagcctggagggcggcagcacctgcaccgagtgcggcatcctggccgaggacaccgccctgtacttcggcggcagcaccgtgagacaggccgtgacccaggacctggacctgagaggcgccaagttcctgcagtactggggcagaatcggcagcgagaacaacatgaccagctgccacagacccatctgcagaaaggagggcgtgctgctggactacagcaccgacggcggcatcacctggaccctgctgcacgagatggactaccagaagtacatcagcgtgagacacgactacatcctgctgcccgaggacgccctgaccaacaccaccagactgagatggtggcagcccttcgtgatcagcaacggcatcgtggtgagcggcgtggagagagcccagtgggccctggacaacatcctgatcggcggcgccgagatcaaccccagccagctggtggacaccttcgacgacgagggcaccagccacgaggagaactggagcttctaccccaacgccgtgagaaccgccggcttctgcggcaaccccagcttccacctgtactggcccaacaagaagaaggacaagacccacaacgccctgagcagcagagagctgatcatccagcccggctacatgatgcagttcaagatcgtggtgggctgcgaggccaccagctgcggcgacctgcacagcgtgatgctggagtacaccaaggacgccagaagcgacagctggcagctggtgcagacccagtgcctgcccagcagcagcaacagcatcggctgcagccccttccagttccacgaggccaccatctacaacagcgtgaacagcagcagctggaagagaatcaccatccagctgcccgaccacgtgagcagcagcgccacccagttcagatggatccagaagggcgaggagaccgagaagcagagctgggccatcgaccacgtgtacatcggcgaggcctgccccaagctgtgcagcggccacggctactgcaccaccggcgccatctgcatctgcgacgagagcttccagggcgacgactgcagcgtgttcagccacgacctgcccagctacatcaaggacaacttcgagagcgccagagtgaccgaggccaactgggagaccatccagggcggcgtgatcggcagcggctgcggccagctggccccctacgcccacggcgacagcctgtacttcaacggctgccagatcagacaggccgccaccaagcccctggacctgaccagagccagcaagatcatgttcgtgctgcagatcggcagcatgagccagaccgacagctgcaacagcgacctgagcggcccccacgccgtggacaaggccgtgctgctgcagtacagcgtgaacaacggcatcacctggcacgtgatcgcccagcaccagcccaaggacttcacccaggcccagagagtgagctacaacgtgcccctggaggccagaatgaagggcgtgctgctgagatggtggcagcccagacacaacggcaccggccacgaccagtgggccctggaccacgtggaggtggtgctgtag

SEQ ID NO: 152334 - DNA, 10383 bp, Artificial Sequence
  derived and/or modified sequence
atggagcgcagcggctgggctcgccagacattcttgctggccctgctgttgggggcgacactgagggccagagctgcagccggttattaccccaggttctccccctttttttttctatgtactcaccacggcgagctggaaggtgacggtgagcagggggaggtcctcattagcctacatatcgccggtaacccaacttactatgttccgggccaggagtaccatgtgacgattagcacctcaaccttttttgacgggctcctggtgaccggactgtatacaagtacttcagttcaggcaagtcagagcatcggcggatcgagtgccttcggttttgggattatgtctgatcaccagttcggaaaccagttcatgtgctcggtagttgctagccacgtttcccacctccccacgactaaccttagcttcatctggatcgctccacccgctgggacaggctgtgtaaattttatggcaacagccacccaccgaggccaagtgatcttcaaagatgccctggcacagcagttatgtgagcagggggcccccacagacgtcacggtccatccccatctggccgaaattcattcggacagtattatcctcagggatgactttgacagttatcatcagttgcaactaaatcctaacatctgggtcgagtgcaacaattgcgagacaggggaacagtgtggcgccatcatgcacggaaacgccgtgactttttgtgagccctacggaccgagggaactcattaccacaggcttgaacacgaccacagcctcagtactgcagttctccatcggatccggctcatgccgcttctcctactcggacccctctattatcgtcctttatgcaaaaaataattcagctgattggatacaactggagaagatcagagccccctcgaacgtgtcaacaattatacacatactgtatctccccgaagatgctaagggcgaaaacgtgcagttccaatggaagcaggaaaatctcagagtgggcgaggtctacgaggcctgttgggcccttgataatatcctgattatcaatagtgcacaccgtcaggtagtcctggaggactcactggaccctgtcgacacaggaaattggctatttttccctggagcgacagttaagcactcctgtcaaagcgacggcaactcaatctacttccacggaaatgagggttccgagtttaatttcgccaccaccagggacgtggatctgagcactgaagatatccaggagcaatggtccgaggagtttgagagtcagcccaccggatgggatgtacttggcgctgtcattggcaccgagtgtggcacaattgaaagcgggctctccatggtcttcctgaaagacggtgaacgaaagctgtgtactcctagtatggatacgactggatacggcaatctgcgattttacttcgtcatgggaggcatttgcgacccagggaacagtcatgagaacgatataatcctttacgctaagattgagggacggaaagaacacattaccctcgataccttatcttatagttcctacaaggtaccatccttggtctctgtcgtcataaacccagagctgcagacccctgccaccaaattctgtctccggcagaagaatcaccagggccacaacaggaatgtgtgggctgttgattttttccatgtgctcccagtgcttccctccactatgtcccatatgatccagttcagcatcaacctaggatgcggaactcaccagcctggcaactctgtgtctctggaattcagcactaatcacggccgatcatggtctcttttacatacagaatgccttcctgagatttgcgctggcccccacctacctcacagtaccgtttattcttccgaaaattactccggctggaatcgtattacaatcccactgccaaatgctgccctgacgaggaacactagaatccggtggagacagactggaccaatactaggcaatatgtgggcaattgacaatgtgtacattggtccttcgtgcctcaaattttgttccgggcgcggtcaatgcacacgccatggctgtaaatgcgatccaggattcagtggccccgcatgcgaaatggcaagccagacgtttcctatgtttatcagtgagtccttcggcagttcccgcctctctagctaccacaatttctacagcatccgcggtgccgaggtctcatttgggtgtggtgtgcttgccagcggcaaggctctggtgttcaataaggatggccgtaggcagctaatcacttcctttctggacagtagccagagtaggttcttgcagtttacccttcggttaggtagcaaaagcgtgctcagcacatgccgcgcccccgaccagcccggagaaggcgtgctcctccactactcctatgacaatggcatcacctggaagctattggagcactactcctatctgagctaccatgaacctcgtattatttctgttgagctgcctggagatgccaaacaattcggcatccagttcagatggtggcagccttaccactccagccagcgtgaggatgtctgggccatagatgaaattataatgacaagcgtcttgttcaattcaatttcccttgatttcacaaacctcgtggaggttacccagtcactcgggttctacttgggaaacgtgcagccgtattgtggccatgactggaccctgtgttttaccggagacagcaagcttgcatcttctatgcgctacgtggaaacccaaagcatgcagattggagcctcttacatgattcagttcagcctggtgatggggtgcgggcagaagtacacccctcatatggataaccaagtcaagctggaatactctacaaaccacggcctcacatggcatctcgtgcaagaggagtgtttgccttcaatgccatcctgccaggaatttacttctgctagcatctatcacgcctcagagtttacccagtggcgccgagtcatcgtgctactgccacagaaaacgtggtcttctgccacccgtttcagatggagtcagtcctattacactgcccaggatgaatgggcccttgactctatatacattgggcaacagtgccctaacatgtgttccggccacggctcctgtgaccacggcatatgtcggtgcgaccagggctaccaggggacagagtgccacccagaagccgctttgcctagtaccattatgtcagactttgaaaatcagaatgggtgggagagcgattggcaggaggtcattgggggcgagatcgtaaagcccgagcaggggtgtggcgtaattagttccgggtcttcactgtacttcagcaaagctgggaaaaggcagctggtgagctgggacctagatactagctgggtggactttgtgcagttctatatccagattggtggagagagcgcctcctgcaataaaccagactctagggaagaaggcgttcttttacagtatagcaacaacggaggcatccagtggcatcttttggccgagatgtatttctccgacttttccaagcccagattcgtgtatttggagctgcctgcggctgcaaagacaccttgtaccaggttccgctggtggcaacccgtgttttcgggcgaggactatgatcagtgggcagttgacgatatcatcatcctttcagagaaacagaagcaaataatacctgtcatcaatccaaccctacctcaaaacttctacgaaaaacctgcatttgactacccaatgaaccagatgtctgtttggctaatgcttgcaaacgagggaatggtcaagaacgagaccttttgtgcggcaaccccaagcgcaatgatctttggtaagagtgatggcgaccgttttgccgtcacaagggatctgacactgaagcccgggtacgtcttacagttcaaactcaatattggctgcgccaatcagttctcatccacagcccctgtgcttctgcagtatagccatgacgctggcatgagttggttcctcgtgaaggaggggtgctatccggcttctgccggtaaaggctgtgaaggcaattcacgagagctctcggagccaacaatgtaccacactggagatttcgaggaatggacgaggattactatagtcatcccacggagcctggcctctagtaaaaccaggtttcgttggattcaagaatcctccagccaaaaaaacgtgccgcccttcggcttggatggggtgtacataagcgaaccgtgtccttcatattgctccggtcacggggactgtatcagcggcgtgtgtttttgtgacctggggtacactgctgcccaaggcacttgcgtgtcaaacgtgccaaatcacaatgaaatgttcgacagatttgaaggaaagctgagtcccctgtggtacaaaatcacaggagcccaggtaggcaccggttgcggcaccctaaatgacggcaaaagcctatattttaatggccccgggaaacgcgaggcgaggaccgtgcctttggacacacgaaatatcaggctggtgcagttttacatccagatcgggagtaaaacatccgggataacatgtattaaacctcggactaggaacgagggcctgatagttcaatatagcaatgataatggcatcctctggcatctgctccgagagctggatttcatgtccttcttggagccccagattatcagtatagatcttccgcaggacgccaagactccagcaacagcgtttagatggtggcagccgcagcatggcaagcactccgcccagtgggcgctggacgacgtccttattggtatgaacgattcatctcagacaggattccaagacaagtttgatggcagcatcgatctccaggctaactggtacaggattcagggtggccaggtagatatcgactgtctctccatggataccgctctcatctttactgaaaacataggaaagccacgttatgctgaaacatgggacttccacgtctccgcttctaccttcctgcagtttgaaatgtctatgggatgtagcaaaccattttcaaacagtcacagcgttcagctgcagtatagcctgaataacggtaaagactggcacctggtgacagaggagtgtgttcctcccacaatcggttgtcttcattacactgagtccagtatatacacttcagaaagattccaaaattggaagcgaattactgtgtaccttcctctgtccaccatctcaccccgaactaggtttagatggattcaggccaattacaccgtgggggcagattcctgggctatagataatgtggtgcttgcatctgggtgtccatggatgtgctccgggcggggcatttgcgacgctggccgatgcgtgtgcgatcgagggttcggaggtccatactgtgtgcccgtggtccccctacccagcatccttaaagacgacttcaatggcaatttacacccggatctgtggccggaagtgtatggggctgaacggggcaacctgaacggggaaaccattaagtccgggacctccctgatattcaagggggagggtctgcgtatgctcatttcacgcgatttggattgtaccaacaccatgtacgtacagtttagtctccgcttcatagcgaagagcactccagaacgaagtcattccatcctgctgcagttctctatctccggcgggatcacatggcaccttatggatgaattttatttcccccagaccacaaacattttgttcattaatgtgcctctgccatatactgcccagaccaatgcaacacgcttcagactgtggcagccatacaataacgggaaaaaggaggaaatttggatcgtggacgacttcattatcgatggcaacaatgtcaacaacccagtgatgctccttgatacattcgacttcggcccgagggaagacaactggttcttctaccccggaggcaacattggattatattgcccttactcctctaagggtgccccagaagaggactccgccatggtctttgtttctaatgaagtgggcgaacatagtataacaaccagagaccttaatgtgaacgagaacactattattcaatttgagatcaacgtagggtgttctacagacagtagttccgcagatccagtgaggctggaatttagtagggatttcggagccacttggcatttgctgcttcccctctgttaccactcttcctcccacgtgagctccctctgctcaacggagcaccacccgagctcgacctattacgccggaaccatgcagggatggcgcagagaggtggtgcatttcgggaaactacatctctgcgggtccgttaggttcagatggtatcagggtttctatccggctggctcccagcccgtgacatgggccattgacaatgtctacataggcccacagtgcgaggaaatgtgtaacggccagggctcttgtattaatggcacgaaatgcatctgcgatcccggctatagcgggcccacctgtaaaatttctacaaagaaccctgacttcttgaaggacgactttgagggacaactggagtccgacagattcttgttaatgagcggcggtaagccatcacgcaagtgtgggattctatccagtgggaataacctcttctttaatgaagacggcctacggatgctgatgactcgagatcttgacctgtcgcacgcccgttttgtgcagttctttatgagactaggctgcggaaaaggcgtacctgatccaaggagccagcccgtgctgctccagtacagtctcaacgggggtctgtcctggtccctgctgcaggagttcctgttcagcaacagcagcaatgtcggtaggtacatcgctcttgagattccccttaaggctaggtcaggttccacaaggctcagatggtggcaaccatctgagaacggccatttctactccccttgggttattgaccagatcctgataggtggcaacataagcggcaatacagtgcttgaggacgacttcacaacactggactcacgcaaatggctgctgcaccctgggggcactaagatgcccgtatgcgggagcacaggcgatgcgctggtattcatagagaaagctagcacccggtacgtggtgtcaactgacgtagccgtcaacgaggactctttcctgcaaatcgactttgctgcctcatgcagcgtgactgactcctgctatgctatcgagttggagtactccgtcgacctggggttatcttggcacccactggtgcgggactgcctgccaaccaatgtcgaatgtagccgataccatctgcagagaatcctcgtgagtgacacattcaataagtggactaggatcactctccctctgcctccttatactagatctcaggccaccaggttcagatggcatcagcccgcgccctttgacaagcagcaaacctgggcgatcgacaacgtatacattggcgatgggtgtatcgacatgtgcagcggacacggcagatgtatccaggggaattgcgtgtgtgacgagcagtggggtggtctctactgcgatgatcccgagacgtcactgcccacacaactgaaagacaattttaaccgggccccgagctctcagaattggctgacagttaacgggggtaaactgtcaactgtgtgcggtgccgtggccagtgggatggcactgcactttagcggaggctgttcgcggctgctcgtaacagtcgatctcaatctgacaaatgcggaattcatccaattttatttcatgtacggctgcctgattacacccaacaatagaaaccagggcgtcctgctggagtacagcgtgaatggaggaatcacgtggaacctgctgatggaaattttttacgatcagtacagtaagcccggcttcgtcaacattctgctcccccccgacgctaaagagatagccaccagatttaggtggtggcagcctcgacacgacgggctcgaccagaacgactgggcgatcgataacgtcctgatcagcgggtctgccgatcagaggaccgtgatgcttgataccttctccagcgctccggtgcctcagcacgaacgaagtcccgcagacgctggccctgtgggcaggatcgcgtttgatatgtttatggaagacaagacatccgttaacgagcactggctttttcatgacgactgcaccgttgaaagattttgcgattctcctgatggggtgatgctgtgtggctctcacgatggacgcgaggtgtacgcagttacacatgatctgacccccaccgagggatggattatgcagttcaaaatcagcgtgggctgtaaagtcagtgaaaagattgctcagaaccaaatccacgtgcagtattctaccgattttggcgtctcatggaactacctggtccctcagtgcctacctgccgaccctaaatgcagtgggtccgtgtcgcagccatccgtgttcttccccaccaagggttggaaacgaatcacctatcctctgccagaatctctcgtaggaaaccctgttaggttccgattctatcagaaatactctgacatgcagtgggccatcgataacttctacttgggacccggctgcctggataactgtcgaggccacggcgactgcctgagggagcagtgtatttgtgaccccgggtactccggcccgaattgttatctgactcatacacttaagacctttcttaaggaaagattcgattccgaagagatcaagccggacctgtggatgagtctggaaggcggctcgacatgcactgaatgcgggatcctagcagaggataccgcactctacttcgggggttctactgtcagacaggcagtcactcaggatcttgacttgagaggcgctaaattcttacagtactgggggcgcataggaagcgagaacaacatgacaagctgtcatcgccccatctgcagaaaagaaggcgttctattagattacagtaccgacggagggatcacgtggactcttttgcatgaaatggattatcagaaatacatcagcgtccggcatgattatatcctccttcctgaagacgcccttactaacacgaccaggttgcgatggtggcaacccttcgtgatctccaacggtattgtggtgtcgggcgttgaaagggcgcagtgggctttggacaatatcctcattgggggcgctgagataaacccctcccagttggtggatactttcgacgatgaggggaccagccacgaagagaactggtcattctaccccaatgccgtgcggaccgcagggttttgcggcaacccatcgtttcacttgtactggcctaataagaagaaagacaagactcataacgccctgtcaagtcgggagctgatcatccagccgggctacatgatgcagtttaaaatcgttgtagggtgcgaggctacatcgtgtggcgatttgcactctgtgatgttggaatacactaaggatgcccggtccgattcctggcaactggtacaaacacagtgcctgccatcctcaagcaactccattggctgttccccctttcagttccatgaggcaaccatttataacagtgtgaacagtagtagttggaaacgaatcactatccagctcccagatcatgtgtcttcttccgcgacacagtttcggtggatacaaaaaggggaggaaaccgaaaagcaaagctgggctattgaccacgtttacatcggcgaagcatgccctaaactttgtagcggccatggatattgcaccaccggcgccatctgtatttgtgatgagtcttttcagggagatgactgctccgtgttcagtcacgacctgcctagttatatcaaagacaacttcgagagtgctagggtaactgaggccaactgggagacaatccagggaggcgtcattgggagcgggtgtgggcagttggccccttatgctcatggagactctctatatttcaatgggtgtcagatcaggcaggccgctaccaaacccctggatttgacaagggcaagcaagatcatgttcgttttgcagatcggatctatgagccagacagactcctgcaacagcgatctttcagggccgcacgctgtggacaaggccgtgctcttacagtatagtgtcaataatggtataacttggcatgtcatcgcgcagcatcagcccaaggatttcacacaggcacagcgggtgtcttacaacgtgcccctggaggcgagaatgaagggcgtgctgctgagatggtggcaaccccggcataatggcaccgggcatgatcagtgggccctcgatcacgtcgaagttgtgctatttagcacccggaagcagaactatatgatgaatttttccaggcagcacggtctgcgccatttctataacagaaggcggagatcactgcgacgctacccctag

SEQ ID NO: 152335 - DNA, 2934 bp, Artificial Sequence
  derived and/or modified sequence
atgtgctcgggtcacggacggtgtattcaaggtaattgcgtctgcgatgagcagtggggcggcctttactgtgatgacccggaaaccagtctacctacgcagctaaaagacaattttaatagggcaccgtcctcccagaattggctaacggtcaacggaggaaaactttcaactgtgtgcggcgctgtggcatctggaatggcgcttcacttttccggcggctgttcccggctccttgtcacagtcgacctgaacctgaccaacgcggaattcattcaattttactttatgtacggctgcctcatcacaccaaataaccgtaatcagggcgtcttgctagaatattccgtcaatggaggcatcacgtggaacctcttaatggagatattctacgaccagtatagtaagcccggtttcgtgaacatacttctcccgccagacgccaaagagattgctacaaggtttcgatggtggcagcctcggcacgacgggcttgatcagaacgattgggccatagacaatgtgctgatctcaggctccgcagaccagaggaccgttatgcttgatacgttctccagtgcgcctgttcctcagcatgagagatcgcctgctgacgccggccccgtcggccgcattgctttcgatatgttcatggaggacaagacatccgtgaatgaacactggctgtttcatgacgattgcaccgtcgaaaggttctgtgattctccagacggtgtaatgttatgcggtagtcacgatggaagggaagtgtacgccgtgacacacgatctgaccccgactgaaggctggattatgcagtttaagatctctgtgggatgtaaggtttccgagaagattgcacaaaatcagattcacgttcaatacagcacggactttggagtgtcttggaattacctggtcccccagtgcctgcccgcagacccgaagtgtagtggttctgtgtctcagccgtctgtcttttttcctacaaaaggttggaaacgcataacttatccactgcctgaaagcctcgttgggaaccccgtaagattcagattttatcagaagtactccgacatgcagtgggcaatcgacaatttctacctggggcctggatgtctggacaactgcagaggacatggggactgcttaagagagcagtgcatctgtgatccgggttattctggacctaattgttatctcacgcacacactcaaaacattcctgaaggagcggttcgattccgaagagatcaagccagatttatggatgtcattagagggtggatccacctgtacagagtgtggaattttggctgaggataccgccctgtattttggtggctccacggtcagacaggccgtgacacaggacctcgatctacgtggtgccaagtttctgcagtattgggggagaattggaagtgagaataacatgacttcctgccacaggccaatctgcaggaaggagggcgtgcttctggattatagcaccgatggcgggattacgtggacacttttacacgaaatggattaccagaagtatatttctgtccgtcatgactatattttattgcctgaagatgccctgaccaacacgacacggctccgttggtggcaaccctttgtaattagcaacggtatagtcgtttctggagtcgaaagggcccagtgggccctggataacattctgataggtggtgccgagataaaccctagtcagctggtggacacttttgatgacgagggtacatctcatgaagagaactggtctttctaccctaatgctgtgagaacagccgggttttgtggaaaccctagcttccatttgtattggcccaacaaaaaaaaagacaaaacacacaatgcattaagctctagagagttaatcatccaaccagggtatatgatgcagtttaagatcgtggtgggatgcgaggcgaccagttgcggagatttgcactctgtcatgctcgagtatacaaaggacgctcggagcgactcttggcaactggtgcaaacacagtgcctgcccagcagctccaattctattggttgcagtcccttccaattccacgaagccacaatttacaatagcgtgaacagtagcagttggaagaggattacaatccagctgccagatcatgtgtcatccagtgccacccagttccgctggatccaaaagggagaggaaaccgagaaacagagttgggccattgaccatgtgtacattggggaggcgtgccccaagttgtgtagtggccacggatactgcacaactggcgctatatgcatttgcgatgaaagctttcagggcgacgactgctccgttttctcgcatgatctcccatcttacataaaggataatttcgagagcgcgcgggtgacagaagccaactgggagaccatccagggaggagtaattggtagcggatgtggacagcttgcgccttacgctcacggcgactcactctacttcaacgggtgtcagattcggcaggccgctactaaaccactcgatctcacgcgagcgtcaaaaatcatgttcgttctgcaaatcggttccatgagccagacggactcctgtaactccgacctgtccggacctcacgccgtagacaaggccgtgctgctgcaatattccgtcaataatggcattacttggcacgtgattgctcaacaccagccgaaggattttactcaggcccagcgggtgagctataacgtcccgttggaggctcggatgaagggcgttctactgcggtggtggcagcctcgacataacggaaccgggcacgaccagtgggccctggaccatgtggaggtggtactggtgactacacggaagcagaattacatgatgaatttttcaaggcagcatggtctcaggcacttctataacagaagacggcggtcattgcgcagatacccatag

SEQ ID NO: 152336 - DNA, 10383 bp, Artificial Sequence
  derived and/or modified sequence
atggagcgtagtgggtgggcgcgacagacatttctgcttgctctgctacttggggccacactgagagctcgggcagcagccggctattatccaaggttttcccccttcttttttctttgtacacaccacggagaactcgagggggacggcgagcagggcgaggtgctgatttcactgcatatcgcaggcaatcctacctattatgtgcctggtcaagagtaccatgtgaccataagcacatccaccttctttgacgggctcctggtcaccgggctctataccagcactagcgtgcaggctagtcagtccatcggaggatcttcagctttcggtttcggcatcatgagtgaccatcagtttggaaaccagtttatgtgtagtgtcgtcgcttctcatgtgagccacttaccaaccaccaacttaagctttatatggatcgctcccccagctggcacggggtgtgtgaattttatggctacagctacccataggggacaggtcatttttaaggacgccctggcacagcagctgtgcgagcaaggtgcaccaaccgatgtcaccgtgcaccctcatctggctgagattcatagcgacagcatcatcctacgtgatgattttgacagctaccatcagctccagctgaacccgaacatttgggtggaatgtaataactgtgagacaggggaacagtgtggcgcaatcatgcatgggaatgccgttactttttgcgagccatacggaccacgtgaacttattacaaccgggctgaacaccacaaccgcgagcgttctgcagttttcaatcggatccggcagttgcagattttcctacagcgatccgtcaatcatcgttctgtatgctaagaacaacagcgctgattggatccaactagagaagattagggccccctccaacgtgagcaccattatccacatcttgtatctgcctgaggatgccaaaggtgagaatgtgcagttccaatggaagcaagagaatttgagggtgggtgaggtctacgaggcgtgctgggccctggacaatattctgataattaatagcgcacatcgccaggttgtcctggaagactctctcgacccagtagacacaggaaattggctgttcttcccgggcgccacagtgaagcactcttgccagtccgacggaaacagcatctactttcacgggaatgagggctctgagttcaattttgctacaacacgggatgtggacctgagtactgaggatatccaggagcagtggtcagaagagttcgagtcccagcctactgggtgggacgtcctgggagccgtgatcggaaccgaatgtggtactattgaatctggtcttagcatggtgtttctgaaagacggcgagcgcaagctgtgtaccccctcaatggacactacgggctatggtaatctccgattctatttcgtgatgggcggcatctgtgatcccggcaacagtcatgaaaatgatataatcctttacgctaaaatcgaagggcggaaggagcatattacactcgacaccctgagctactccagttacaaggtgcccagcctggtatcggttgtgatcaaccccgagctacaaactcctgcaacaaaattttgtttgaggcagaagaaccaccagggacacaaccgaaacgtttgggctgttgacttcttccacgtgctcccggtcttgcctagcacaatgtctcatatgattcagttctctattaacctgggatgcggaacacatcagcccggcaatagcgtctcattggagttttctactaatcatggccgctcctggtcgctgcttcacaccgagtgtctgccagaaatctgtgcaggcccacacttaccacactcaaccgtctattctagcgaaaattacagcggctggaatcgtatcacaataccactgcccaatgctgccctgaccaggaacacccgcataaggtggagacagactgggccaatacttggcaacatgtgggctatcgacaatgtctacattggacctagctgtctgaaattctgttctggacgcggccagtgcactagacatggctgtaagtgtgatccggggtttagcggacccgcctgcgagatggcttctcagacattccctatgtttattagtgaatccttcgggtcatcgcgcctgtcttcttatcacaatttttactccattaggggcgctgaggttagtttcggatgtggcgtgctggcttcaggaaaagccttagtttttaacaaagacgggcgcagacagcttataacctcatttctggattcaagccagagcagatttctgcagtttacccttcgactgggcagtaagtcagtcctgagtacgtgcagagcccccgatcagcctggtgagggagtccttctccactattcctacgataacggcatcacgtggaaattgcttgaacactattcttacctcagctaccatgaacctaggataatcagcgtagaattgccaggggacgcaaagcaattcggtatacaattccgatggtggcagccttaccactcttcccagcgagaagatgtgtgggccattgatgagatcatcatgacttcagtactctttaattctatctctctagacttcaccaatctggttgaagtgacccagtctttgggattttatcttgggaatgtgcagccctactgtggacacgactggactttatgttttacgggtgacagcaagctggcaagtagcatgagatacgtcgagacccagtctatgcagattggggcctcatatatgatccagttttcactggtgatggggtgcggtcagaagtacacgccccacatggacaatcaagtgaaactggagtattccacaaaccacggattgacttggcacttagtgcaagaggaatgcttgccttctatgccctcatgccaggagtttacttcggcatccatttatcacgctagcgagttcacccagtggcgcagagtgattgtattgctccctcagaagacgtggagctcagctacacggttccggtggtcccagagttattacaccgcccaagacgagtgggccctggattcaatttatataggccagcaatgccccaacatgtgctccggtcatggatcttgcgatcacggaatctgtcggtgtgaccagggctatcagggcaccgagtgccacccagaagcagccttaccaagtaccatcatgtctgatttcgagaaccagaacggttgggagagcgactggcaggaagtaatcggcggcgaaatcgtaaaacccgagcaaggctgtggagtcatcagctcgggttcctccttgtatttttccaaagccgggaagagacagttagtgtcctgggatttagatacctcctgggtcgattttgtgcaattctacatccaaatcggcggagagtctgctagttgcaacaaacctgacagccgtgaggagggagtgttgctgcaatactcaaataatggcggaatccagtggcacttgcttgccgagatgtatttcagtgacttcagcaaacccagattcgtgtacctagagttgcccgctgccgctaaaaccccatgtactaggttccgatggtggcagcccgtattctctggggaggactacgaccagtgggctgtggatgacatcattatcctgtctgaaaagcagaaacagatcatacccgtcattaatcctaccctaccccagaacttctatgaaaaacctgcctttgactacccaatgaaccagatgtctgtgtggctgatgctcgcaaacgagggaatggttaagaacgaaaccttctgcgccgccactcccagcgccatgatcttcggcaaaagtgatggagataggttcgcagtcacaagagacctcaccctgaagcccggctatgtgttgcagttcaagctgaacattggctgtgcaaaccaattcagctccacagcgccagttttactgcagtattcccatgatgcgggaatgtcttggtttttggtgaaagagggatgttacccagcttctgcaggcaaaggatgcgaagggaattctcgagaactgtcagagcctacaatgtaccatacaggtgatttcgaagagtggacacggattaccatagtgatccctcggtcactggctagttccaagacccggtttagatggatccaagaaagttcaagccagaaaaatgtgccacctttcggactcgacggagtatacattagcgagccctgcccaagctactgctcaggccatggcgactgcatatccggagtctgcttctgtgatcttggctacaccgccgcccagggcacatgcgtgtctaacgttccaaaccacaacgagatgtttgaccgttttgagggaaaattaagtccgctgtggtacaagattaccggcgctcaagtagggactggctgcggcacactcaacgacgggaaaagcctatatttcaacggcccaggcaaacgcgaagcccgcactgtgcccttagacacacgcaacataaggctcgtgcagttctatattcagatcggctctaagacatctggaattacctgtattaagccccgcaccagaaacgagggtctgatagtccagtattctaacgacaatgggatcctgtggcatctccttagggagcttgatttcatgtctttcttagagccacaaattatttcaattgacctacctcaggatgctaagacgcctgcaactgcttttagatggtggcagccacagcacggtaagcactcagcacaatgggccttggacgacgttcttatcggaatgaatgattcttctcaaaccggatttcaggacaaatttgatggctctattgatctccaagccaactggtaccgcatccagggcggacaggtggatatcgactgcctgtcaatggacacagccctgatatttacagaaaacatcggaaaacccagatatgcagagacatgggatttccacgtttccgcatccacgttcttacagtttgagatgtcgatgggctgttccaagccgttctccaactcccattcagtgcaattacaatacagtctcaataacggcaaggattggcacctcgtcacggaggaatgtgtgccgcccactatcggctgcctccactacaccgagtcgtctatatacacttccgagcggtttcagaactggaagcgtattaccgtctacttaccgctgagtaccatctcccctaggactagattccgctggatccaggcaaattacactgtaggagctgactcctgggcaatcgacaacgtcgttttagccagcgggtgcccttggatgtgctcgggacggggcatatgtgatgccggcagatgcgtttgcgaccgtggctttggtgggccgtactgcgtccctgtggtgcctttgccaagtatcctgaaggacgacttcaatggtaacctgcaccctgacttatggccagaagtgtacggcgccgaaaggggtaatctgaatggtgagaccatcaaaagcgggacttctctgatctttaagggtgagggtctgaggatgctcataagtcgtgatcttgactgtactaacaccatgtatgttcagttctcactcagattcattgccaagtccacccctgagagaagccattcaattctgctccaattctccatatcaggcggcatcacatggcacctcatggatgagttttactttcctcagaccacgaatatcctctttatcaatgttccacttccatataccgctcagaccaatgctactcgatttagactctggcagccatacaacaacggaaagaaagaagaaatttggatcgtggacgattttattatcgacggtaataacgttaataatcccgtgatgctgctggacacattcgattttggaccgcgtgaagacaattggtttttttatccgggtgggaatatcgggctgtactgcccatactccagtaagggggccccggaggaagacagcgccatggtgtttgtgtctaacgaggtgggcgaacactccataacgacccgcgacttgaacgtgaacgagaacactattattcagttcgagattaatgtgggctgtagtacggatagctcaagcgcagatcccgtgcggctggaattcagtagggactttggtgccacctggcacctgctgttaccactgtgttatcactcttcatcacacgtgtccagcctctgtagtactgagcaccacccatccagtacatactatgccggcacgatgcaggggtggcgccgggaagtggtgcattttgggaagctgcacctgtgcggcagcgtaaggttccgctggtaccagggcttctacccagctggctcccaaccagtaacttgggccatcgacaacgtctacataggtcctcagtgcgaggagatgtgcaatggtcagggtagctgtatcaatgggactaaatgcatctgcgaccccggttattccgggccaacctgtaagataagcaccaagaacccggactttctgaaggatgattttgagggccagctggaatccgaccgcttcctgctgatgagtggaggcaagccgtcccggaagtgcggaattctttcttctggtaacaaccttttttttaatgaagatgggttacgcatgctgatgacgcgcgatctggacctaagccatgcacgctttgttcagtttttcatgaggctggggtgtggcaagggggtccctgaccctagaagccagcctgtgctccttcagtattctctgaacggtggcctatcgtggagcttgctgcaggaatttctgttctctaacagttcaaacgtcggaagatacattgctttagagattccattaaaggccagaagcgggtccaccagactgcgctggtggcagcccagtgaaaatggacacttctattctccctgggtgattgatcagatcttgatcggagggaacatcagtggcaacacggtgctggaagacgacttcaccacattggactctcgtaaatggctgctacaccccggcggaacaaaaatgcctgtgtgcggtagtacaggagatgcactggtcttcatcgagaaggcttctactaggtatgtagtatcaaccgacgttgccgttaacgaggatagctttctccagattgattttgctgcctcatgctccgtcaccgacagttgttacgccatagagcttgagtattccgtggacctcggcctgtcttggcatcccttagtaagagattgcctgccaacaaacgtagagtgttccagataccatctgcagcgaattctggtgtccgatactttcaataagtggacccggataacgttaccattgccaccttatacccgatctcaggccaccaggtttcgttggcatcagcccgcaccttttgacaagcaacagacatgggctattgataatgtgtacatcggggatggctgcattgacatgtgtagtgggcacggtcgttgtatacagggcaattgcgtgtgtgatgagcaatggggcggcctctactgtgacgatcccgagacttccctcccgacacagctgaaggataacttcaaccgcgcacccagctcccagaactggctgaccgtgaacggtggcaagcttagtacagtatgtggggcagtggcctctgggatggccctgcatttcagcgggggttgctccaggctgctcgtaactgtggacttaaacttgactaacgcagaattcattcagttctattttatgtatggttgcctgattacacccaacaacaggaaccagggcgtgctgcttgagtatagcgttaacggaggaattacatggaatttgctgatggaaattttttacgatcagtatagcaagccaggctttgtaaatatcctcttgccacccgatgcaaaggagatcgctacccggtttagatggtggcagccccgacacgacggtctggaccagaacgactgggcgatcgacaacgtccttatcagcggatcagccgaccagagaactgtgatgcttgacaccttttccagcgcaccagtgccccagcacgaaaggtctcctgctgatgctgggccagttggcagaatagctttcgatatgtttatggaggataagaccagcgtaaacgagcactggctgtttcacgatgactgcactgttgaaagattttgtgatagccccgatggggttatgctgtgtggttcccacgacggccgcgaggtgtatgctgtaactcacgacctcacacccacagagggctggatcatgcaattcaagatcagcgtgggctgtaaggttagcgagaaaattgcacaaaatcagatccacgtccaatacagcaccgattttggtgtgagctggaattaccttgtgccacagtgcctcccagccgaccctaagtgcagcggctctgtgtcacagccttcggtgttctttcctaccaaggggtggaaacggattacatatcccctgcctgagtccttggtgggtaacccagtgagatttcgcttttaccagaagtattctgacatgcaatgggctatcgacaacttctatctgggacccgggtgtctggacaattgtcgcggacacggcgattgtctgagggaacagtgtatttgcgatcccggatactccggacctaactgttatctaacccatacactgaagacctttctgaaagagagatttgatagcgaggagattaagccagacctctggatgagcctggagggcggttccacatgtactgagtgcggcattctggccgaggacacggccctgtatttcggggggtccacagtgagacaagcagtgacccaggacctggacttgagaggcgcgaagtttttacagtattggggcaggatcggttcagagaacaacatgaccagctgtcataggccgatctgtagaaaagaaggcgtgttgttggattatagtaccgatggggggatcacctggaccctgctacacgaaatggactatcagaagtacatctccgtgcggcatgattatattctgctccccgaagatgctctgacgaatactactcgactgcggtggtggcagccttttgtcatcagcaacgggatcgtcgtatcgggcgtggagcgggctcaatgggcactagataacattctaatcggcggtgctgagattaatccctctcagctggtggatacattcgacgacgaggggacctcccatgaggaaaactggagtttttacccaaatgccgtgcggacagcaggattttgtggcaatccctcatttcacctgtactggccaaataagaaaaaagataaaacacataatgcactgtcatcaagggaactcattatccaaccgggttacatgatgcagttcaagattgtcgtgggttgcgaggctaccagctgcggcgacctccacagtgttatgttagaatatactaaggatgcccggtccgattcctggcagctcgtccaaacacagtgcctcccctcgtcttcgaactctatcggatgctccccatttcagtttcacgaggctacaatatacaattccgtgaatagttcaagttggaagaggattactatccagctccctgaccacgttagttcatcagccacgcagtttcggtggattcagaagggagaggagaccgaaaagcagtcatgggccatcgaccacgtgtatataggcgaggcgtgtcccaaactctgctctggacacggatactgcaccactggggctatatgcatatgtgacgaatcctttcagggggatgattgttctgttttttcacacgacctgccaagctacattaaggacaattttgagtcggcacgggtgaccgaggccaactgggagaccatccagggaggcgtgataggatccggctgcgggcagttggctccctacgcccacggcgactctctctatttcaatggctgtcaaattagacaagcggctacgaaaccgctggatctgacaagagctagcaagataatgtttgtcctccagattggctccatgagtcagactgactcttgcaattcggatctgagtggcccccatgccgtggataaagccgtgctccttcagtacagcgtgaacaacggtatcacctggcatgtgatagcacaacaccagccaaaagacttcacccaagctcagagggtttcatataatgttcccctggaagctagaatgaagggagtcctgctcaggtggtggcaacctaggcacaatgggactgggcacgaccagtgggcactggaccacgtcgaagtagtcctggtgagcacccggaaacagaactacatgatgaattttagcagacaacacgggctgagacatttttataataggcgccggcgctcactgagacgctacccatag

SEQ ID NO: 152337 - DNA, 10284 bp, Artificial Sequence
  derived and/or modified sequence
atggaacggtctggatgggcgaggcagactttcctgctggcactgcttctaggggctacactaagagccagagccgcagctggttattatccgcgcttttcaccatttttctttctgtgtacccaccacggcgaactggagggcgacggagaacagggggaagttttgatctctcttcacattgccggtaatcccacatattacgtgcccggccaggagtaccacgttactattagcacctcaaccttcttcgatgggctcctggtcacggggctgtataccagcacatcggtgcaggccagccagtccattggagggtcctctgcctttggattcggcatcatgtcagatcaccaatttggcaaccagttcatgtgtagcgttgtagccagtcatgtatctcacctgcctactacgaacctgtctttcatttggatcgcgcctcccgcaggcactggatgtgttaattttatggccactgccactcacagagggcaagtaatttttaaggatgctttggcacagcagctgtgtgagcagggcgctccaacagacgtcaccgtgcacccacatttggccgaaattcactccgattcaatcattctcagagatgatttcgactcttaccatcagcttcagctgaaccctaacatttgggtggaatgcaacaactgcgaaactggagaacagtgtggcgctatcatgcacggcaacgcggtcactttctgtgagccatacggtccacgcgagttgatcactacgggcctcaacacaactacagccagcgtcctccagttctctataggttcaggatcttgtcggtttagttactctgacccttccatcatcgttctctacgccaaaaataactcagccgactggatccagctcgaaaagataagggcaccctctaatgtgagtactatcatccatatcttgtacttgcctgaggatgcaaagggagagaatgtgcagttccagtggaaacaggagaatctcagggtaggagaagtatacgaggcctgctgggccctcgacaatattctaataatcaactctgcacatcgtcaggtcgtgctcgaggacagtctggatcctgtggataccgggaattggttattcttccccggggccacagtcaaacacagttgccagagtgacggaaatagtatctactttcacgggaacgaaggttctgagtttaattttgctaccactagagacgtggacctgagtacagaagatattcaagagcagtggagcgaggagtttgagtcccagccaactggctgggacgtcctgggcgctgtcattggcacagaatgtggcacaatcgaaagcggtctaagcatggtattcctgaaagatggtgagaggaagctgtgtacgccgtcgatggacaccacgggatatggaaatctcaggttctacttcgtgatgggaggcatctgtgaccccgggaacagccacgagaacgatatcatactttatgcaaagattgaaggcagaaaagaacacatcaccctggacacactttcatacagctcctacaaggtgcccagtctagtgagcgttgtgatcaatccggagcttcagactcctgccaccaagttctgcctgcggcagaagaaccaccagggccataatcggaatgtgtgggccgtcgatttcttccacgtactgccggttctgcctagcaccatgagtcacatgatccaattctctattaacctcggatgtggcacccatcagcctggaaactctgtgagcctcgagttcagcacaaatcatggacgctcctggagcctattgcacaccgagtgtcttcccgagatttgtgcaggaccacatctaccccattccactgtgtacagctccgagaattacagtggctggaatagaataactataccattgccaaatgcagccctgacccgaaacacacgtattcgctggcgacagaccggaccaattttagggaacatgtgggctattgataatgtgtacatcggacccagttgcctgaaattttgcagcggacgggggcagtgcaccaggcatgggtgcaaatgcgaccctggttttagcgggcctgcctgcgagatggcctcccagactttcccaatgtttatttccgaatcatttgggtcctctcgcttaagctcctatcacaacttttacagcattcggggcgctgaagtatcatttggatgtggcgttctcgcgtccgggaaagctttagtgttcaataaagatggtagaaggcagcttatcacctcttttctggatagcagccaaagcagattcctccaatttaccctgaggctcgggtccaaatccgtcttgtccacatgtagagcaccggaccaacccggggaaggagtgcttctgcactattcctacgacaatgggatcacctggaagttgctagagcactactcgtacctgtcatatcatgagccaagaatcattagcgtggagctgcccggtgatgccaagcaattcggcatccaatttagatggtggcagccttaccacagttctcagagggaagatgtgtgggcgatcgacgagattatcatgacctccgtactctttaatagcatttcactagatttcacaaacttagtggaggttacacagtctcttggattttacctaggaaatgtgcagccctactgcggacacgattggacactgtgttttacaggggattccaagttggcgagctcaatgcgttatgtcgaaactcagagtatgcagataggagcctcctacatgatccaattctccctcgtcatgggttgtggacagaagtatacaccacacatggacaaccaagtgaaactcgaatattctactaaccacggactcacctggcaccttgttcaggaggagtgtctcccgtcgatgccctcatgccaggaattcactagtgcctcaatctaccatgcgtctgagttcacccagtggcgaagagtcattgtcctgctgccgcagaaaacttggtctagtgcaactaggtttaggtggagccagtcgtactataccgcacaagatgaatgggcccttgactctatttacatcggccaacagtgcccaaatatgtgctctggtcacggtagctgtgaccacggaatctgccgatgtgatcaggggtatcagggcactgaatgccacccagaagcagcactgcctagtacaattatgtcagattttgagaatcaaaatggttgggagtccgattggcaggaagtgattgggggggagattgtgaaacccgagcaaggctgtggagtaatcagtagtgggtcaagtttatactttagtaaggctggcaagcggcagctagtcagctgggatctggataccagctgggtggactttgtgcagttttatattcagataggaggcgagagcgccagctgcaacaaaccagactcccgcgaggaaggtgttctgctgcagtattctaataatgggggcattcagtggcacctgctcgccgagatgtatttcagcgatttctcaaagcctagattcgtttacctcgagctcccggctgccgcaaaaaccccctgcacccgtttcagatggtggcagcccgtctttagcggtgaagactatgatcagtgggccgtggacgacatcatcatcctttcagaaaaacagaagcaaatcattcctgttattaatcctacactgccacagaacttctacgagaaaccagcgtttgattatccaatgaatcaaatgtctgtctggctcatgctggccaacgagggcatggtgaaaaacgagacattctgtgccgccacaccatccgccatgatctttgggaagagcgatggtgatcgcttcgcagtgacacgcgatttgactctgaagccaggctacgtgctgcagtttaaactgaatattggctgtgccaaccagttctccagcacagcgccagtgttgttgcagtactcgcacgacgccggcatgtcctggttcctcgtgaaagaaggctgctaccctgcaagtgccggaaaaggctgtgagggaaattccagggaattgtccgaacccacaatgtatcataccggcgacttcgaggagtggactcggataactatcgtaatcccgcggtctctggctagcagtaagacccggtttcggtggatccaagaatcctccagccaaaagaacgtccctcccttcgggcttgacggcgtctatatctcagaaccttgcccctcatattgttccggccacggggattgtatctctggcgtctgcttctgtgatctcggatatactgccgctcagggaacatgtgtgagtaacgtgcccaaccataacgaaatgttcgaccgcttcgaaggtaagcttagcccgctctggtataagatcactggtgcacaggttggaactggttgcggaacactcaatgacggcaagtcactctatttcaatggaccagggaagcgcgaagctcggactgtgcctctcgacacccgcaatatcagactggtgcaattctacatccagatcggcagtaagacatccggaattacctgtattaaacccaggacccgaaatgagggtttaattgttcagtacagtaacgataacggaatcctttggcacctgctcagggagctcgactttatgagtttcctggaaccacaaattatatccatcgacctgccacaggatgccaagacacccgcaaccgcctttagatggtggcagccacaacacgggaaacacagcgctcagtgggccctggacgatgtcttaattggaatgaatgattccagccaaaccggcttccaagataagtttgacgggtctattgaccttcaagcaaattggtatcggatccaaggcggccaagtcgacatcgactgcctgtctatggataccgccctgatctttacagaaaatatcggcaagcctcggtacgccgaaacatgggatttccatgtctccgccagtacatttctacagtttgagatgtccatgggatgtagcaagccctttagcaactcacactccgttcaactgcagtactccctcaataacggaaaggactggcacctggtgacagaagagtgcgtacctcctacaataggctgcttgcactacactgagagctccatatacacctcagagcggttccagaactggaaaaggatcacggtgtaccttccattgtctactatttccccaaggacacgcttcagatggattcaggccaactatactgtcggagccgacagttgggccatcgataatgttgtcctcgcatccggctgcccatggatgtgttctgggagaggcatatgcgacgcgggcagatgcgtgtgtgatagaggcttcggaggtccgtattgcgtgccggtcgtgcccctgccttctattctgaaggacgatttcaatggtaacctgcatccagacctatggccagaagtgtatggcgctgaacgcggaaatctgaatggggagactattaaatctggaacatctctcatttttaagggggaggggctccgcatgcttatctcccgagatctcgactgcactaataccatgtatgtccagttctctctgagattcatcgcgaaatcaacacctgagcgctcccactccatcctgcttcagttttccatttcgggcggtattacctggcatcttatggacgaattttacttcccgcaaaccacgaacatcctgtttattaatgttccacttccatatactgcccaaacaaacgccacccgcttcagactgtggcagccctataataatgggaaaaaagaagaaatctggatcgtagacgattttatcatagatggcaataacgttaacaatcccgttatgctactagatacattcgatttcggcccacgagaggacaattggtttttctacccaggaggaaatatcggcctctactgtccttattcatctaaaggcgctcctgaggaagattcagctatggtgtttgtttctaatgaagtcggcgagcacagtataacgaccagggatcttaacgtgaatgaaaacacaattattcagttcgaaatcaatgtcggatgttcaacggactccagttcggcggatcccgtgcgcctcgagttttccagagatttcggcgctacgtggcatctgctgctgcccttatgctaccattcttcctcacatgtaagcagcctgtgtagcactgagcaccaccccagtagcacgtactatgccggcaccatgcagggatggcgtcgggaggtggtgcatttcggcaagctgcacctctgcggcagcgttcgatttcgctggtatcagggattctaccccgccggatcccagccggtgacctgggccatcgacaatgtttacatcgggcctcagtgtgaggagatgtgtaatggtcagggtagttgcattaatgggactaaatgcatttgtgatcctggctactccgggcctacttgtaaaatatcaacaaagaaccctgattttctgaaggatgatttcgaaggtcagttggaaagcgatcgattcctgctgatgtccggtggcaaaccatctagaaaatgtggcatcttgtcttccggaaacaacctgttttttaatgaagatgggttgagaatgttgatgacacgcgacctcgacctcagccacgccagattcgttcaattctttatgcggctgggttgcggaaagggagtcccagacccgcgctcccaacccgtgctccttcaatattcacttaacgggggcttaagttggtcactgctgcaagaatttctgttcagcaatagtagtaatgttggacggtacattgctcttgagattcctctaaaagcccggagtggcagcactagactccggtggtggcaaccttccgagaacggacacttctattccccatgggtaatcgaccaaatactgatcggcggaaatatttctggaaacactgttctcgaggacgacttcactactctggacagcagaaaatggctgctccaccccggcggtactaaaatgcctgtctgtggctccacgggagacgcgttggtgtttatcgagaaggcctccacgaggtacgtggtgagtaccgatgtcgccgtcaacgaggactcttttctacagatcgactttgccgcctcctgtagcgtgacggactcttgctacgctatcgaactcgagtattccgtggaccttggattaagctggcacccactagtaagggattgtttgcccacgaatgtggagtgttctcgctaccacctccagcggatcctggtgagtgatacattcaacaagtggaccagaatcactcttcccctgccgccttacactcgatctcaggccacacgctttcggtggcaccagcccgcaccttttgataaacagcagacctgggccatagacaatgtgtatatcggggatggatgtattgacatgtgcagcggccacggtcgctgcatccagggaaattgtgtctgcgacgaacaatggggtggactttattgtgatgaccctgaaacaagccttcctactcagctcaaggacaacttcaatcgcgccccgagctcccagaattggcttaccgtgaacggggggaagctttctaccgtttgcggagctgtagccagcggcatggccctccatttttccggcgggtgctcaaggctcttagtgaccgtcgatctcaacttgaccaacgccgagttcatccagttctacttcatgtatggctgccttattacgcccaacaataggaatcagggtgtcctcctggagtattcagttaatggcggcattacctggaatcttcttatggaaattttttacgatcagtactccaagcccggatttgtgaatatcctccttccaccagatgccaaggagatcgctacccgcttcagatggtggcagccgagacatgatggcttggatcagaacgattgggctattgataacgtactgattagtggttccgctgatcagcgtacagttatgctggatactttcagttctgctcccgtgccgcagcatgaaagatcccccgccgatgccggacccgtggggaggatcgcattcgacatgttcatggaagacaaaacctcagttaatgaacactggttgttccatgatgattgcacagtagagcggttttgtgatagtcccgatggagtgatgttgtgcggatcccacgacggccgtgaggtttacgccgtcactcacgacctcaccccaaccgagggctggataatgcaattcaaaatttccgtgggttgtaaagtttcagagaagattgcccagaatcagattcatgtgcagtactccacggactttggagtctcatggaattacctcgtgccgcagtgtctgcccgccgaccctaagtgcagcggaagtgtgtctcagccatccgtctttttccccaccaaaggctggaagcggatcacctaccctttacccgagagcctcgtggggaacccggtcagattccgattttatcagaaatacagcgacatgcagtgggccatagacaacttttacctgggcccaggctgtctcgataactgcagaggtcatggagactgcctgagagaacagtgcatctgcgatccaggctacagcggaccaaattgctacctcacacacacactcaaaactttcttgaaagagcggttcgatagcgaagaaattaagcccgatctctggatgagcctggaaggcggttcgacatgcacagagtgcggcatcttggctgaggacaccgctctttattttggggggagtacagtgcgacaagccgtgactcaggacctagacttgagaggggctaaatttctgcaatattggggccgcattggtagtgagaacaatatgacatcttgtcaccggcccatctgccgcaaagagggagtactgcttgactactctaccgacggcggcatcacttggaccctcctgcatgaaatggactaccaaaaatacatatccgtgaggcacgattacatactcctcccagaagacgctttgactaacaccacaaggctacgctggtggcagcccttcgttatctctaacggcattgttgtctcaggtgtggagcgggcccaatgggccctggataatatcctgatcggcggggcagagataaacccctcccaacttgtagatacttttgacgatgagggcacgtcgcacgaggagaactggagcttctacccaaatgctgtgcgaactgccggcttttgtggaaatcccagcttccatttgtattggcctaacaagaaaaaggacaagactcataacgcactgagcagcagggagttgattatccagcctggatacatgatgcagttcaagatagtagtcggatgcgaggccaccagttgcggcgacctgcactccgtgatgttggagtatacaaaggatgcgagatctgactcctggcagcttgtgcagacacaatgcctaccctcttcatcaaattccatcgggtgcagcccttttcagttccacgaggctaccatctacaactccgtgaactcttcgtcatggaagcggatcactatccaactccctgatcatgtgagttcttcagccacccagttccggtggatccaaaagggggaagagacagaaaagcagagctgggctatcgatcacgtctatattggcgaagcctgccccaaactctgctcaggacacggatattgtacaacaggcgccatatgcatctgtgacgaatctttccagggtgacgactgtagcgtgttctcgcacgatctgccaagttacattaaagacaacttcgagtccgcgcgggtcacggaggccaattgggagacgatccagggcggtgttatagggagtgggtgcggtcagcttgcaccctacgcacacggcgattcattgtattttaacggctgtcaaataaggcaggcagcgaccaagccgctggatctcactcgggcttcaaaaattatgttcgtgttgcagataggcagcatgagccagacggacagctgcaacagtgacttgagcggaccccacgccgtggacaaggctgtgctcctgcaatactccgtgaacaacggcataacatggcacgtgattgctcagcatcagcctaaggacttcacgcaggcacagcgcgtgtcctacaacgtcccactcgaggcccgaatgaaaggggtgctcctgcggtggtggcagcctcggcataatggaacaggacacgaccagtgggcactggatcatgtcgaagtggtgctgtag

SEQ ID NO: 152338 - DNA, 10383 bp, Artificial Sequence
  derived and/or modified sequence
atggagaggagcggctgggcccggcagaccttcctgctggccctgctgctgggcgccaccctgcgggcccgggctgctgctggctactacccccgcttcagccccttcttcttcctgtgcacccaccacggggagctggagggagatggagagcagggcgaggtgctgatcagcctgcacatcgccggcaaccccacctactacgtgcccggccaggagtaccacgtgaccatcagcaccagcaccttctttgatggcctgctggtgacaggcctgtacaccagcacctctgtgcaggccagccagagcatcggcggcagcagcgccttcggcttcggcatcatgtctgaccaccagtttggaaaccagttcatgtgcagcgtggtggccagccacgtgagccacctgcccaccaccaacctgtccttcatctggatcgcccccccagctggcaccggctgtgtgaacttcatggccacagccacccaccggggccaggtgatcttcaaggatgccctggcccagcagctgtgtgagcagggcgcccccacagatgtgacagtgcacccccacctggccgagatccacagcgacagcatcatcctgagagatgactttgacagctaccaccagctgcagctgaaccccaacatctgggtggagtgcaacaactgtgaaacaggagagcagtgtggggccatcatgcacggcaatgctgtgaccttctgtgagccctacggcccccgggagctgatcaccaccggcctgaacaccaccacagcctctgtgctgcagttcagcatcggcagcggcagctgccgcttctcctacagcgaccccagcatcatcgtgctgtatgccaagaacaacagcgctgactggatccagctggagaagatccgggcccccagcaatgtgtccaccatcatccacatcctgtacctgcctgaagatgccaagggggagaatgtgcagttccagtggaagcaggagaacctgcgggtgggggaggtgtatgaggcctgctgggccctggacaacatcctgatcatcaacagcgcccaccggcaggtggtgctggaggacagcctggaccctgtggacaccggcaactggctgttcttccctggggccaccgtgaagcacagctgccagagtgatggcaacagcatctacttccacggcaatgaaggcagcgagttcaactttgccaccaccagagatgtggacctgagcacagaggacatccaggagcagtggagcgaggagtttgagagccagcccaccggctgggatgtgctgggcgccgtcatcggcacagaatgtggcaccattgaaagtggcctgtccatggtgttcctgaaggatggagagaggaagctgtgcacccccagcatggacaccaccggctacggcaacctgcgcttctactttgtgatgggcggcatctgtgaccccggcaacagccatgaaaatgacatcatcctgtatgccaagattgagggcaggaaggagcacatcaccctggacaccctgagctacagcagctacaaggtgcccagcctggtgtctgtggtgatcaaccctgagctgcagaccccagccaccaagttctgcctgcggcagaagaaccaccagggccacaacagaaatgtgtgggccgtggacttcttccacgtgctgcctgtgctgcccagcaccatgagccacatgatccagttcagcatcaacctgggctgcggcacccaccagcccggcaacagcgtgtccctggagttcagcaccaaccacggccgctcctggagcctgctgcacacagaatgtctgcctgagatctgtgccggcccccacctgccccacagcacagtgtacagcagcgagaactacagcggctggaaccgcatcaccatccccctgcccaatgctgccctgaccaggaacacccgcatccgctggaggcagacaggccccatcctgggcaacatgtgggccatcgacaacgtgtacatcggccccagctgcctgaagttctgcagcggccggggccagtgcaccaggcatggctgcaagtgtgaccccggcttcagcggccctgcctgtgagatggccagccagaccttccccatgttcatcagcgagagctttggcagcagccggctgagcagctaccacaacttctacagcatcagaggagctgaggtgtcctttggctgcggcgtgctggccagcggcaaggccctggtgttcaacaaggatggccggcggcagctgatcaccagcttcctggacagcagccagagccgcttcctgcagttcaccctgcggctgggcagcaagtctgtgctgagcacctgccgggccccagaccagcctggagagggcgtgctgctgcactacagctatgacaatggcatcacctggaagctgctggagcactacagctacctgagctaccacgagccccgcatcatctctgtggagctgcctggagatgccaagcagtttggcatccagttccgctggtggcagccctaccacagcagccagagagaagatgtgtgggccattgatgagatcatcatgacctctgtgctcttcaacagcatcagcctggacttcaccaacctggtggaggtgacccagagcctgggcttctacctgggcaatgtgcagccctactgcggccatgactggaccctgtgcttcaccggggacagcaagctggccagctccatgagatatgtggagacccagagcatgcagatcggggccagctacatgatccagttcagcctggtgatgggctgcggccagaagtacaccccccacatggacaaccaggtgaagctggagtacagcaccaaccacggcctgacctggcacctggtgcaggaggagtgcctgcccagcatgcccagctgccaggagttcaccagcgccagcatctaccacgccagcgagttcacccagtggaggagagtgattgtgctgctgccccagaagacctggagcagcgccacccgcttccgctggagccagagctactacacagcccaggatgagtgggccctggacagcatctacatcggccagcagtgccccaacatgtgcagcggccacggcagctgtgaccacggcatctgccgctgtgaccagggctaccagggcacagagtgccaccctgaggccgccctgcccagcaccatcatgtctgactttgagaaccagaatggctgggagagtgactggcaggaggtgattggaggagaaattgtgaagccagagcagggctgtggggtcatcagcagcggcagcagcctgtacttcagcaaggccggcaagaggcagctggtgtcctgggacctggacacctcctgggtggactttgtgcagttctacatccagatcggcggggagagcgccagctgcaacaagccagacagccgggaggagggcgtgctgctgcagtacagcaacaacggcggcatccagtggcacctgctggccgagatgtacttcagtgacttcagcaagcccaggtttgtgtacctggagctgcctgctgctgccaagaccccctgcacccgcttccgctggtggcagcccgtcttctctggagaagattatgaccagtgggccgtggatgacatcatcatcctgtctgagaagcagaagcagatcatccctgtgatcaaccccaccctgccccagaacttctatgagaagccagcctttgactaccccatgaaccagatgtctgtgtggctgatgctggccaatgaaggcatggtgaagaatgagaccttctgtgccgccaccccatctgccatgatctttgggaagagtgatggagacagatttgctgtgacccgggacctgaccctgaagccaggctacgtgctgcagttcaagctgaacatcggctgtgccaaccagttcagcagcacagcccctgtgctgctgcagtacagccatgatgctggcatgtcctggttcctggtgaaggagggctgctacccagccagcgctgggaagggctgtgagggcaacagccgggagctgtctgagcccaccatgtaccacactggagactttgaggagtggacccgcatcaccatcgtcatccccaggagcctggccagcagcaagacccgcttccgctggatccaggagagcagcagccagaagaatgtgcccccatttggcctggatggagtgtacatcagcgagccctgccccagctactgcagcggccatggagactgcatcagcggcgtgtgcttctgtgacctgggctacacagctgcccagggcacctgtgtgtccaatgtgcccaaccacaatgagatgtttgacagatttgagggcaagctgagccccctgtggtacaagatcaccggggcccaggtgggcaccggctgcggcaccctgaatgatggcaagagcctgtacttcaacggccctgggaagcgggaggccaggacagtgcccctggacaccaggaacatccggctggtgcagttctacatccagatcggcagcaagaccagcggcatcacctgcatcaagcccaggaccagaaatgaaggcctcatcgtgcagtacagcaatgacaatggcatcctgtggcacctgctgcgggagctggacttcatgtccttcctggagccccagatcatcagcattgacctgccccaggatgccaagaccccagccacagccttccgctggtggcagccccagcacggcaagcacagcgcccagtgggccctggatgatgtgctgattggcatgaatgacagcagccagacaggcttccaggacaagtttgatggcagcattgacctgcaggccaactggtaccgcatccagggcggccaggtggacatcgactgcctgtccatggacacagccctgatcttcacagaaaatattggcaagcccaggtatgcagagacctgggacttccacgtgtctgccagcaccttcctgcagtttgagatgtccatgggctgcagcaagcccttcagcaacagccacagcgtgcagctgcagtacagcctgaacaacgggaaggactggcacctggtgacagaggagtgtgtgccccccaccatcggctgcctgcactacacagagagcagcatctacaccagcgagcgcttccagaactggaagaggatcaccgtgtacctgcccctgagcaccatcagccccaggacccgcttccgctggatccaggccaactacacagtgggcgctgacagctgggccatcgacaacgtggtgctggccagcggctgcccctggatgtgcagcggccggggcatctgtgatgctggccgctgtgtgtgtgaccggggctttggaggcccctactgtgtgcctgtggtgcccctgcccagcatcctgaaggatgacttcaatggaaacctgcacccagacctgtggccagaggtgtatggagctgagcggggcaacctgaatggagagaccatcaagagcggcaccagcctcatcttcaagggggagggcctgaggatgctgatcagccgggacctggactgcaccaacaccatgtatgtgcagttcagcctgcgcttcatcgccaagagcaccccagagaggagccacagcatcctgctgcagttcagcatcagcggcggcatcacctggcacctgatggatgagttctacttcccccagaccaccaacatcctcttcatcaacgtgcccctgccctacacagcccagaccaatgccacccgcttccggctgtggcagccctacaacaacgggaagaaggaggagatctggatcgtggatgacttcatcattgatggcaacaacgtgaacaaccctgtgatgctgctggacacctttgattttggcccccgggaggacaactggttcttctacccaggcggcaacatcggcctgtactgcccctacagcagcaaaggagcccctgaggaggacagcgccatggtgtttgtgtccaatgaggtgggggagcacagcatcaccacccgggacctgaatgtgaatgaaaacaccatcatccagtttgagatcaacgtgggctgcagcacagacagcagcagcgctgaccctgtgcggctggagttcagccgggactttggagccacctggcacctgctgctgcccctgtgctaccacagcagcagccacgtgagcagcctgtgcagcacagagcaccaccccagcagcacctactatgccggcaccatgcagggctggaggcgggaggtggtgcactttgggaagctgcacctgtgtggctctgtgcgcttccgctggtaccagggcttctacccagctggcagccagcctgtgacctgggccatcgacaacgtgtacatcggcccccagtgtgaggagatgtgcaatggccagggcagctgcatcaatggcaccaagtgcatctgtgaccccggctacagcggccccacctgcaagatcagcaccaagaacccagacttcctgaaggatgactttgagggccagctggagagtgaccgcttcctgctgatgtctgggggcaagcccagcaggaaatgtggcatcctgagcagcggcaacaacctcttcttcaatgaagatggcctgaggatgctgatgacccgggacctggacctgagccacgccaggtttgtgcagttcttcatgaggctgggctgtgggaagggcgtgcctgaccccaggagccagcctgtgctgctgcagtacagcctgaatggaggcctgtcctggagcctgctgcaggagttcctgttcagcaacagcagcaatgtgggccgctacatcgccctggagatccccctgaaggcccggagcggcagcacccggctgcgctggtggcagcccagtgaaaatggccacttctacagcccctgggtgattgaccagatcctgattggaggcaacatcagcggcaacacagtgctggaggatgacttcaccaccctggacagcaggaagtggctgctgcaccctgggggcaccaagatgcctgtgtgtggcagcactggagatgccctggtgttcatcgagaaggccagcacccgctacgtggtgtccacagatgtggccgtgaatgaagacagcttcctgcagattgactttgctgccagctgcagcgtgacagacagctgctacgccatcgagctggagtacagcgtggacctgggcctgtcctggcaccccctggtgcgggactgcctgcccaccaacgtggagtgcagccgctaccacctgcagaggatcctggtgtctgacaccttcaacaagtggacccgcatcaccctgcccctgcccccctacaccaggagccaggccacccgcttccgctggcaccagcctgccccctttgacaagcagcagacctgggccatcgacaacgtgtacatcggagatggctgcatcgacatgtgcagcggccacggccgctgcatccagggcaactgtgtgtgtgatgagcagtggggcggcctgtactgtgatgatcctgagaccagcctgcccacccagctgaaggacaacttcaacagagcccccagcagccagaactggctgactgtgaatggaggcaagctgagcacagtgtgtggggctgtggccagcggcatggccctgcacttcagcggcggctgcagccggctgctggtgacagtggacctgaacctgaccaatgctgagttcatccagttctacttcatgtatggctgcctgatcacccccaacaacagaaaccagggcgtgctgctggagtacagcgtgaatggaggcatcacctggaacctgctgatggagatcttctatgaccagtacagcaagccaggctttgtgaacatcctgctgcccccagatgccaaggagatcgccacccgcttccgctggtggcagcccaggcatgatggcctggaccagaatgactgggccatcgacaacgtgctgatcagcggcagcgctgaccagaggacagtgatgctggacaccttcagcagcgcccctgtgccccagcacgagaggagccctgcagatgctggccctgtgggcagaattgcctttgacatgttcatggaggacaagacctctgtgaatgagcactggctgttccatgatgactgcaccgtggagcgcttctgtgacagcccagatggagtgatgctgtgtggcagccatgatggccgggaggtgtatgctgtgacccatgacctgacccccacagagggctggatcatgcagttcaagatctctgtgggctgcaaggtgtctgagaagatcgcccagaaccagatccacgtgcagtacagcacagactttggagtgtcctggaactacctggtgccccagtgcctgcctgctgaccccaagtgcagcggctctgtgtcccagcccagcgtcttcttccccaccaagggctggaagaggatcacctaccccctgcctgagagcctggtgggcaaccctgtgcgcttccgcttctaccagaagtacagcgacatgcagtgggccatcgacaacttctacctgggccctggctgcctggacaactgccggggccatggagactgcctgcgggagcagtgcatctgtgaccccggctacagcggccccaactgctacctgacccacaccctgaagaccttcctgaaggagagatttgacagcgaggagatcaagccagacctgtggatgagcctggagggcggcagcacctgcacagaatgtggcatcctggccgaggacacagccctgtactttggaggcagcacagtgcggcaggccgtgacccaggacctggacctgcggggggccaagttcctgcagtactggggccgcatcggcagcgagaacaacatgaccagctgccaccggcccatctgcaggaaggagggcgtgctgctggactacagcacagatggcggcatcacctggaccctgctgcacgagatggactaccagaagtacatctctgtgagacatgactacatcctgctgcctgaagatgccctgaccaacaccacccggctgcgctggtggcagccctttgtgatcagcaatggaattgtggtgtctggagtggagcgggcccagtgggccctggacaacatcctgattggaggagctgagatcaaccccagccagctggtggacacctttgatgatgagggcaccagccatgaggagaactggagcttctacccaaatgctgtgaggacagctggcttctgtggcaaccccagcttccacctgtactggcccaacaagaagaaggacaagacccacaatgccctgagcagccgggagctgatcatccagcccggctacatgatgcagttcaagatcgtggtgggctgtgaggccaccagctgtggggacctgcacagcgtgatgctggagtacaccaaggatgcccggagtgacagctggcagctggtgcagacccagtgcctgcccagcagcagcaacagcatcggctgcagccccttccagttccacgaggccaccatctacaacagcgtgaacagcagctcctggaagaggatcaccatccagctgcctgaccacgtgagcagcagcgccacccagttccgctggatccagaagggggaggagacagagaagcagagctgggccatcgaccacgtgtacatcggggaggcctgccccaagctgtgcagcggccacggctactgcaccactggagccatctgcatctgtgatgagagcttccagggagatgactgcagcgtcttcagccatgacctgcccagctacatcaaggacaactttgaaagtgcccgggtgacagaggccaactgggagaccatccagggcggcgtgattggcagcggctgcggccagctggccccctatgcccatggagacagcctgtacttcaacggctgccagatccggcaggccgccaccaagcccctggacctgacccgggccagcaagatcatgtttgtgctgcagatcggctccatgagccagacagacagctgcaacagcgacctgagcggcccccatgctgtggacaaggctgtgctgctgcagtacagcgtgaacaacggcatcacctggcacgtgattgcccagcaccagcccaaggacttcacccaggcccagagggtgtcctacaacgtgcccctggaggccaggatgaagggcgtgctgctgcgctggtggcagcccaggcacaatggaactggacatgaccagtgggccctggaccacgtggaggtggtgctcttcagcaccaggaagcagaactacatgatgaacttcagccggcagcacggcctgcggcacttctacaacagaagaagaagaagcctgcggcgctacccctag

SEQ ID NO: 152339 - DNA, 2934 bp, Artificial Sequence
  derived and/or modified sequence
atgtgcagcggccacggccgctgcatccagggcaactgtgtgtgtgatgagcagtggggcggcctgtactgtgatgatcctgagaccagcctgcccacccagctgaaggacaacttcaacagagcccccagcagccagaactggctgactgtgaatggaggcaagctgagcacagtgtgtggggctgtggccagcggcatggccctgcacttcagcggcggctgcagccggctgctggtgacagtggacctgaacctgaccaatgctgagttcatccagttctacttcatgtatggctgcctgatcacccccaacaacagaaaccagggcgtgctgctggagtacagcgtgaatggaggcatcacctggaacctgctgatggagatcttctatgaccagtacagcaagccaggctttgtgaacatcctgctgcccccagatgccaaggagatcgccacccgcttccgctggtggcagcccaggcatgatggcctggaccagaatgactgggccatcgacaacgtgctgatcagcggcagcgctgaccagaggacagtgatgctggacaccttcagcagcgcccctgtgccccagcacgagaggagccctgcagatgctggccctgtgggccgcatcgcctttgacatgttcatggaggacaagacctctgtgaatgagcactggctgttccatgatgactgcaccgtggagcgcttctgtgacagcccagatggagtgatgctgtgtggcagccatgatggccgggaggtgtatgctgtgacccatgacctgacccccacagagggctggatcatgcagttcaagatctctgtgggctgcaaggtgtctgagaagatcgcccagaaccagatccacgtgcagtacagcacagactttggagtgtcctggaactacctggtgccccagtgcctgcctgctgaccccaagtgcagcggctctgtgtcccagcccagcgtcttcttccccaccaagggctggaagaggatcacctaccccctgcctgagagcctggtgggcaaccctgtgcgcttccgcttctaccagaagtacagcgacatgcagtgggccatcgacaacttctacctgggccctggctgcctggacaactgccggggccacggggactgcctgcgggagcagtgcatctgtgaccccggctacagcggccccaactgctacctgacccacaccctgaagaccttcctgaaggagagatttgattctgaggagatcaagccagacctgtggatgagcctggagggcggcagcacctgcacagaatgtggcatcctggccgaggacacagccctgtactttggaggcagcacagtgcggcaggccgtgacccaggacctggacctgcggggggccaagttcctgcagtactggggcagaattggcagcgagaacaacatgaccagctgccaccggcccatctgcaggaaggagggcgtgctgctggactacagcacagatggcggcatcacctggaccctgctgcacgagatggactaccagaagtacatctctgtgagacatgactacatcctgctgcctgaagatgccctgaccaacaccacccggctgcgctggtggcagcccttcgtcatcagcaatggcatcgtggtgtctggagtggagcgggcccagtgggccctggacaacatcctgattggaggagctgagatcaaccccagccagctggtggacacctttgatgatgagggcaccagccatgaggagaactggagcttctacccaaatgctgtgaggacagctggcttctgtggcaaccccagcttccacctgtactggcccaacaagaagaaggacaagacccacaatgccctgagcagccgggagctgatcatccagcccggctacatgatgcagttcaagatcgtggtgggctgtgaggccaccagctgtggggacctgcacagcgtgatgctggagtacaccaaggatgcccggagtgacagctggcagctggtgcagacccagtgcctgcccagcagcagcaacagcatcggctgcagccccttccagttccacgaggccaccatctacaacagcgtgaacagcagctcctggaagaggatcaccatccagctgcctgaccacgtgagcagcagcgccacccagttccgctggatccagaagggggaggagacagagaagcagagctgggccatcgaccacgtgtacatcggggaggcctgccccaagctgtgcagcggccacggctactgcaccaccggggccatctgcatctgtgatgagagcttccagggagatgactgcagcgtcttcagccatgacctgcccagctacatcaaggacaactttgagagcgcccgggtgacagaggccaactgggagaccatccagggcggcgtcatcggcagcggctgcggccagctggccccctatgcccacggggacagcctgtacttcaacggctgccagatccggcaggccgccaccaagcccctggacctgacccgggccagcaagatcatgtttgtgctgcagatcggctccatgagccagacagacagctgcaacagcgacctgagcggcccccatgctgtggacaaggctgtgctgctgcagtacagcgtgaacaacggcatcacctggcacgtgattgcccagcaccagcccaaggacttcacccaggcccagagggtgtcctacaacgtgcccctggaggccaggatgaagggcgtgctgctgcgctggtggcagcccaggcacaacggcaccggccatgaccagtgggccctggaccacgtggaggtggtgctggtgaccaccaggaagcagaactacatgatgaacttcagccggcagcacggcctgcggcacttctacaacagaagaagaagaagcctgcggcgctacccctag

SEQ ID NO: 152340 - DNA, 10383 bp, Artificial Sequence
  derived and/or modified sequence
atggagaggagcggctgggcccggcagaccttcctgctggccctgctgctgggcgccaccctgcgggcccgggctgctgctggctactacccccgcttcagccccttcttcttcctgtgcacccaccacggggagctggagggagatggagagcagggcgaggtgctgatcagcctgcacatcgccggcaaccccacctactacgtgcccggccaggagtaccacgtgaccatcagcaccagcaccttctttgatggcctgctggtgacaggcctgtacaccagcacctctgtgcaggccagccagagcatcggcggcagcagcgccttcggcttcggcatcatgtctgaccaccagtttggaaaccagttcatgtgcagcgtggtggccagccacgtgagccacctgcccaccaccaacctgtccttcatctggatcgcccccccagctggcaccggctgtgtgaacttcatggccacagccacccaccggggccaggtgatcttcaaggatgccctggcccagcagctgtgtgagcagggcgcccccacagatgtgacagtgcacccccacctggccgagatccacagcgacagcatcatcctgagagatgactttgacagctaccaccagctgcagctgaaccccaacatctgggtggagtgcaacaactgtgaaacaggagagcagtgtggggccatcatgcacggcaatgctgtgaccttctgtgagccctacggcccccgggagctgatcaccaccggcctgaacaccaccacagcctctgtgctgcagttcagcatcggcagcggcagctgccgcttctcctacagcgaccccagcatcatcgtgctgtatgccaagaacaacagcgctgactggatccagctggagaagatccgggcccccagcaatgtgtccaccatcatccacatcctgtacctgcctgaagatgccaagggggagaatgtgcagttccagtggaagcaggagaacctgcgggtgggggaggtgtatgaggcctgctgggccctggacaacatcctgatcatcaacagcgcccaccggcaggtggtgctggaggacagcctggaccctgtggacaccggcaactggctgttcttccctggggccaccgtgaagcacagctgccagagtgatggcaacagcatctacttccacggcaatgaaggcagcgagttcaactttgccaccaccagagatgtggacctgagcacagaggacatccaggagcagtggagcgaggagtttgagagccagcccaccggctgggatgtgctgggcgccgtcatcggcacagaatgtggcaccattgaaagtggcctgtccatggtgttcctgaaggatggagagaggaagctgtgcacccccagcatggacaccaccggctacggcaacctgcgcttctactttgtgatgggcggcatctgtgaccccggcaacagccatgaaaatgacatcatcctgtatgccaagattgagggcaggaaggagcacatcaccctggacaccctgagctacagcagctacaaggtgcccagcctggtgtctgtggtgatcaaccctgagctgcagaccccagccaccaagttctgcctgcggcagaagaaccaccagggccacaacagaaatgtgtgggccgtggacttcttccacgtgctgcctgtgctgcccagcaccatgagccacatgatccagttcagcatcaacctgggctgcggcacccaccagcccggcaacagcgtgtccctggagttcagcaccaaccacggccgctcctggagcctgctgcacacagaatgtctgcctgagatctgtgccggcccccacctgccccacagcacagtgtacagcagcgagaactacagcggctggaaccgcatcaccatccccctgcccaatgctgccctgaccaggaacacccgcatccgctggaggcagacaggccccatcctgggcaacatgtgggccatcgacaacgtgtacatcggccccagctgcctgaagttctgcagcggccggggccagtgcaccaggcatggctgcaagtgtgaccccggcttcagcggccctgcctgtgagatggccagccagaccttccccatgttcatcagcgagagctttggcagcagccggctgagcagctaccacaacttctacagcatcagaggagctgaggtgtcctttggctgcggcgtgctggccagcggcaaggccctggtgttcaacaaggatggccggcggcagctgatcaccagcttcctggacagcagccagagccgcttcctgcagttcaccctgcggctgggcagcaagtctgtgctgagcacctgccgggccccagaccagcctggagagggcgtgctgctgcactacagctatgacaatggcatcacctggaagctgctggagcactacagctacctgagctaccacgagccccgcatcatctctgtggagctgcctggagatgccaagcagtttggcatccagttccgctggtggcagccctaccacagcagccagagagaagatgtgtgggccattgatgagatcatcatgacctctgtgctcttcaacagcatcagcctggacttcaccaacctggtggaggtgacccagagcctgggcttctacctgggcaatgtgcagccctactgcggccatgactggaccctgtgcttcaccggggacagcaagctggccagctccatgagatatgtggagacccagagcatgcagatcggggccagctacatgatccagttcagcctggtgatgggctgcggccagaagtacaccccccacatggacaaccaggtgaagctggagtacagcaccaaccacggcctgacctggcacctggtgcaggaggagtgcctgcccagcatgcccagctgccaggagttcaccagcgccagcatctaccacgccagcgagttcacccagtggaggagagtgattgtgctgctgccccagaagacctggagcagcgccacccgcttccgctggagccagagctactacacagcccaggatgagtgggccctggacagcatctacatcggccagcagtgccccaacatgtgcagcggccacggcagctgtgaccacggcatctgccgctgtgaccagggctaccagggcacagagtgccaccctgaggccgccctgcccagcaccatcatgtctgactttgagaaccagaatggctgggagagtgactggcaggaggtgattggaggagaaattgtgaagccagagcagggctgtggggtcatcagcagcggcagcagcctgtacttcagcaaggccggcaagaggcagctggtgtcctgggacctggacacctcctgggtggactttgtgcagttctacatccagatcggcggggagagcgccagctgcaacaagccagacagccgggaggagggcgtgctgctgcagtacagcaacaacggcggcatccagtggcacctgctggccgagatgtacttcagtgacttcagcaagcccaggtttgtgtacctggagctgcctgctgctgccaagaccccctgcacccgcttccgctggtggcagcccgtcttctctggagaagattatgaccagtgggccgtggatgacatcatcatcctgtctgagaagcagaagcagatcatccctgtgatcaaccccaccctgccccagaacttctatgagaagccagcctttgactaccccatgaaccagatgtctgtgtggctgatgctggccaatgaaggcatggtgaagaatgagaccttctgtgccgccaccccatctgccatgatctttgggaagagtgatggagacagatttgctgtgacccgggacctgaccctgaagccaggctacgtgctgcagttcaagctgaacatcggctgtgccaaccagttcagcagcacagcccctgtgctgctgcagtacagccatgatgctggcatgtcctggttcctggtgaaggagggctgctacccagccagcgctgggaagggctgtgagggcaacagccgggagctgtctgagcccaccatgtaccacactggagactttgaggagtggacccgcatcaccatcgtcatccccaggagcctggccagcagcaagacccgcttccgctggatccaggagagcagcagccagaagaatgtgcccccatttggcctggatggagtgtacatcagcgagccctgccccagctactgcagcggccatggagactgcatcagcggcgtgtgcttctgtgacctgggctacacagctgcccagggcacctgtgtgtccaatgtgcccaaccacaatgagatgtttgacagatttgagggcaagctgagccccctgtggtacaagatcaccggggcccaggtgggcaccggctgcggcaccctgaatgatggcaagagcctgtacttcaacggccctgggaagcgggaggccaggacagtgcccctggacaccaggaacatccggctggtgcagttctacatccagatcggcagcaagaccagcggcatcacctgcatcaagcccaggaccagaaatgaaggcctcatcgtgcagtacagcaatgacaatggcatcctgtggcacctgctgcgggagctggacttcatgtccttcctggagccccagatcatcagcattgacctgccccaggatgccaagaccccagccacagccttccgctggtggcagccccagcacggcaagcacagcgcccagtgggccctggatgatgtgctgattggcatgaatgacagcagccagacaggcttccaggacaagtttgatggcagcattgacctgcaggccaactggtaccgcatccagggcggccaggtggacatcgactgcctgtccatggacacagccctgatcttcacagaaaatattggcaagcccaggtatgcagagacctgggacttccacgtgtctgccagcaccttcctgcagtttgagatgtccatgggctgcagcaagcccttcagcaacagccacagcgtgcagctgcagtacagcctgaacaacgggaaggactggcacctggtgacagaggagtgtgtgccccccaccatcggctgcctgcactacacagagagcagcatctacaccagcgagcgcttccagaactggaagaggatcaccgtgtacctgcccctgagcaccatcagccccaggacccgcttccgctggatccaggccaactacacagtgggcgctgacagctgggccatcgacaacgtggtgctggccagcggctgcccctggatgtgcagcggccggggcatctgtgatgctggccgctgtgtgtgtgaccggggctttggaggcccctactgtgtgcctgtggtgcccctgcccagcatcctgaaggatgacttcaatggaaacctgcacccagacctgtggccagaggtgtatggagctgagcggggcaacctgaatggagagaccatcaagagcggcaccagcctcatcttcaagggggagggcctgaggatgctgatcagccgggacctggactgcaccaacaccatgtatgtgcagttcagcctgcgcttcatcgccaagagcaccccagagaggagccacagcatcctgctgcagttcagcatcagcggcggcatcacctggcacctgatggatgagttctacttcccccagaccaccaacatcctcttcatcaacgtgcccctgccctacacagcccagaccaatgccacccgcttccggctgtggcagccctacaacaacgggaagaaggaggagatctggatcgtggatgacttcatcattgatggcaacaacgtgaacaaccctgtgatgctgctggacacctttgattttggcccccgggaggacaactggttcttctacccaggcggcaacatcggcctgtactgcccctacagcagcaaaggagcccctgaggaggacagcgccatggtgtttgtgtccaatgaggtgggggagcacagcatcaccacccgggacctgaatgtgaatgaaaacaccatcatccagtttgagatcaacgtgggctgcagcacagacagcagcagcgctgaccctgtgcggctggagttcagccgggactttggagccacctggcacctgctgctgcccctgtgctaccacagcagcagccacgtgagcagcctgtgcagcacagagcaccaccccagcagcacctactatgccggcaccatgcagggctggaggcgggaggtggtgcactttgggaagctgcacctgtgtggctctgtgcgcttccgctggtaccagggcttctacccagctggcagccagcctgtgacctgggccatcgacaacgtgtacatcggcccccagtgtgaggagatgtgcaatggccagggcagctgcatcaatggcaccaagtgcatctgtgaccccggctacagcggccccacctgcaagatcagcaccaagaacccagacttcctgaaggatgactttgagggccagctggagagtgaccgcttcctgctgatgtctgggggcaagcccagcaggaaatgtggcatcctgagcagcggcaacaacctcttcttcaatgaagatggcctgaggatgctgatgacccgggacctggacctgagccacgccaggtttgtgcagttcttcatgaggctgggctgtgggaagggcgtgcctgaccccaggagccagcctgtgctgctgcagtacagcctgaatggaggcctgtcctggagcctgctgcaggagttcctgttcagcaacagcagcaatgtgggccgctacatcgccctggagatccccctgaaggcccggagcggcagcacccggctgcgctggtggcagcccagtgaaaatggccacttctacagcccctgggtgattgaccagatcctgattggaggcaacatcagcggcaacacagtgctggaggatgacttcaccaccctggacagcaggaagtggctgctgcaccctgggggcaccaagatgcctgtgtgtggcagcactggagatgccctggtgttcatcgagaaggccagcacccgctacgtggtgtccacagatgtggccgtgaatgaagacagcttcctgcagattgactttgctgccagctgcagcgtgacagacagctgctacgccatcgagctggagtacagcgtggacctgggcctgtcctggcaccccctggtgcgggactgcctgcccaccaacgtggagtgcagccgctaccacctgcagaggatcctggtgtctgacaccttcaacaagtggacccgcatcaccctgcccctgcccccctacaccaggagccaggccacccgcttccgctggcaccagcctgccccctttgacaagcagcagacctgggccatcgacaacgtgtacatcggagatggctgcatcgacatgtgcagcggccacggccgctgcatccagggcaactgtgtgtgtgatgagcagtggggcggcctgtactgtgatgatcctgagaccagcctgcccacccagctgaaggacaacttcaacagagcccccagcagccagaactggctgactgtgaatggaggcaagctgagcacagtgtgtggggctgtggccagcggcatggccctgcacttcagcggcggctgcagccggctgctggtgacagtggacctgaacctgaccaatgctgagttcatccagttctacttcatgtatggctgcctgatcacccccaacaacagaaaccagggcgtgctgctggagtacagcgtgaatggaggcatcacctggaacctgctgatggagatcttctatgaccagtacagcaagccaggctttgtgaacatcctgctgcccccagatgccaaggagatcgccacccgcttccgctggtggcagcccaggcatgatggcctggaccagaatgactgggccatcgacaacgtgctgatcagcggcagcgctgaccagaggacagtgatgctggacaccttcagcagcgcccctgtgccccagcacgagaggagccctgcagatgctggccctgtgggcagaattgcctttgacatgttcatggaggacaagacctctgtgaatgagcactggctgttccatgatgactgcaccgtggagcgcttctgtgacagcccagatggagtgatgctgtgtggcagccatgatggccgggaggtgtatgctgtgacccatgacctgacccccacagagggctggatcatgcagttcaagatctctgtgggctgcaaggtgtctgagaagatcgcccagaaccagatccacgtgcagtacagcacagactttggagtgtcctggaactacctggtgccccagtgcctgcctgctgaccccaagtgcagcggctctgtgtcccagcccagcgtcttcttccccaccaagggctggaagaggatcacctaccccctgcctgagagcctggtgggcaaccctgtgcgcttccgcttctaccagaagtacagcgacatgcagtgggccatcgacaacttctacctgggccctggctgcctggacaactgccggggccatggagactgcctgcgggagcagtgcatctgtgaccccggctacagcggccccaactgctacctgacccacaccctgaagaccttcctgaaggagagatttgacagcgaggagatcaagccagacctgtggatgagcctggagggcggcagcacctgcacagaatgtggcatcctggccgaggacacagccctgtactttggaggcagcacagtgcggcaggccgtgacccaggacctggacctgcggggggccaagttcctgcagtactggggccgcatcggcagcgagaacaacatgaccagctgccaccggcccatctgcaggaaggagggcgtgctgctggactacagcacagatggcggcatcacctggaccctgctgcacgagatggactaccagaagtacatctctgtgagacatgactacatcctgctgcctgaagatgccctgaccaacaccacccggctgcgctggtggcagccctttgtgatcagcaatggaattgtggtgtctggagtggagcgggcccagtgggccctggacaacatcctgattggaggagctgagatcaaccccagccagctggtggacacctttgatgatgagggcaccagccatgaggagaactggagcttctacccaaatgctgtgaggacagctggcttctgtggcaaccccagcttccacctgtactggcccaacaagaagaaggacaagacccacaatgccctgagcagccgggagctgatcatccagcccggctacatgatgcagttcaagatcgtggtgggctgtgaggccaccagctgtggggacctgcacagcgtgatgctggagtacaccaaggatgcccggagtgacagctggcagctggtgcagacccagtgcctgcccagcagcagcaacagcatcggctgcagccccttccagttccacgaggccaccatctacaacagcgtgaacagcagctcctggaagaggatcaccatccagctgcctgaccacgtgagcagcagcgccacccagttccgctggatccagaagggggaggagacagagaagcagagctgggccatcgaccacgtgtacatcggggaggcctgccccaagctgtgcagcggccacggctactgcaccactggagccatctgcatctgtgatgagagcttccagggagatgactgcagcgtcttcagccatgacctgcccagctacatcaaggacaactttgaaagtgcccgggtgacagaggccaactgggagaccatccagggcggcgtgattggcagcggctgcggccagctggccccctatgcccatggagacagcctgtacttcaacggctgccagatccggcaggccgccaccaagcccctggacctgacccgggccagcaagatcatgtttgtgctgcagatcggctccatgagccagacagacagctgcaacagcgacctgagcggcccccatgctgtggacaaggctgtgctgctgcagtacagcgtgaacaacggcatcacctggcacgtgattgcccagcaccagcccaaggacttcacccaggcccagagggtgtcctacaacgtgcccctggaggccaggatgaagggcgtgctgctgcgctggtggcagcccaggcacaatggaactggacatgaccagtgggccctggaccacgtggaggtggtgctggtgtccaccaggaagcagaactacatgatgaacttcagccggcagcacggcctgcggcacttctacaacagaagaagaagaagcctgcggcgctacccctag

SEQ ID NO: 152341 - DNA, 10284 bp, Artificial Sequence
  derived and/or modified sequence
atggagaggagcggctgggcccggcagaccttcctgctggccctgctgctgggcgccaccctgcgggcccgggctgctgctggctactacccccgcttcagccccttcttcttcctgtgcacccaccacggggagctggagggagatggagagcagggcgaggtgctgatcagcctgcacatcgccggcaaccccacctactacgtgcccggccaggagtaccacgtgaccatcagcaccagcaccttctttgatggcctgctggtgacaggcctgtacaccagcacctctgtgcaggccagccagagcatcggcggcagcagcgccttcggcttcggcatcatgtctgaccaccagtttggaaaccagttcatgtgcagcgtggtggccagccacgtgagccacctgcccaccaccaacctgtccttcatctggatcgcccccccagctggcaccggctgtgtgaacttcatggccacagccacccaccggggccaggtgatcttcaaggatgccctggcccagcagctgtgtgagcagggcgcccccacagatgtgacagtgcacccccacctggccgagatccacagcgacagcatcatcctgagagatgactttgacagctaccaccagctgcagctgaaccccaacatctgggtggagtgcaacaactgtgaaacaggagagcagtgtggggccatcatgcacggcaatgctgtgaccttctgtgagccctacggcccccgggagctgatcaccaccggcctgaacaccaccacagcctctgtgctgcagttcagcatcggcagcggcagctgccgcttctcctacagcgaccccagcatcatcgtgctgtatgccaagaacaacagcgctgactggatccagctggagaagatccgggcccccagcaatgtgtccaccatcatccacatcctgtacctgcctgaagatgccaagggggagaatgtgcagttccagtggaagcaggagaacctgcgggtgggggaggtgtatgaggcctgctgggccctggacaacatcctgatcatcaacagcgcccaccggcaggtggtgctggaggacagcctggaccctgtggacaccggcaactggctgttcttccctggggccaccgtgaagcacagctgccagagtgatggcaacagcatctacttccacggcaatgaaggcagcgagttcaactttgccaccaccagagatgtggacctgagcacagaggacatccaggagcagtggagcgaggagtttgagagccagcccaccggctgggatgtgctgggcgccgtcatcggcacagaatgtggcaccattgaaagtggcctgtccatggtgttcctgaaggatggagagaggaagctgtgcacccccagcatggacaccaccggctacggcaacctgcgcttctactttgtgatgggcggcatctgtgaccccggcaacagccatgaaaatgacatcatcctgtatgccaagattgagggcaggaaggagcacatcaccctggacaccctgagctacagcagctacaaggtgcccagcctggtgtctgtggtgatcaaccctgagctgcagaccccagccaccaagttctgcctgcggcagaagaaccaccagggccacaacagaaatgtgtgggccgtggacttcttccacgtgctgcctgtgctgcccagcaccatgagccacatgatccagttcagcatcaacctgggctgcggcacccaccagcccggcaacagcgtgtccctggagttcagcaccaaccacggccgctcctggagcctgctgcacacagaatgtctgcctgagatctgtgccggcccccacctgccccacagcacagtgtacagcagcgagaactacagcggctggaaccgcatcaccatccccctgcccaatgctgccctgaccaggaacacccgcatccgctggaggcagacaggccccatcctgggcaacatgtgggccatcgacaacgtgtacatcggccccagctgcctgaagttctgcagcggccggggccagtgcaccaggcatggctgcaagtgtgaccccggcttcagcggccctgcctgtgagatggccagccagaccttccccatgttcatcagcgagagctttggcagcagccggctgagcagctaccacaacttctacagcatcagaggagctgaggtgtcctttggctgcggcgtgctggccagcggcaaggccctggtgttcaacaaggatggccggcggcagctgatcaccagcttcctggacagcagccagagccgcttcctgcagttcaccctgcggctgggcagcaagtctgtgctgagcacctgccgggccccagaccagcctggagagggcgtgctgctgcactacagctatgacaatggcatcacctggaagctgctggagcactacagctacctgagctaccacgagccccgcatcatctctgtggagctgcctggagatgccaagcagtttggcatccagttccgctggtggcagccctaccacagcagccagagagaagatgtgtgggccattgatgagatcatcatgacctctgtgctcttcaacagcatcagcctggacttcaccaacctggtggaggtgacccagagcctgggcttctacctgggcaatgtgcagccctactgcggccatgactggaccctgtgcttcaccggggacagcaagctggccagctccatgagatatgtggagacccagagcatgcagatcggggccagctacatgatccagttcagcctggtgatgggctgcggccagaagtacaccccccacatggacaaccaggtgaagctggagtacagcaccaaccacggcctgacctggcacctggtgcaggaggagtgcctgcccagcatgcccagctgccaggagttcaccagcgccagcatctaccacgccagcgagttcacccagtggaggagagtgattgtgctgctgccccagaagacctggagcagcgccacccgcttccgctggagccagagctactacacagcccaggatgagtgggccctggacagcatctacatcggccagcagtgccccaacatgtgcagcggccacggcagctgtgaccacggcatctgccgctgtgaccagggctaccagggcacagagtgccaccctgaggccgccctgcccagcaccatcatgtctgactttgagaaccagaatggctgggagagtgactggcaggaggtgattggaggagaaattgtgaagccagagcagggctgtggggtcatcagcagcggcagcagcctgtacttcagcaaggccggcaagaggcagctggtgtcctgggacctggacacctcctgggtggactttgtgcagttctacatccagatcggcggggagagcgccagctgcaacaagccagacagccgggaggagggcgtgctgctgcagtacagcaacaacggcggcatccagtggcacctgctggccgagatgtacttcagtgacttcagcaagcccaggtttgtgtacctggagctgcctgctgctgccaagaccccctgcacccgcttccgctggtggcagcccgtcttctctggagaagattatgaccagtgggccgtggatgacatcatcatcctgtctgagaagcagaagcagatcatccctgtgatcaaccccaccctgccccagaacttctatgagaagccagcctttgactaccccatgaaccagatgtctgtgtggctgatgctggccaatgaaggcatggtgaagaatgagaccttctgtgccgccaccccatctgccatgatctttgggaagagtgatggagacagatttgctgtgacccgggacctgaccctgaagccaggctacgtgctgcagttcaagctgaacatcggctgtgccaaccagttcagcagcacagcccctgtgctgctgcagtacagccatgatgctggcatgtcctggttcctggtgaaggagggctgctacccagccagcgctgggaagggctgtgagggcaacagccgggagctgtctgagcccaccatgtaccacactggagactttgaggagtggacccgcatcaccatcgtcatccccaggagcctggccagcagcaagacccgcttccgctggatccaggagagcagcagccagaagaatgtgcccccatttggcctggatggagtgtacatcagcgagccctgccccagctactgcagcggccatggagactgcatcagcggcgtgtgcttctgtgacctgggctacacagctgcccagggcacctgtgtgtccaatgtgcccaaccacaatgagatgtttgacagatttgagggcaagctgagccccctgtggtacaagatcaccggggcccaggtgggcaccggctgcggcaccctgaatgatggcaagagcctgtacttcaacggccctgggaagcgggaggccaggacagtgcccctggacaccaggaacatccggctggtgcagttctacatccagatcggcagcaagaccagcggcatcacctgcatcaagcccaggaccagaaatgaaggcctcatcgtgcagtacagcaatgacaatggcatcctgtggcacctgctgcgggagctggacttcatgtccttcctggagccccagatcatcagcattgacctgccccaggatgccaagaccccagccacagccttccgctggtggcagccccagcacggcaagcacagcgcccagtgggccctggatgatgtgctgattggcatgaatgacagcagccagacaggcttccaggacaagtttgatggcagcattgacctgcaggccaactggtaccgcatccagggcggccaggtggacatcgactgcctgtccatggacacagccctgatcttcacagaaaatattggcaagcccaggtatgcagagacctgggacttccacgtgtctgccagcaccttcctgcagtttgagatgtccatgggctgcagcaagcccttcagcaacagccacagcgtgcagctgcagtacagcctgaacaacgggaaggactggcacctggtgacagaggagtgtgtgccccccaccatcggctgcctgcactacacagagagcagcatctacaccagcgagcgcttccagaactggaagaggatcaccgtgtacctgcccctgagcaccatcagccccaggacccgcttccgctggatccaggccaactacacagtgggcgctgacagctgggccatcgacaacgtggtgctggccagcggctgcccctggatgtgcagcggccggggcatctgtgatgctggccgctgtgtgtgtgaccggggctttggaggcccctactgtgtgcctgtggtgcccctgcccagcatcctgaaggatgacttcaatggaaacctgcacccagacctgtggccagaggtgtatggagctgagcggggcaacctgaatggagagaccatcaagagcggcaccagcctcatcttcaagggggagggcctgaggatgctgatcagccgggacctggactgcaccaacaccatgtatgtgcagttcagcctgcgcttcatcgccaagagcaccccagagaggagccacagcatcctgctgcagttcagcatcagcggcggcatcacctggcacctgatggatgagttctacttcccccagaccaccaacatcctcttcatcaacgtgcccctgccctacacagcccagaccaatgccacccgcttccggctgtggcagccctacaacaacgggaagaaggaggagatctggatcgtggatgacttcatcattgatggcaacaacgtgaacaaccctgtgatgctgctggacacctttgattttggcccccgggaggacaactggttcttctacccaggcggcaacatcggcctgtactgcccctacagcagcaaaggagcccctgaggaggacagcgccatggtgtttgtgtccaatgaggtgggggagcacagcatcaccacccgggacctgaatgtgaatgaaaacaccatcatccagtttgagatcaacgtgggctgcagcacagacagcagcagcgctgaccctgtgcggctggagttcagccgggactttggagccacctggcacctgctgctgcccctgtgctaccacagcagcagccacgtgagcagcctgtgcagcacagagcaccaccccagcagcacctactatgccggcaccatgcagggctggaggcgggaggtggtgcactttgggaagctgcacctgtgtggctctgtgcgcttccgctggtaccagggcttctacccagctggcagccagcctgtgacctgggccatcgacaacgtgtacatcggcccccagtgtgaggagatgtgcaatggccagggcagctgcatcaatggcaccaagtgcatctgtgaccccggctacagcggccccacctgcaagatcagcaccaagaacccagacttcctgaaggatgactttgagggccagctggagagtgaccgcttcctgctgatgtctgggggcaagcccagcaggaaatgtggcatcctgagcagcggcaacaacctcttcttcaatgaagatggcctgaggatgctgatgacccgggacctggacctgagccacgccaggtttgtgcagttcttcatgaggctgggctgtgggaagggcgtgcctgaccccaggagccagcctgtgctgctgcagtacagcctgaatggaggcctgtcctggagcctgctgcaggagttcctgttcagcaacagcagcaatgtgggccgctacatcgccctggagatccccctgaaggcccggagcggcagcacccggctgcgctggtggcagcccagtgaaaatggccacttctacagcccctgggtgattgaccagatcctgattggaggcaacatcagcggcaacacagtgctggaggatgacttcaccaccctggacagcaggaagtggctgctgcaccctgggggcaccaagatgcctgtgtgtggcagcactggagatgccctggtgttcatcgagaaggccagcacccgctacgtggtgtccacagatgtggccgtgaatgaagacagcttcctgcagattgactttgctgccagctgcagcgtgacagacagctgctacgccatcgagctggagtacagcgtggacctgggcctgtcctggcaccccctggtgcgggactgcctgcccaccaacgtggagtgcagccgctaccacctgcagaggatcctggtgtctgacaccttcaacaagtggacccgcatcaccctgcccctgcccccctacaccaggagccaggccacccgcttccgctggcaccagcctgccccctttgacaagcagcagacctgggccatcgacaacgtgtacatcggagatggctgcatcgacatgtgcagcggccacggccgctgcatccagggcaactgtgtgtgtgatgagcagtggggcggcctgtactgtgatgatcctgagaccagcctgcccacccagctgaaggacaacttcaacagagcccccagcagccagaactggctgactgtgaatggaggcaagctgagcacagtgtgtggggctgtggccagcggcatggccctgcacttcagcggcggctgcagccggctgctggtgacagtggacctgaacctgaccaatgctgagttcatccagttctacttcatgtatggctgcctgatcacccccaacaacagaaaccagggcgtgctgctggagtacagcgtgaatggaggcatcacctggaacctgctgatggagatcttctatgaccagtacagcaagccaggctttgtgaacatcctgctgcccccagatgccaaggagatcgccacccgcttccgctggtggcagcccaggcatgatggcctggaccagaatgactgggccatcgacaacgtgctgatcagcggcagcgctgaccagaggacagtgatgctggacaccttcagcagcgcccctgtgccccagcacgagaggagccctgcagatgctggccctgtgggcagaattgcctttgacatgttcatggaggacaagacctctgtgaatgagcactggctgttccatgatgactgcaccgtggagcgcttctgtgacagcccagatggagtgatgctgtgtggcagccatgatggccgggaggtgtatgctgtgacccatgacctgacccccacagagggctggatcatgcagttcaagatctctgtgggctgcaaggtgtctgagaagatcgcccagaaccagatccacgtgcagtacagcacagactttggagtgtcctggaactacctggtgccccagtgcctgcctgctgaccccaagtgcagcggctctgtgtcccagcccagcgtcttcttccccaccaagggctggaagaggatcacctaccccctgcctgagagcctggtgggcaaccctgtgcgcttccgcttctaccagaagtacagcgacatgcagtgggccatcgacaacttctacctgggccctggctgcctggacaactgccggggccatggagactgcctgcgggagcagtgcatctgtgaccccggctacagcggccccaactgctacctgacccacaccctgaagaccttcctgaaggagagatttgacagcgaggagatcaagccagacctgtggatgagcctggagggcggcagcacctgcacagaatgtggcatcctggccgaggacacagccctgtactttggaggcagcacagtgcggcaggccgtgacccaggacctggacctgcggggggccaagttcctgcagtactggggccgcatcggcagcgagaacaacatgaccagctgccaccggcccatctgcaggaaggagggcgtgctgctggactacagcacagatggcggcatcacctggaccctgctgcacgagatggactaccagaagtacatctctgtgagacatgactacatcctgctgcctgaagatgccctgaccaacaccacccggctgcgctggtggcagccctttgtgatcagcaatggaattgtggtgtctggagtggagcgggcccagtgggccctggacaacatcctgattggaggagctgagatcaaccccagccagctggtggacacctttgatgatgagggcaccagccatgaggagaactggagcttctacccaaatgctgtgaggacagctggcttctgtggcaaccccagcttccacctgtactggcccaacaagaagaaggacaagacccacaatgccctgagcagccgggagctgatcatccagcccggctacatgatgcagttcaagatcgtggtgggctgtgaggccaccagctgtggggacctgcacagcgtgatgctggagtacaccaaggatgcccggagtgacagctggcagctggtgcagacccagtgcctgcccagcagcagcaacagcatcggctgcagccccttccagttccacgaggccaccatctacaacagcgtgaacagcagctcctggaagaggatcaccatccagctgcctgaccacgtgagcagcagcgccacccagttccgctggatccagaagggggaggagacagagaagcagagctgggccatcgaccacgtgtacatcggggaggcctgccccaagctgtgcagcggccacggctactgcaccactggagccatctgcatctgtgatgagagcttccagggagatgactgcagcgtcttcagccatgacctgcccagctacatcaaggacaactttgaaagtgcccgggtgacagaggccaactgggagaccatccagggcggcgtgattggcagcggctgcggccagctggccccctatgcccatggagacagcctgtacttcaacggctgccagatccggcaggccgccaccaagcccctggacctgacccgggccagcaagatcatgtttgtgctgcagatcggctccatgagccagacagacagctgcaacagcgacctgagcggcccccatgctgtggacaaggctgtgctgctgcagtacagcgtgaacaacggcatcacctggcacgtgattgcccagcaccagcccaaggacttcacccaggcccagagggtgtcctacaacgtgcccctggaggccaggatgaagggcgtgctgctgcgctggtggcagcccaggcacaatggaactggacatgaccagtgggccctggaccacgtggaggtggtgctgtag
